United States Patent Application Publication US 2024/0327476 A1 - sequence listing, part 8

SEQ ID NO: 8247 - DNA, 5595 bp, Homo sapiens
  source 1..5595: mol_type = unassigned DNA
ggaaaggatcctgagaactggctagtcccagttcctctccggaaaagcagtggctctcgcttcagagatgcgctcagctttcgcctgcatcacactgcattctttaacacattattgaaattacaagcatccaaagcagtttcatgtggacagattgcatattttgaaagcctgaggtattttatcatgaaacatgccatgtggaatctttgaagcatagacctctgcgcaacacctgaataaagaatcttttacctggtatgtgacagagcttctcaccaccaccatgacaaaccaggaaaaatgggcccacctcagcccttcggaattttcccaacttcagaaatatgctgagtattctacaaagaaattaaaggatgttcttgaagaattccatggtaatggtgtgcttgcaaagtataatcctgaagggaaacaagacattcttaaccaaacaatagattttgaaggtttcaaactattcatgaagacattcctggaagccgagcttcctgatgatttcactgcacaccttttcatgtcatttagcaacaagtttcctcattctagtccaatggtaaaaagtaagcctgctctcctatcaggcggtctgagaatgaataaaggtgccatcacccctccccggactacttctcctgcaaatacgtgttccccagaagtaatccatctgaaggacattgtctgttacctgtctctgcttgaaagaggaagacctgaggataagcttgagtttatgtttcgcctttatgacacggatgggaatggcttcctggacagctcggagctagaaaatatcatcagtcagatgatgcatgttgcagaataccttgagtgggatgtcactgaacttaatccaatcctccatgaaatgatggaagaaattgactatgatcatgatggaaccgtgtctctggaggaatggattcaaggaggaatgacaacgattccacttcttgtgctcctgggcttagaaaataacgtgaaggatgatggacagcacgtgtggcgactgaagcactttaacaaacctgcctattgcaacctttgcctgaacatgctgattggcgtggggaagcagggcctctgctgttccttctgcaagtacacagtccatgagcgctgtgtggctcgagcacctccctcttgcatcaagacctatgtgaagtccaaaaggaacactgatgtcatgcaccattactgggttgaaggtaactgcccaaccaagtgtgataagtgccacaaaactgttaaatgttaccagggcctgacaggactgcattgtgtttggtgtcagatcacactgcataataaatgtgcttctcatctaaaacctgaatgtgactgtggacctttgaaggaccatattttaccacccacaacaatctgtccagtggtactgactctgcccacttcaggagtttcagttcctgaggaaagacaatcaacagtgaaaaaggaaaagagtggttcccagcagccaaacaaagtgattgacaagaataaaatgcaaagagccaactctgttactgtagatggacaaggcctgcaggtcactcctgtgcctggtactcacccacttttagtttttgtgaaccccaaaagtggtggaaaacaaggagaacgaatttacagaaaattccagtatctattaaatcctcgtcaggtttacagtctttctggaaatggaccaatgccagggttaaactttttccgtgatgttcctgacttcagagtgttagcctgtggtggagatggaaccgtgggctgggttttggattgcatagaaaaggccaatgtaggcaagcatcctccagttgcgattctgcctcttgggactggcaatgatctagcaagatgcctgcgatggggaggaggttacgaaggtgagaatctgatgaaaattctaaaagacattgaaaacagcacagaaatcatgttggacaggtggaagtttgaagtcatacctaatgacaaagatgagaaaggagacccagtgccttacagtatcatcaataattacttttccattggcgtggatgcctccattgcacacagattccacatcatgagagaaaaacacccagagaaattcaacagtagaatgaagaacaaattttggtattttgagtttggcacatctgaaactttctcagccacctgcaagaagctacatgaatctgtagaaatagaatgtgatggagtacagatagatttaataaacatctctctggaaggaattgctattttgaatataccaagcatgcatggaggatccaatctttggggagagtctaagaaaagacgaagccatcgacgaatagagaaaaaagggtctgacaaaaggaccaccgtcacagatgccaaagagttgaagtttgcaagtcaagatctcagtgaccagctgctggaggtggtcggcttggaaggagccatggagatggggcaaatatacacaggcctgaaaagtgctggccggcggctggctcagtgctcctgcgtggtcatcaggacgagcaagtctctgccaatgcaaattgatggggagccatggatgcagaccccatgcacaataaaaattacacacaagaaccaagccccaatgctgatgggcccgcctccaaaaaccggtttattctgctccctcgtcaaaaggacaagaaaccgaagcaaggaataatcctgtgttgtttcactcttagaaattgaattagcataattgggccatggaacacatatgctggaaatctttgaaccatttcaagtctcctgctcatgcaaaatcatggaagtggtttaacagtttttgttactaagctaatgtaaaattcagctattagaaaatttattgtctcagtttttataggcatctttgcatgaagaaagcagaagtttacctgaagtgatactgcatatttttggtgcatgcattcccatagatttttacatctcccacccaactcttccccaatttccttttactaacctgtgagaaaaacccgtgaaacatgaaaaaggaaataccatgggaaacgtgattctcagtgtgattccaattattacgaagcactaatcagtaacgctacaatgatcataattgcagattgctatacgtttcccttttagaatcagtgtatcagtgacctatgacttgaggagaaacttttaattcgaagattttattaaatagttgactacaataccttgctatatatacatagtttttcttcaacatcttaactcttctgagtggaaataaaaatatcaggcataaggttttctcatgctgaaaaatagaacgcggtttttattttgcttagttttctttttaattccagaaataagtgaaaacatgttacttgacagtcaagtgtggtaatatggcaagccttgttcctttctgcatgagaatctaggagagaattcataaccacaccaataacgaaatagaagttttaaactatgtgcctaatcaatgtgtttcccaccaaagattcagaaaacaatgcttgagagaaatgggttaatgcataattaattaagcattgtggagcaaatttagggttcctgtgattaattttgtgatgactaaaatgctggaaagcgagtgagttgcccattaattatgattaaaattctcacctttcacagacagacaataagccagacaacacaatcaaagctcaatagatgatttcttgcttttttcagtcatttataaatataggtgtaatttttcatggatcagttaagtacacttgaaggaagtaaatgattgtatcagtttatttctagtataaatgggtacctgtaataatactgagctcttggaagcgaatcatgcatgcaattagctccctcctcctcacctactccactcccatctttatgacatttcaaatgtttatttggaaacaacagcctagatcactgttgaaggtgttcatggcatagttggagtctctgactgtttaaagaaatcacagaacagtacttttcttttagtgtttcattaagcctatgatgtaaaatgaaatgcttctgagcagtcttgtaatattgttcattcatattgacctgcatctcatcattgcatgttttatgttttcaaacatgccataaggaaaacgagtgcctgaactgcatgatttattagtttctctccactctgcattaaagtgctaatgatttatcggttctattttgttattgattcattcatctttctttgaataacaaatagcatttagtgattctgttgaacacaatcctgtgcatggatttatggatttcaagtgaaattgctataattttagttctttggtttgaaaactcaactgaatgctgttatatcaaatagctgctctcaagcaatgtgctataatggaagattacgtacaaagtgtattcttttagtgttcctggaacattggacggtaaatatcaatcaacaataagcttaattactttaaaaataaaagcttttgaataaaattaagacataatttagcattcccaggaaaattatgattacaattgcaaatttagtacagcaatcacttgcgctggtataaaataaaaaagttgtttggcagaagagtaatccagaccaaaagaaagaaagaaatctcaaaacagtaacaagtacattactgacataatgttacgtaacacacacattgattttttgtatctatggttgcaggtaataaatattttcacatgaattgacaaaattttctacaatgggcaggcaggctttgtgtcaaaaacatattttgaagccacaaattattttatgttcgctacaacatacaattatgtcttggctaccttttatagtatatagtttgaaggcagcaacagtttgtgaatcattcttaacaatctgtacagtagaaagctgttggatagacagtgggatgagacaaattaaacaacctgcttataagatttcaatgattgaaataatgggatgcagcttcacttcagtgtagctgtataactacaattagtgctaatagtggttacattttcagtcagatggattctttggtacccataataaatgttcaaataggaatccaatttgacttttctcaactcattttctaaatacactgatgtacttgccccttcaagtatactgcccctggggtttggaaagtagtttttaaaaacgtaacttgatgggtttgaaatcagagaagatattctcatcagttttatgacagcttcatatgaaaaatatatagtttaaggaaaattctatagtatattaaaatattgaatgatgaatgttgttagctttacaagatggaaacttctcttctatgtgtgcagataaattttcagctattgagtcgccctcttttaatataggagacataaagttttaagtggctgaaactcttaaatgtaaattaatgctggacttaacagcagtcagaaacaaagagggaaaagagacatgcactctgctaaacattgctaggcactgagttgatgagattccagagagacatttcagagtaaaccttgatatccacgcttctaagagataggaagggaggtatc

SEQ ID NO: 8248 - DNA, 6917 bp, Homo sapiens
  source 1..6917: mol_type = unassigned DNA
attttcccctgagctccatcagcaagagtagcaatagcagctggagaagcggcagccagagataggcagggctggtgcttgcagccgcgcaaatcgcctcctcctcaacacacacacacacacacacacacacacacacacacacacactgcacagacttccaatatcaacgcgtcttgacataaatcaaggactaagagagactgaagaagagcgttagtcatggacaacagttctttaacacattattgaaattacaagcatccaaagcagtttcatgtggacagattgcatattttgaaagcctgaggtattttatcatgaaacatgccatgtggaatctttgaagcatagacctctgcgcaacacctgaataaagaatcttttacctggtatgtgacagagcttctcaccaccaccatgacaaaccaggaaaaatgggcccacctcagcccttcggaattttcccaacttcagaaatatgctgagtattctacaaagaaattaaaggatgttcttgaagaattccatggtaatggtgtgcttgcaaagtataatcctgaagggaaacaagacattcttaaccaaacaatagattttgaaggtttcaaactattcatgaagacattcctggaagccgagcttcctgatgatttcactgcacaccttttcatgtcatttagcaacaagtttcctcattctagtccaatggtaaaaagtaagcctgctctcctatcaggcggtctgagaatgaataaaggtgccatcacccctccccggactacttctcctgcaaatacgtgttccccagaagtaatccatctgaaggacattgtctgttacctgtctctgcttgaaagaggaagacctgaggataagcttgagtttatgtttcgcctttatgacacggatgggaatggcttcctggacagctcggagctagaaaatatcatcagtcagatgatgcatgttgcagaataccttgagtgggatgtcactgaacttaatccaatcctccatgaaatgatggaagaaattgactatgatcatgatggaaccgtgtctctggaggaatggattcaaggaggaatgacaacgattccacttcttgtgctcctgggcttagaaaataacgtgaaggatgatggacagcacgtgtggcgactgaagcactttaacaaacctgcctattgcaacctttgcctgaacatgctgattggcgtggggaagcagggcctctgctgttccttctgcaagtacacagtccatgagcgctgtgtggctcgagcacctccctcttgcatcaagacctatgtgaagtccaaaaggaacactgatgtcatgcaccattactgggttgaaggtaactgcccaaccaagtgtgataagtgccacaaaactgttaaatgttaccagggcctgacaggactgcattgtgtttggtgtcagatcacactgcataataaatgtgcttctcatctaaaacctgaatgtgactgtggacctttgaaggaccatattttaccacccacaacaatctgtccagtggtactgcagactctgcccacttcaggagtttcagttcctgaggaaagacaatcaacagtgaaaaaggaaaagagtggttcccagcagccaaacaaagtgattgacaagaataaaatgcaaagagccaactctgttactgtagatggacaaggcctgcaggtcactcctgtgcctggtactcacccacttttagtttttgtgaaccccaaaagtggtggaaaacaaggagaacgaatttacagaaaattccagtatctattaaatcctcgtcaggtttacagtctttctggaaatggaccaatgccagggttaaactttttccgtgatgttcctgacttcagagtgttagcctgtggtggagatggaaccgtgggctgggttttggattgcatagaaaaggccaatgtaggcaagcatcctccagttgcgattctgcctcttgggactggcaatgatctagcaagatgcctgcgatggggaggaggttacgaaggtgagaatctgatgaaaattctaaaagacattgaaaacagcacagaaatcatgttggacaggtggaagtttgaagtcatacctaatgacaaagatgagaaaggagacccagtgccttacagtatcatcaataattacttttccattggcgtggatgcctccattgcacacagattccacatcatgagagaaaaacacccagagaaattcaacagtagaatgaagaacaaattttggtattttgagtttggcacatctgaaactttctcagccacctgcaagaagctacatgaatctgtagaaatagaatgtgatggagtacagatagatttaataaacatctctctggaaggaattgctattttgaatataccaagcatgcatggaggatccaatctttggggagagtctaagaaaagacgaagccatcgacgaatagagaaaaaagggtctgacaaaaggaccaccgtcacagatgccaaagagttgaagtttgcaagtcaagatctcagtgaccagctgctggaggtggtcggcttggaaggagccatggagatggggcaaatatacacaggcctgaaaagtgctggccggcggctggctcagtgctcctgcgtggtcatcaggacgagcaagtctctgccaatgcaaattgatggggagccatggatgcagaccccatgcacaataaaaattacacacaagaaccaagccccaatgctgatgggcccgcctccaaaaaccggtttattctgctccctcgtcaaaaggacaagaaaccgaagcaaggaataatcctgtgttgtttcactcttagaaattgaattagcataattgggccatggaacacatatgctggaaatctttgaaccatttcaagtctcctgctcatgcaaaatcatggaagtggtttaacagtttttgttactaagctaatgtaaaattcagctattagaaaatttattgtctcagtttttataggcatctttgcatgaagaaagcagaagtttacctgaagtgatactgcatatttttggtgcatgcattcccatagatttttacatctcccacccaactcttccccaatttccttttactaacctgtgagaaaaacccgtgaaacatgaaaaaggaaataccatgggaaacgtgattctcagtgtgattccaattattacgaagcactaatcagtaacgctacaatgatcataattgcagattgctatacgtttcccttttagaatcagtgtatcagtgacctatgacttgaggagaaacttttaattcgaagattttattaaatagttgactacaataccttgctatatatacatagtttttcttcaacatcttaactcttctgagtggaaataaaaatatcaggcataaggttttctcatgctgaaaaatagaacgcggtttttattttgcttagttttctttttaattccagaaataagtgaaaacatgttacttgacagtcaagtgtggtaatatggcaagccttgttcctttctgcatgagaatctaggagagaattcataaccacaccaataacgaaatagaagttttaaactatgtgcctaatcaatgtgtttcccaccaaagattcagaaaacaatgcttgagagaaatgggttaatgcataattaattaagcattgtggagcaaatttagggttcctgtgattaattttgtgatgactaaaatgctggaaagcgagtgagttgcccattaattatgattaaaattctcacctttcacagacagacaataagccagacaacacaatcaaagctcaatagatgatttcttgcttttttcagtcatttataaatataggtgtaatttttcatggatcagttaagtacacttgaaggaagtaaatgattgtatcagtttatttctagtataaatgggtacctgtaataatactgagctcttggaagcgaatcatgcatgcaattagctccctcctcctcacctactccactcccatctttatgacatttcaaatgtttatttggaaacaacagcctagatcactgttgaaggtgttcatggcatagttggagtctctgactgtttaaagaaatcacagaacagtacttttcttttagtgtttcattaagcctatgatgtaaaatgaaatgcttctgagcagtcttgtaatattgttcattcatattgacctgcatctcatcattgcatgttttatgttttcaaacatgccataaggaaaacgagtgcctgaactgcatgatttattagtttctctccactctgcattaaagtgctaatgatttatcggttctattttgttattgattcattcatctttctttgaataacaaatagcatttagtgattctgttgaacacaatcctgtgcatggatttatggatttcaagtgaaattgctataattttagttctttggtttgaaaactcaactgaatgctgttatatcaaatagctgctctcaagcaatgtgctataatggaagattacgtacaaagtgtattcttttagtgttcctggaacattggacggtaaatatcaatcaacaataagcttaattactttaaaaataaaagcttttgaataaaattaagacataatttagcattcccaggaaaattatgattacaattgcaaatttagtacagcaatcacttgcgctggtataaaataaaaaagttgtttggcagaagagtaatccagaccaaaagaaagaaagaaatctcaaaacagtaacaagtacattactgacataatgttacgtaacacacacattgattttttgtatctatggttgcaggtaataaatattttcacatgaattgacaaaattttctacaatgggcaggcaggctttgtgtcaaaaacatattttgaagccacaaattattttatgttcgctacaacatacaattatgtcttggctaccttttatagtatatagtttgaaggcagcaacagtttgtgaatcattcttaacaatctgtacagtagaaagctgttggatagacagtgggatgagacaaattaaacaacctgcttataagatttcaatgattgaaataatgggatgcagcttcacttcagtgtagctgtataactacaattagtgctaatagtggttacattttcagtcagatggattctttggtacccataataaatgttcaaataggaatccaatttgacttttctcaactcattttctaaatacactgatgtacttgccccttcaagtatactgcccctggggtttggaaagtagtttttaaaaacgtaacttgatgggtttgaaatcagagaagatattctcatcagttttatgacagcttcatatgaaaaatatatagtttaaggaaaattctatagtatattaaaatattgaatgatgaatgttgttagctttacaagatggaaacttctcttctatgtgtgcagataaattttcagctattgagtcgccctcttttaatataggagacataaagttttaagtggctgaaactcttaaatgtaaattaatgctggacttaacagcagtcagaaacaaagagggaaaagagacatgcactctgctaaacattgctaggcactgagttgatgagattccagagagacatttcagagtaaaccttgatatccacgcttctaagagataggaagggaggtatctacatagaaccagaaagtttaaaagacgtaaatttattttttccacttccttgtgtacaccatgtatttcatgtgaaaatgctgatcaatttattgtggtggaaggagatatcttgcaggaagtttaaaaattaacattttaaaacagtttttattttatttaaaacaggttcatgtgatcatagccagaataaaacaaaaggctcagatgtttagcctagtctactgcagacagaaatttaaatccagtgagggctaatgaatcacatacgtgtttccacattttattttgttttcgttttttaggcatatgggaagtagttgcaatttttcagggaagaatatgttttgaatctcacactgtattctccttgaatctcacactgtattcttgaatgagacaagattttgagatcattcttttcctttttgtgtcaacgttagtttgttgttcattggttataaaaaggaaaatgtggccaggcgcaatggcttacgcctgtaatcccagcactttgggagacagaggcaggcagatcacaaggtcaggagttcaagaccagcctggccaatatggtgaaacctcgtctctactaaaaatacaaaaattagccaggcatggtggcacatgcctgtaatcccagctactcgggaggctgaggcagaagaattgcttgaactcgggaggctgcggttgcagtgagccaagatcacaccactgcactccagcctgggtgacagagccagactctgtctcaaaaaaaaaaaggaaaatgtacttttcatggcacgtataacccccaaaggattattcaatactgaacaattaaataataattgaataatattgaatcatgttctccgttatttttcaaataactgaataatatctctattaaaagattaaacccttgtaacatatattaaagctgtaaactttaagaaaataaataaataaaaccctgtaaaagagcttttattttgtgagaggcagaaatcaccacttaaaactcccaattaaattctgctatatttaaataaagtttgagtaaactcacatttgagagattctgtataaccttattgtgtttaaaaacatggaacttaattatagtaccttaattattttctcagaaatgatatatacaatatcctgttttttgaaataaaaacgttaaccactca

SEQ ID NO: 8249 - DNA, 3257 bp, Homo sapiens
  source 1..3257: mol_type = unassigned DNA
ggaatctttgaagcatagacctctgcgcaacacctgaataaagaatcttttacctggtatgtgacagagcttctcaccaccaccatgacaaaccaggaaaaatgggcccacctcagcccttcggaattttcccaacttcagaaatatgctgagtattctacaaagaaattaaaggatgttcttgaagaattccatggtaatggtgtgcttgcaaagtataatcctgaagggaaacaagacattcttaaccaaacaatagattttgaaggtttcaaactattcatgaagacattcctggaagccgagcttcctgatgatttcactgcacaccttttcatgtcatttagcaacaagtttcctcattctagtccaatggtaaaaagtaagcctgctctcctatcaggcggtctgagaatgaataaaggtgccatcacccctccccggactacttctcctgcaaatacgtgttccccagaagtaatccatctgaaggacattgtctgttacctgtctctgcttgaaagaggaagacctgaggataagcttgagtttatgtttcgcctttatgacacggatgggaatggcttcctggacagctcggagctagaaaatatcatcagtcagatgatgcatgttgcagaataccttgagtgggatgtcactgaacttaatccaatcctccatgaaatgatggaagaaattgactatgatcatgatggaaccgtgtctctggaggaatggattcaaggaggaatgacaacgattccacttcttgtgctcctgggcttagaaaataacgtgaaggatgatggacagcacgtgtggcgactgaagcactttaacaaacctgcctattgcaacctttgcctgaacatgctgattggcgtggggaagcagggcctctgctgttccttctgcaagtacacagtccatgagcgctgtgtggctcgagcacctccctcttgcatcaagacctatgtgaagtccaaaaggaacactgatgtcatgcaccattactgggttgaaggtaactgcccaaccaagtgtgataagtgccacaaaactgttaaatgttaccagggcctgacaggactgcattgtgtttggtgtcagatcacactgcataataaatgtgcttctcatctaaaacctgaatgtgactgtggacctttgaaggaccatattttaccacccacaacaatctgtccagtggtactgcagactctgcccacttcaggagtttcagttcctgaggaaagacaatcaacagtgaaaaaggaaaagagtggttcccagcagccaaacaaagtgattgacaagaataaaatgcaaagagccaactctgttactgtagatggacaaggcctgcaggtcactcctgtgcctggtactcacccacttttagtttttgtgaaccccaaaagtggtggaaaacaaggagaacgaatttacagaaaattccagtatctattaaatcctcgtcaggtttacagtctttctggaaatggaccaatgccagggttaaactttttccgtgatgttcctgacttcagagtgttagcctgtggtggagatggaaccgtgggctgggttttggattgcatagaaaaggccaatgtaggcaagcatcctccagttgcgattctgcctcttgggactggcaatgatctagcaagatgcctgcgatggggaggaggttacgaaggtgagaatctgatgaaaattctaaaagacattgaaaacagcacagaaatcatgttggacaggtggaagtttgaagtcatacctaatgacaaagatgagaaaggagacccagtgccttacagtatcatcaataattacttttccattggcgtggatgcctccattgcacacagattccacatcatgagagaaaaacacccagagaaattcaacagtagaatgaagaacaaattttggtattttgagtttggcacatctgaaactttctcagccacctgcaagaagctacatgaatctgtagaaatagaatgtgatggagtacagatagatttaataaacatctctctggaaggaattgctattttgaatataccaagcatgcatggaggatccaatctttggggagagtctaagaaaagacgaagccatcgacgaatagagaaaaaagggtctgacaaaaggaccaccgtcacagatgccaaagagttgaagtttgcaagtcaagatctcagtgaccagctgctggaggtggtcggcttggaaggagccatggagatggggcaaatatacacaggcctgaaaagtgctggccggcggctggctcagtgctcctgcgtggtcatcaggacgagcaagtctctgccaatgcaaattgatggggagccatggatgcagaccccatgcacagtgagtacagagtagttgatatgctatgtcaatctcagttttgctttcctctttgactaaataaccacaataactgatttttttctttatttcttttcaacctatcagcaaatagtctttttgttgttgttgttatgtgtgtgtcagagccactacatttaggttgtagacattatatacccttggcaatgatttagctcttgaatgtttgtgttagcctaagtataaatagatcttttaaatagatcaattataaaccatagatcaattataaactatggagctaaacaaaatattaataaaagtttatctgaaacttttttgtttatttcagagcacattattagaatattatttgcaagaaatgcagacctaagcttatatgtgaacttatttctcagcttttctatgcctccatttggggatttgagggctttcttctccataagaaaaaaatttctctccagtttctaccataattaattgtgttttccagaatgaggtattatttaaggcagacactgcccctctcaaaaaaaaatcagttttcatttgcatagtgaatattttattgcatttcaaaaacatgctaggaactgcttttggcactgggagtagacacatgaacaagaccaacagtgtaatttccttcaagttacttacattcctataatagaggaccgaataaataaacaactacatgataaatataacttcagactgtgagagttattaaaaaataaggtgaaatgatgataagaagctggattaggtgtggagaataaatactacttgagataagggagacctctttgaaaggacatagccaaaagcttagtataaaattaaaaaaaataaaaaaaaaa

SEQ ID NO: 8250 - DNA, 3651 bp, Homo sapiens
  source 1..3651: mol_type = unassigned DNA
atctttcagacactagttccaatgggccgggtgttctggaagggggtggcagtggggaggaggatgctgtgagcagagttcttgaagctccactcctctggggaagccgagctgtgtgggagccttcttactgtgccgggagcgtgtgaattggaaaggatcctgagaactggctagtcccagttcctctccggaaaagcagtggctctcgcttcagagatgcgctcagctttcgcctgcatcacactgcattctttaacacattattgaaattacaagcatccaaagcagtttcatgtggacagattgcatattttgaaagcctgaggtattttatcatgaaacatgccatgtggaatctttgaagcatagacctctgcgcaacacctgaataaagaatcttttacctggtatgtgacagagcttctcaccaccaccatgacaaaccaggaaaaatgggcccacctcagcccttcggaattttcccaacttcagaaatatgctgagtattctacaaagaaattaaaggatgttcttgaagaattccatggtaatggtgtgcttgcaaagtataatcctgaagggacaatagattttgaaggtttcaaactattcatgaagacattcctggaagccgagcttcctgatgatttcactgcacaccttttcatgtcatttagcaacaagtttcctcattctagtccaatggtaaaaagtaagcctgctctcctatcaggcggtctgagaatgaataaaggtgccatcacccctccccggactacttctcctgcaaatacgtgttccccagaagtaatccatctgaaggacattgtctgttacctgtctctgcttgaaagaggaagacctgaggataagcttgagtttatgtttcgcctttatgacacggatgggaatggcttcctggacagctcggagctagaaaatatcatcagtcagatgatgcatgttgcagaataccttgagtgggatgtcactgaacttaatccaatcctccatgaaatgatggaagaaattgactatgatcatgatggaaccgtgtctctggaggaatggattcaaggaggaatgacaacgattccacttcttgtgctcctgggcttagaaaataacgtgaaggatgatggacagcacgtgtggcgactgaagcactttaacaaacctgcctattgcaacctttgcctgaacatgctgattggcgtggggaagcagggcctctgctgttccttctgcaagtacacagtccatgagcgctgtgtggctcgagcacctccctcttgcatcaagacctatgtgaagtccaaaaggaacactgatgtcatgcaccattactgggttgaaggtaactgcccaaccaagtgtgataagtgccacaaaactgttaaatgttaccagggcctgacaggactgcattgtgtttggtgtcagatcacactgcataataaatgtgcttctcatctaaaacctgaatgtgactgtggacctttgaaggaccatattttaccacccacaacaatctgtccagtggtactgactctgcccacttcaggagtttcagttcctgaggaaagacaatcaacagtgaaaaaggaaaagagtggttcccagcagccaaacaaagtgattgacaagaataaaatgcaaagagccaactctgttactgtagatggacaaggcctgcaggtcactcctgtgcctggtactcacccacttttagtttttgtgaaccccaaaagtggtggaaaacaaggagaacgaatttacagaaaattccagtatctattaaatcctcgtcaggtttacagtctttctggaaatggaccaatgccagggttaaactttttccgtgatgttcctgacttcagagtgttagcctgtggtggagatggaaccgtgggctgggttttggattgcatagaaaaggccaatgtaggcaagcatcctccagttgcgattctgcctcttgggactggcaatgatctagcaagatgcctgcgatggggaggaggttacgaaggtgagaatctgatgaaaattctaaaagacattgaaaacagcacagaaatcatgttggacaggtggaagtttgaagtcatacctaatgacaaagatgagaaaggagacccagtgccttacagtatcatcaataattacttttccattggcgtggatgcctccattgcacacagattccacatcatgagagaaaaacacccagagaaattcaacagtagaatgaagaacaaattttggtattttgagtttggcacatctgaaactttctcagccacctgcaagaagctacatgaatctgtagaaatagaatgtgatggagtacagatagatttaataaacatctctctggaaggaattgctattttgaatataccaagcatgcatggaggatccaatctttggggagagtctaagaaaagacgaagccatcgacgaatagagaaaaaagggtctgacaaaaggaccaccgtcacagatgccaaagagttgaagtttgcaagtcaagatctcagtgaccagctgctggaggtggtcggcttggaaggagccatggagatggggcaaatatacacaggcctgaaaagtgctggccggcggctggctcagtgctcctgcgtggtcatcaggacgagcaagtctctgccaatgcaaattgatggggagccatggatgcagaccccatgcacaataaaaattacacacaagaaccaagccccaatgctgatgggcccgcctccaaaaaccggtttattctgctccctcgtcaaaaggacaagaaaccgaagcaaggaataatcctgtgttgtttcactcttagaaattgaattagcataattgggccatggaacacatatgctggaaatctttgaaccatttcaagtctcctgctcatgcaaaatcatggaagtggtttaacagtttttgttactaagctaatgtaaaattcagctattagaaaatttattgtctcagtttttataggcatctttgcatgaagaaagcagaagtttacctgaagtgatactgcatatttttggtgcatgcattcccatagatttttacatctcccacccaactcttccccaatttccttttactaacctgtgagaaaaacccgtgaaacatgaaaaaggaaataccatgggaaacgtgattctcagtgtgattccaattattacgaagcactaatcagtaacgctacaatgatcataattgcagattgctatacgtttcccttttagaatcagtgtatcagtgacctatgacttgaggagaaacttttaattcgaagattttattaaatagttgactacaataccttgctatatatacatagtttttcttcaacatcttaactcttctgagtggaaataaaaatatcaggcataaggttttctcatgctgaaaaatagaacgcggtttttattttgcttagttttctttttaattccagaaataagtgaaaacatgttacttgacagtcaagtgtggtaatatggcaagccttgttcctttctgcatgagaatctaggagagaattcataaccacaccaataacgaaatagaagttttaaactatgtgcctaatcaatgtgtttcccaccaaagattcagaaa

SEQ ID NO: 8251 - DNA, 494 bp, Homo sapiens
  source 1..494: mol_type = unassigned DNA
acataaattagtaccttactggctagggaatgttgaatcacagttggatgaagaaacaattcatgttaatgtttctctaaagttctttaacacattattgaaattacaagcatccaaagcagtttcatgtggacagattgcatattttgaaagcctgaggtattttatcatgaaacatgccatgtggaatctttgaagcatagacctctgcgcaacacctgaataaagaatcttttacctggtatgtgacagagcttctcaccaccaccatgacaaaccaggaaaaatgggcccacctcagcccttcggaattttcccaacttcagaaatatgctgagtattctacaaagaaattaaaggatgttcttgaagaattccatggtaatggtgtgcttgcaaagtataatcctgaagggaaacaagacattcttaaccaaacaatagattttgaaggtttcaaactattcatgaagacattcctggaagccgagctt

SEQ ID NO: 8252 - DNA, 3397 bp, Homo sapiens
  source 1..3397: mol_type = unassigned DNA
gcaaatgatcagagacgggtgaactgcaggcagcctgtgttgctgcctggaagtagatttccatctttcagacactagttccaatgggccgggtgttctggaagggggtggcagtggggaggaggatgctgtgagcagagttcttgaagctccactcctctggggaagccgagctgtgtgggagccttcttactgtgccgggagcgtgtgaattggaaaggatcctgagaactggctagtcccagttcctctccggaaaagcagtggctctcgcttcagagatgcgctcagctttcgcctgcatcacactgcattctttaacacattattgaaattacaagcatccaaagcagtttcatgtggacagattgcatattttgaaagcctgaggtattttatcatgaaacatgccatgtggaatctttgaagcatagacctctgcgcaacacctgaataaagaatcttttacctggtatgtgacagagcttctcaccaccaccatgacaaaccaggaaaaatgggcccacctcagcccttcggaattttcccaacttcagaaatatgctgagtattctacaaagaaattaaaggatgttcttgaagaattccatggtaatggtgtgcttgcaaagtataatcctgaagggacaatagattttgaaggtttcaaactattcatgaagacattcctggaagccgagcttcctgatgatttcactgcacaccttttcatgtcatttagcaacaagtttcctcattctagtccaatggtaaaaagtaagcctgctctcctatcaggcggtctgagaatgaataaaggtgccatcacccctccccggactacttctcctgcaaatacgtgttccccagaagtaatccatctgaaggacattgtctgttacctgtctctgcttgaaagaggaagacctgaggataagcttgagtttatgtttcgcctttatgacacggatgggaatggcttcctggacagctcggagctagaaaatatcatcagtcagatgatgcatgttgcagaataccttgagtgggatgtcactgaacttaatccaatcctccatgaaatgatggaagaaattgactatgatcatgatggaaccgtgtctctggaggaatggattcaaggaggaatgacaacgattccacttcttgtgctcctgggcttagaaaataacgtgaaggatgatggacagcacgtgtggcgactgaagcactttaacaaacctgcctattgcaacctttgcctgaacatgctgattggcgtggggaagcagggcctctgctgttccttctgcaagtacacagtccatgagcgctgtgtggctcgagcacctccctcttgcatcaagacctatgtgaagtccaaaaggaacactgatgtcatgcaccattactgggttgaaggtaactgcccaaccaagtgtgataagtgccacaaaactgttaaatgttaccagggcctgacaggactgcattgtgtttggtgtcagatcacactgcataataaatgtgcttctcatctaaaacctgaatgtgactgtggacctttgaaggaccatattttaccacccacaacaatctgtccagtggtactggaaagacaatcaacagtgaaaaaggaaaagagtggttcccagcagccaaacaaagtgattgacaagaataaaatgcaaagagccaactctgttactgtagatggacaaggcctgcaggtcactcctgtgcctggtactcacccacttttagtttttgtgaaccccaaaagtggtggaaaacaaggagaacgaatttacagaaaattccagtatctattaaatcctcgtcaggtttacagtctttctggaaatggaccaatgccagggttaaactttttccgtgatgttcctgacttcagagtgttagcctgtggtggagatggaaccgtgggctgggttttggattgcatagaaaaggccaatgtaggcaagcatcctccagttgcgattctgcctcttgggactggcaatgatctagcaagatgcctgcgatggggaggaggttacgaaggtgagaatctgatgaaaattctaaaagacattgaaaacagcacagaaatcatgttggacaggtggaagtttgaagtcatacctaatgacaaagatgagaaaggagacccagtgccttacagtatcatcaataattacttttccattggcgtggatgcctccattgcacacagattccacatcatgagagaaaaacacccagagaaattcaacagtagaatgaagaacaaattttggtattttgagtttggcacatctgaaactttctcagccacctgcaagaagctacatgaatctgtagaaatagaatgtgatggagtacagatagatttaataaacatctctctggaaggaattgctattttgaatataccaagcatgcatggaggatccaatctttggggagagtctaagaaaagacgaagccatcgacgaatagagaaaaaagggtctgacaaaaggaccaccgtcacagatgccaaagagttgaagtttgcaagtcaagatctcagtgaccagctgctggaggtggtcggcttggaaggagccatggagatggggcaaatatacacaggcctgaaaagtgctggccggcggctggctcagtgctcctgcgtggtcatcaggacgagcaagtctctgccaatgcaaattgatggggagccatggatgcagaccccatgcacaataaaaattacacacaagaaccaagccccaatgctgatgggcccgcctccaaaaaccggtttattctgctccctcgtcaaaaggacaagaaaccgaagcaaggaataatcctgtgttgtttcactcttagaaattgaattagcataattgggccatggaacacatatgctggaaatctttgaaccatttcaagtctcctgctcatgcaaaatcatggaagtggtttaacagtttttgttactaagctaatgtaaaattcagctattagaaaatttattgtctcagtttttataggcatctttgcatgaagaaagcagaagtttacctgaagtgatactgcatatttttggtgcatgcattcccatagatttttacatctcccacccaactcttccccaatttccttttactaacctgtgagaaaaacccgtgaaacatgaaaaaggaaataccatgggaaacgtgattctcagtgtgattccaattattacgaagcactaatcagtaacgctacaatgatcataattgcagattgctatacgtttcccttttagaatcagtgtatcagtgacctatgacttgaggagaaacttttaattcgaagattttattaaatagttgactacaataccttgctatatatacat

SEQ ID NO: 8253 - DNA, 6297 bp, Homo sapiens
  source 1..6297: mol_type = unassigned DNA
tggcccggcagcatggcggcggcggcgggcgcccctccgccgggtcccccgcaaccgcctccgccgccgccgcccgaggagtcgtccgacagcgagcccgaggcggagcccggctccccacagaagctcatccgcaaggtgtccacgtcgggtcagatccgacagaagaccatcatcaaagaggggatgctgaccaaacagaacaattcattccagcgatcaaaaaggagatactttaagcttcgagggcgaacgctttactatgccaaaacggcaaagtcaatcatatttgatgaggtggatctgacagatgccagcgtagctgaatccagtaccaaaaacgtcaacaacagttttacggtcataactccatgcaggaagctcatcttgtgtgctgataacagaaaagaaatggaagattggattgcagcattaaagactgtgcagaacagggagcactttgagcccacccagtacagcatggaccacttctcagggatgcacaattggtacgcctgttcccacgcgaggccgacctactgcaatgtgtgccgtgaggctctgtctggggtcacgtcgcacgggctgtcctgcgaggtgtgcaaatttaaggcccacaagcgctgtgctgtgcgtgcaaccaataactgcaagtggaccacactggcctcgatcgggaaggacatcattgaagatgcagatgggattgcaatgccccaccagtggttggaaggaaacctacctgtgagcgccaagtgcactgtgtgcgacaagacctgtggcagtgtgctgcgcctgcaggactggcgctgcctctggtgcaaggccatggttcacacatcgtgtaaagaatccttgctgaccaagtgcccacttggcctgtgcaaagtgtcagtcatcccacccacggctctcaacagcatcgactccgatgggttctggaaggccagctgtcctccttcttgcacaagcccactgttggtcttcgtcaattcaaaaagtggggacaaccagggtgtgaagttcctcagaagattcaaacagctactaaaccccgcccaggtcttcgacctcatgaacggaggcccacacctcggcttacggttattccagaagtttgacacattccggattctggtttgtggcggggatggaagtgttggctgggtcctctccgaaatcgacagcctcaaccttcataaacagtgtcagctgggagtgctgccgctcggcacagggaacgacttggcccgagtactgggctggggctcagcctgcgatgacgacacccagctcccccagatcttggagaagttggagagagccagcaccaagatgctggacaggtggagcgtcatggcatacgaggccaagctcccccggcaggcctcctcctctaccgtcaccgaagacttcagcgaggattccgaggtacagcagattctcttctatgaagactcggttgcagcccacctttctaaaatcctcacctcggaccagcactcggtggtcatctcctcggccaaagtgctctgtgagacggtgaaggacttcgtggcacgggtggggaaggcctatgagaagacgaccgagagctcggaggagtcagaggtcatggccaagaagtgctctgtcctgaaagagaagctggattcccttctcaagaccttggacgatgagtcccaggcctcgtcctctctgcccaacccgccccccaccattgccgaggaggctgaagatggagatgggtcgggcagcatctgcggttccaccggagaccgcttggtggcatcagcttgcccggcccggccgcagatattccggcctcgagaacagctcatgctgagagccaacagcctgaagaaagcaattcgtcagatcatagaacacacagaaaaagctgtcgatgagcagaatgcccagacccaggagcaggagggcttcgtcctgggcctctctgagtcagaggagaagatggaccacagagtgtgcccaccactgtcccacagcgagagcttcggggtccccaaggggaggagccagcgcaaagtgtcgaaatctccgtgtgaaaagctgatcagcaaagggagtctgtccctaggcagttctgcttcccttccgccccagccgggaagccgggacggcctgcctgcgctcaacaccaagatcctgtacccaaatgtccgggctggaatgtctggttccttacccggtggctcagtcatcagtcgcctgttaattaatgctgatcccttcaactctgaaccagaaaccctagagtattacacggagaaatgtgtcatgaacaactattttggcattggcctggatgcgaagatatccctggactttaacaacaagcgcgatgagcacccagagaagtgcaggagccgaaccaagaacatgatgtggtatggagttcttggaaccaaagagttgctgcacagaacctacaagaacctggagcaaaaggtcttgctggagtgtgacgggcgacccatcccactccccagtcttcagggaattgctgtccttaacattcccagctatgccggaggaaccaacttctgggggggtaccaaggaagatgatactttcgcagctccatcattcgatgacaagattctggaggtggtcgccgtgttcggcagcatgcagatggccgtctctcgagtcatcaggctacagcatcatcggatcgcccagtgtcgcacggtgaagatctccatccttggggatgagggcgtgcctgtgcaggtggacggagaggcctgggtccagccgccagggtacattcggattgtccacaagaaccgggcacagacactgaccagagacagggcatttgagagcaccctgaagtcctgggaagacaagcagaagtgcgagctgccccgccctccatcctgttccctgcacccggagatgctgtccgaggaggaggccacccagatggaccagtttgggcaggcagcaggggtcctcattcacagtatccgagaaatagctcagtctcaccgggacatggagcaggaactggcccacgccgtcaatgccagctccaagtccatggaccgtgtgtatggcaagcccagaaccacagaggggctcaactgcagcttcgtcctggaaatggtgaataacttcagagctctgcgcagtgagacggagctgctgctgtctgggaagatggccctgcagctggatccgcctcagaaggagcagctggggagtgctcttgccgagatggaccgacagctcaggaggctggcagacaccccgtggctctgccagtccgcagagcccggcgacgaagagagtgtgatgctggatcttgccaagcgcagtcgcagtggtaaattccgcctcgtgaccaagtttaaaaaggagaaaaacaacaagaacaaagaagctcacagtagcctgggagccccggttcacctctgggggacagaggaggttgctgcctggctggagcacctcagtctctgtgagtataaggacatcttcacacggcacgacatccggggctctgagctcctgcacctggagcggagggacctcaaggacctgggcgtgaccaaggtgggccacatgaagaggatcctgtgtggcatcaaggagctgagccgcagcgcccccgccgtcgaggcctagcctctgtcctctcagcctgtggcctccacatccccgccgccgaggcctagcctccgccctctcagcctgtggcctctgcgcctcctgccactgaggccctgggcagatgctgcagcccgcccccttctcatggtgctacttcctctgtcagctacagaaagcctccgtgacaccgtccaccagagctctggggtctcgaacataacaacacagctacctttgaaacaacactttctccagctcagagtcacctggggcacatgtgtcacggccactcagctctcgcccgcctgtgctgtgggccagggaatccagcggcgtctggcctcctgggcactgcttgcctggcctcgtgcttggattgtcccgggggctcctctccgtgtgtccttctgtggccgcaccgtgtggctccgcctcctggcccccagccagttctcagaaacgtggctggggcccagcacagcagcctgcaagggcccctgtttgttgatgcagcttttgttgaacaaaaatcgtgctctttcctggtttgaaagtagcatggatgtttccagtcttgttgattgtaatttgacgtgaagagaaaaaaaaattcctcctgcgtgagccaaggcagcgggtgctgtttcccaggcggggagcccctccctgggtgtcacagggcctgtgctcctccctcctccatcctctctcctcccgctcctccctccccccactgtgggctggggacgcctgcccttctgtctccggacgctctaggcgagttcagcttggggtgtgagtgagacagcttgccagctgcatccctgcagacagaggatgtgtgtccacatgagtgtttctgtgtgggaaatgcttcctggctctgggaaactttttctgcccattctgtggttcccagggagcgtggccctggtgggccaggggtggtttgacctcttcagcccgtccggtggcctggaggccggaggctctcctgagtgtctgcccctgcagtggcttcttgtcgcctgctgctgggcgtgatgtcgctggaggtgctggcagggactctgatttggtggtccgcgctgcccctgccctgcctctgtcctggctctgaactagtagatgatggtgccagagggcagggagctcgcctggggagagggctgtgccccgtagggacagtgcccaggtgaaggatgcccctggtcctccagggcactgactttgcccttttttcccgttgatagtcatggctcagaggtgcttgtaaatgtcttgggaagaggtttctgtaacccctgccctggtgtgaggaggaaatggctctggcctggctgcctggccgtggcttctctttggctcccaaagagaaggacagtgttgggagtatctgccgtggcttctctttggctcccaaagagaaggacagtgttgggagtatctgccggcgctgtccaggtcctttagtcagcgtcactccatctgatgtgcagaagctgggctgcacctgcgggggtgggcatagaccgggctgggtctgcagcagcccctggtcctgagcaggcggcagtgaacagcactggcccacctcccactcacagcccctctgtcccctctgcagtgcacccaggtgggcccctctgcgtgcctttgggtgctcccctctcgtggtcgttctggcccgaggcccttagagtatggaggctgagccaggccttgggtttccccagcacagcctcctgtcgctgcatgcgacgtgttgggatttttggatgaaagactctcccacgctctgttggtggacttagctgcctcactggaagtgatgtgggtggaaggtggttgtatgttaccttttccacctctcattgttttccccagaacattgtagatgggggttggcagagggagaaataagccagccacggcagtcgcttggtttcccaggtggaatgggctaacacaggagatgatgggaacctgtcccgcagtccctgcatgaccattggccctgctggcctggcgatgtgggcatcctggggttcttagggtcccagaacaagccccaggcaagctggaacttgggtggggaggggacatgaggaggataaacagctgactgtggcttcaaggacatcagggccaccccaagtcctcagtgtcctactcctggcaaggagttgggtttggatcaaaagtgtttaaaattaatatgttgtcagtgattagaacaacactgtttacataaaaaccatttttctaattctaacaagttagaatgtgaggaaggaatgaacatgagtgtttaggaacctgccctttggtgctgggctggcgtcccgcactggggtgtcctcgctgtctgggggctgctctgctgccccggcccaggtccccttgtggtgttgccagacgggcctcatggtctgctgtgcagagagaggcaggaaggatccctgaagagtcttggagaaaaggttctgtgccctcaggtggggcttaccccctcgtatttataatcttaatttatatagtgaccaccgtggaaacaaacgcctcttgtattgtcatgtacatagtccatacctgagtgctgtacataagttgttctgtgtataaataaaacaagcctgtttttgatcttccatc

SEQ ID NO: 8254 - DNA, 6228 bp, Homo sapiens
  source 1..6228: mol_type = unassigned DNA
agagacacgaatatgtttcagccgcaacaggctgcgtttcagccggaagagtgaaagggcaccttgaaaacgcaagtttatgaatatgtttctgtactttcagaccatcatcaaagaggggatgctgaccaaacagaacaattcattccagcgatcaaaaaggagatactttaagcttcgagggcgaacgctttactatgccaaaacggcaaagtcaatcatatttgatgaggtggatctgacagatgccagcgtagctgaatccagtaccaaaaacgtcaacaacagttttacggtcataactccatgcaggaagctcatcttgtgtgctgataacagaaaagaaatggaagattggattgcagcattaaagactgtgcagaacagggagcactttgagcccacccagtacagcatggaccacttctcagggatgcacaattggtacgcctgttcccacgcgaggccgacctactgcaatgtgtgccgtgaggctctgtctggggtcacgtcgcacgggctgtcctgcgaggtgtgcaaatttaaggcccacaagcgctgtgctgtgcgtgcaaccaataactgcaagtggaccacactggcctcgatcgggaaggacatcattgaagatgcagatgggattgcaatgccccaccagtggttggaaggaaacctacctgtgagcgccaagtgcactgtgtgcgacaagacctgtggcagtgtgctgcgcctgcaggactggcgctgcctctggtgcaaggccatggttcacacatcgtgtaaagaatccttgctgaccaagtgcccacttggcctgtgcaaagtgtcagtcatcccacccacggctctcaacagcatcgactccgatgggttctggaaggccagctgtcctccttcttgcacaagcccactgttggtcttcgtcaattcaaaaagtggggacaaccagggtgtgaagttcctcagaagattcaaacagctactaaaccccgcccaggtcttcgacctcatgaacggaggcccacacctcggcttacggttattccagaagtttgacacattccggattctggtttgtggcggggatggaagtgttggctgggtcctctccgaaatcgacagcctcaaccttcataaacagtgtcagctgggagtgctgccgctcggcacagggaacgacttggcccgagtactgggctggggctcagcctgcgatgacgacacccagctcccccagatcttggagaagttggagagagccagcaccaagatgctggacaggtggagcgtcatggcatacgaggccaagctcccccggcaggcctcctcctctaccgtcaccgaagacttcagcgaggattccgaggtacagcagattctcttctatgaagactcggttgcagcccacctttctaaaatcctcacctcggaccagcactcggtggtcatctcctcggccaaagtgctctgtgagacggtgaaggacttcgtggcacgggtggggaaggcctatgagaagacgaccgagagctcggaggagtcagaggtcatggccaagaagtgctctgtcctgaaagagaagctggattcccttctcaagaccttggacgatgagtcccaggcctcgtcctctctgcccaacccgccccccaccattgccgaggaggctgaagatggagatgggtcgggcagcatctgcggttccaccggagaccgcttggtggcatcagcttgcccggcccggccgcagatattccggcctcgagaacagctcatgctgagagccaacagcctgaagaaagcaattcgtcagatcatagaacacacagaaaaagctgtcgatgagcagaatgcccagacccaggagcaggagggcttcgtcctgggcctctctgagtcagaggagaagatggaccacagagtgtgcccaccactgtcccacagcgagagcttcggggtccccaaggggaggagccagcgcaaagtgtcgaaatctccgtgtgaaaagctgatcagcaaagggagtctgtccctaggcagttctgcttcccttccgccccagccgggaagccgggacggcctgcctgcgctcaacaccaagatcctgtacccaaatgtccgggctggaatgtctggttccttacccggtggctcagtcatcagtcgcctgttaattaatgctgatcccttcaactctgaaccagaaaccctagagtattacacggagaaatgtgtcatgaacaactattttggcattggcctggatgcgaagatatccctggactttaacaacaagcgcgatgagcacccagagaagtgcaggagccgaaccaagaacatgatgtggtatggagttcttggaaccaaagagttgctgcacagaacctacaagaacctggagcaaaaggtcttgctggagtgtgacgggcgacccatcccactccccagtcttcagggaattgctgtccttaacattcccagctatgccggaggaaccaacttctgggggggtaccaaggaagatgatactttcgcagctccatcattcgatgacaagattctggaggtggtcgccgtgttcggcagcatgcagatggccgtctctcgagtcatcaggctacagcatcatcggatcgcccagtgtcgcacggtgaagatctccatccttggggatgagggcgtgcctgtgcaggtggacggagaggcctgggtccagccgccagggtacattcggattgtccacaagaaccgggcacagacactgaccagagacagggcatttgagagcaccctgaagtcctgggaagacaagcagaagtgcgagctgccccgccctccatcctgttccctgcacccggagatgctgtccgaggaggaggccacccagatggaccagtttgggcaggcagcaggggtcctcattcacagtatccgagaaatagctcagtctcaccgggacatggagcaggaactggcccacgccgtcaatgccagctccaagtccatggaccgtgtgtatggcaagcccagaaccacagaggggctcaactgcagcttcgtcctggaaatggtgaataacttcagagctctgcgcagtgagacggagctgctgctgtctgggaagatggccctgcagctggatccgcctcagaaggagcagctggggagtgctcttgccgagatggaccgacagctcaggaggctggcagacaccccgtggctctgccagtccgcagagcccggcgacgaagagagtgtgatgctggatcttgccaagcgcagtcgcagtggtaaattccgcctcgtgaccaagtttaaaaaggagaaaaacaacaagaacaaagaagctcacagtagcctgggagccccggttcacctctgggggacagaggaggttgctgcctggctggagcacctcagtctctgtgagtataaggacatcttcacacggcacgacatccggggctctgagctcctgcacctggagcggagggacctcaaggacctgggcgtgaccaaggtgggccacatgaagaggatcctgtgtggcatcaaggagctgagccgcagcgcccccgccgtcgaggcctagcctctgtcctctcagcctgtggcctccacatccccgccgccgaggcctagcctccgccctctcagcctgtggcctctgcgcctcctgccactgaggccctgggcagatgctgcagcccgcccccttctcatggtgctacttcctctgtcagctacagaaagcctccgtgacaccgtccaccagagctctggggtctcgaacataacaacacagctacctttgaaacaacactttctccagctcagagtcacctggggcacatgtgtcacggccactcagctctcgcccgcctgtgctgtgggccagggaatccagcggcgtctggcctcctgggcactgcttgcctggcctcgtgcttggattgtcccgggggctcctctccgtgtgtccttctgtggccgcaccgtgtggctccgcctcctggcccccagccagttctcagaaacgtggctggggcccagcacagcagcctgcaagggcccctgtttgttgatgcagcttttgttgaacaaaaatcgtgctctttcctggtttgaaagtagcatggatgtttccagtcttgttgattgtaatttgacgtgaagagaaaaaaaaattcctcctgcgtgagccaaggcagcgggtgctgtttcccaggcggggagcccctccctgggtgtcacagggcctgtgctcctccctcctccatcctctctcctcccgctcctccctccccccactgtgggctggggacgcctgcccttctgtctccggacgctctaggcgagttcagcttggggtgtgagtgagacagcttgccagctgcatccctgcagacagaggatgtgtgtccacatgagtgtttctgtgtgggaaatgcttcctggctctgggaaactttttctgcccattctgtggttcccagggagcgtggccctggtgggccaggggtggtttgacctcttcagcccgtccggtggcctggaggccggaggctctcctgagtgtctgcccctgcagtggcttcttgtcgcctgctgctgggcgtgatgtcgctggaggtgctggcagggactctgatttggtggtccgcgctgcccctgccctgcctctgtcctggctctgaactagtagatgatggtgccagagggcagggagctcgcctggggagagggctgtgccccgtagggacagtgcccaggtgaaggatgcccctggtcctccagggcactgactttgcccttttttcccgttgatagtcatggctcagaggtgcttgtaaatgtcttgggaagaggtttctgtaacccctgccctggtgtgaggaggaaatggctctggcctggctgcctggccgtggcttctctttggctcccaaagagaaggacagtgttgggagtatctgccgtggcttctctttggctcccaaagagaaggacagtgttgggagtatctgccggcgctgtccaggtcctttagtcagcgtcactccatctgatgtgcagaagctgggctgcacctgcgggggtgggcatagaccgggctgggtctgcagcagcccctggtcctgagcaggcggcagtgaacagcactggcccacctcccactcacagcccctctgtcccctctgcagtgcacccaggtgggcccctctgcgtgcctttgggtgctcccctctcgtggtcgttctggcccgaggcccttagagtatggaggctgagccaggccttgggtttccccagcacagcctcctgtcgctgcatgcgacgtgttgggatttttggatgaaagactctcccacgctctgttggtggacttagctgcctcactggaagtgatgtgggtggaaggtggttgtatgttaccttttccacctctcattgttttccccagaacattgtagatgggggttggcagagggagaaataagccagccacggcagtcgcttggtttcccaggtggaatgggctaacacaggagatgatgggaacctgtcccgcagtccctgcatgaccattggccctgctggcctggcgatgtgggcatcctggggttcttagggtcccagaacaagccccaggcaagctggaacttgggtggggaggggacatgaggaggataaacagctgactgtggcttcaaggacatcagggccaccccaagtcctcagtgtcctactcctggcaaggagttgggtttggatcaaaagtgtttaaaattaatatgttgtcagtgattagaacaacactgtttacataaaaaccatttttctaattctaacaagttagaatgtgaggaaggaatgaacatgagtgtttaggaacctgccctttggtgctgggctggcgtcccgcactggggtgtcctcgctgtctgggggctgctctgctgccccggcccaggtccccttgtggtgttgccagacgggcctcatggtctgctgtgcagagagaggcaggaaggatccctgaagagtcttggagaaaaggttctgtgccctcaggtggggcttaccccctcgtatttataatcttaatttatatagtgaccaccgtggaaacaaacgcctcttgtattgtcatgtacatagtccatacctgagtgctgtacataagttgttctgtgtataaataaaacaagcctgtttttgatcttc

SEQ ID NO: 8255 - DNA, 7766 bp, Homo sapiens
  source 1..7766: mol_type = unassigned DNA
ctccagctcgcggccccgcgcgccggatcggcgtgcgtgcggctggagccttaagcgtttcccccgcccggcttcatccctgctggcggcccagcgtcgttctcctcctgcgcgaggcggccaaggcctgctggcccggagccgcgcctccacccgcgcgaggtatcgtccttggagaagatggaagcggagaggcggccggcgccgggctcgccctccgagggcctgtttgcggacgggcacctgatcttgtggacgctgtgctcggtcctgctgccggtgttcatcaccttctggtgtagcctccagcggtcgcgccggcagctgcaccgcagggacatcttccgcaagagcaagcacgggtggcgcgacacggacctgttcagccagcccacctactgctgcgtgtgcgcgcagcacattctgcagggcgccttctgcgactgctgcgggctccgcgtggacgagggctgcctcaggaaggccgacaagcgcttccagtgcaaggagattatgctcaagaatgacaccaaggtcctggacgccatgccccaccactggatccggggcaacgtgcccctgtgcagttactgtatggtttgcaagcagcagtgtggctgtcaacccaagctttgcgattacaggtgcatttggtgccagaaaacagtacatgatgagtgcatgaaaaatagtttaaagaatgaaaaatgtgattttggagaattcaaaaacctaatcattccaccaagttatttaacatccattaatcagatgcgtaaagacaaaaaaacagattatgaagtgctagcctctaagcttggaaagcagtggaccccattaataatcctggccaactctcgtagtggaactaatatgggagaaggactgttgggagaatttaggatcttgttgaatccagtccaggtttttgatgtaactaaaactcctcctatcaaagccctacaactctgtactcttctcccatattattcagctcgagtacttgtttgtggaggggatgggactgtagggtgggtcctggatgcagttgatgacatgaagattaagggacaagaaaagtacattccacaagttgcagttttgcctctgggaacaggcaacgatctatccaatacattgggttggggtacaggttatgctggagaaattccagttgcgcaggttttgcgaaatgtaatggaagcagatggaattaaactagatcgatggaaagttcaagtaacaaataaaggatactacaacttaagaaaacccaaggaattcacaatgaacaactatttttctgttggacctgatgctctcatggctctcaattttcatgctcatcgtgagaaggcaccatctctgttttctagcagaattcttaataaggcggtttacttattctatggaaccaaagattgtttagtgcaagaatgtaaagatttgaataaaaaagttgagctagaactggatggtgagcgagtagcactgcccagcttggaaggtattatagttctgaacatcggatactggggcggtggctgcagactatgggaagggatgggggacgagacttaccctctagccaggcatgacgatggtctgctggaagtcgttggagtatatgggtctttccactgtgctcagattcaagtaaaactggctaatccttttcgaataggacaggcacatacagtgaggctgattttgaagtgctccatgatgccaatgcaggtggatggggagccttgggcccaagggccctgcactgtcaccataactcacaagacacatgcaatgatgttatatttctctggagaacaaacagatgatgacatctctagtacttcggatcaagaagatataaaggcgactgaatagatggatgagggagtgaaaactttgcatagaatcctcacgcaagtagatacatgttcatccaaaagtattaatagaaattctctatcagctattcagtcttaatttcactagtagtataatgggtatacatttttgtaaatagcatccccaaaccagccagccttcagttatttacaaatgtttgttcttttttcagcaaaatacttcaaatgaatagtattaacttacaaaaagtcacaaaaacttacatgagagtgaaaatttgttatgactgttttgagagtgggactcactctgaagtatgtgctgtctcatgtcttatttttgaaccatgcatatgatggacacacaatggatggacacattatatctccaacaaggtgtgggtggaaagatcaaattaacctgcttttttgaaaggaaatgattactgtcaaaccagcatggttaattgtgagcatcctcctgcagcatgccccttaagattttctacaacccaaaccaagtgtatgtattgatttctaggaacccccaaaaggagaatagtaaaaaaagatcatacttaaaatttgtattacaatttttattttaggaacttattcagacacgtaaatgttgtttaattctgtaggtaaccatttgagctgcaattcaggatcttttttataacaccagtgtagccaaaagagaaacagataagtgaattggtaagaaataagattcagagcacttgggattgtaagttataggttctgagctgaactgtttatcagccgctctttttattaaaagacagtgtcaacacttcaaaaaacgtgcttaaaggagacaacggtgagattaattgcttagaaaaagctcaaggctgactgataagttttaaaaatttggtggtcttgtagtattttgaaatacagtagtcttttaacagaatttccccttagggaggtaagtggacagaaatctttgctaaaatgtttatatcatatttattttaaaatgagagagatatatttttaaattatttattatttaccttgtggtatggtacctgtgtttagtgtttacgttctgtagctttatttaataagttaaattgatcacataaattctgctagtcacaatcagatagaaatttagtctattaattaaaattctaatttaattctcctgacagaaatctagatattcttattcttcacaaatattcctcattgtattgaaaaatgaaggagggcatgaaaagcactagggaactacttttggataactgaaagctttgtttcattgttttatttgcccctcaattgccacaaacttactgaagggctagtttcatggttcccattagagggtgcttgttcgctgctgttgaccagcccaagggtcgtgacccacaggtcggctgacccagagggcatccagcctggtgtttttctgacacatggcccaggctttgtggtctttcatgacattaatctctgaaagatcagaatgtatcccccaaaataccattagctatctttgagggtctattatgaatctgtcatccatgaattgccataaacctaagtttgcctcacctcaggcccagaccatgttttcaaagagcaacttagtaatgtatacagtagtcagtacattttatgaaatactctattttgctaaattaacctcttgcagatctcctcaggtgatcttaaattctagtcttgagaaactttgtgagcagatctgttttcagcttctttatatacctttcatggtaagtaaccatggcagtgaggatggcagagttttgttttttttttttttaatgggccaatcatgttctgagtattatgaagtttatcctttcattcatgatcaaaattgttaaagacatcacattttataaatacactgttaaatccactttgctgtaggttatagtttacctgttatataattcgtagtgctaattgtagtagaagcaaatcaatttaggatgttggaacgaaaataatcacaataactaatacagctttttaattgtgaaaactacaattaaaaattataattttaataccaaccataatattacactgtatttagaacaggcttatgtaaaatgccctcatttatctaaataagttgattttttggttattgtaatctagtaaggtttttgcatcactactggtctgtcatgaagtttttctgctggcttattcacttatttagacttcatttagggaagctatttcagaataccatctcataaaatgtatcattatcttgtttttgcaaaattcacttactttttgggcacatttacccagcatttcaaataagtgtataggcatgtgccttgtttaagtacaatttataagacttcatgtttgcaagttacatattagggtagtgattgtttatattaccagggattctacactttaccaaaaaaaattgccataagattttcctgttccattttaaattgtcttgatatttaaaaaaataacttctacattctcaggaagaaatacatgaagtaaatcatatctccatgtctgtttccagatttctctaatctttttactatcccaatacattcctaattcctataaacgtagtggcttaaatactgaatacctggcagctcttaaagatcccttaggcagatgatgataattttcagtgtttcgtcatgtttaatagaaatcaaactgacttgtgttttaaaatacaagttgtctgctagtaaagttacatgatttaggtgtgttttaggttttctgcaacaattagctgtgaacccctaatgtagctaagtttatacaaattttataatcaaaattatttatttttatttttttagagtatgtcaaaaacatatagtgtttgctttgtgaaatacatttgcttagagttataaaatatactgtgactcagaaattgtaaagtcagtttgcgttgtaaaaatgaatactaccagcatgtcaaaagaaaaataatttacatttgtaatataaagtaaaattgtatttaatatatttattgaattttaaatttgcactaacttgaaaactttaaaggttatactaatttaatgattaatgtggacccaaatacataatttggccaaaaaagtcattagaatgggtaatggttttgtgtggttttccttcaaaatgataatattgaagcaagaaccagcattttatattgataatttttttaatatttctacccagttgaggacagtggaatataagtagatatatttaaaatatctagatatttaaaaagaaagaaaaggttgtttatcccaatctgaattcattctcagcaacaagacagaaaaggtggtttgggttttgcttttaaacagtgtccccctgtctttttcaatttttcccttgaagcctttctcttgttcttcagagtacgcgctgcaggctatctgcagcatcagaatgcctgggcaggctgttgaaagtatggattcctgagcccaacccttaacttaatgattccctgtctctggagatgcaacatagaaatctctgtttttattaacaagcgcctcaggcgattcttaagcatactgaaatttgaaagcttctggtctgaacctcatgtattcacctagggcttttgctaggtgggataccatgccgaaaaattgaattaattgtatgttcttaaaattgtttttcttctactccgctgtcctcttccctcaaaatcacttttctaaaagaactctatgaaaaacttatttgtatcatacccaaattgatatatttgtctgaactctgttacataaaaattggtatgattcatatgtggaatcagtttttggactgtgacccatgcagtgttgggggacaaggagttgcttcaggagttagtgcagtgcgcctccaaggggcagtgagccatggaggcgcctgccttctcactgcagtcaatgcagccacacttgtgtatactgagtgctgcttcagatctcagtagataaaataattccacatttaaaatgattctgctattttttataaagggtttgaaagccactactataatgactttgtcacctaattgattttctactaatttttacatattcagaaacttcgtgtttttttggtggacagaatattttggaggtctccgtcgctgtttagaatgtggccacttggctgtttcacagtttttaaagctattttattgaatagtaaagcagtgaacttagcctttgttctttgtgtttctaatttaagcatatagtctatttaatttttgatatgtaaatacacatcaatacatatatatttacccatgtggccctgtgtagtcagtgcatgaggcttgcatagcccagaaaggtacattccagggttctggggaaagaattttaaaatgccatcctctaatacagacgtttataaaacttaaatgaaatgattgggcttaaccatatgcaagaaagtctgcagaaaataaatcacctagaaactataaatagaaatgtgctgctgaggctgggcacggtggctcacacctgtaatcccagcacttggggggctaagggaggcgtatcacctgaggtcaggagtttgagacaagcctggtcaacatggtgaaacgccgtctctactaaaaatacaaaaaaaattagccaggtacattggcacatgcctttaatcccagctaatcaggaggctgaggcacgagaattgctcgaacccaggcggcagagcttgcagtgagcggagatcacatgactgcactccagcctgggcaacagagcaagactccatctcaaaaaaaaaaaggccgggcgtggtggctcacgcctgtaatcccagcactttgggaggctgaggcaggtggatcacgaggtcaggagatcgagactatcctggctaacacggtgacaccccgcctctactaaaaatccaaaaatttagccgggcatggtggcgggcacctgtagtcccagctactcgggaggctgaggcaggagaatggcgtgaacccgggaggcagagcttgcagggaggcggagcttgcagcgagccgagatagtgccactgcagtggggcctgggccaaagagtgagactccatctcaaaaaaaaaaaaaaagaaagaaatgtgttgctggtatcagatatcagaccaagaacacttcagtctctctaaggatgccctgagctacctcactgttaaaggacgacatcaacacagaatgcactaaacaggaaataagctgtaatctagagaatttccattatgtgttactttttggtgactaacatggaatgttgaaaaggaagagctggaaagctcagttgttttccttgttcctctgacattgtccaggcaagagggcatcctgatcagatgagtagatttggctgagaaaaaccctagagtaaggcaggcactttgtggaggtggatgatgatggctcataaaaacgtttgttctcagtccagttcagggctctgccagcagtctttcagatctgaactgcttaaacaaaccctacagataaattggcactctgatttgtaattctgtttgtacaagtttagagcagcctagctcgagtcctcaaccccagtcctcttagaagtgaactgattgcactggatccctaaacccacaatgttgaggacacatgtgatgactccacttgctcagccagctggcctcttgcactttcccctgcccaccacttgtaactaccacttaattatcttgtgttaattgcttttgttgtgttgggtctgtatttttgtggtcagtgcctgcaggcagaaatgtgaaagcatttggtatgttgaagatacttgcttcttttttaataaaattaaaagtgcagcacgt

SEQ ID NO: 8256 - DNA, 5805 bp, Homo sapiens
  source 1..5805: mol_type = unassigned DNA
gccgcagtgccgtagtagcgggccacggagatagacagctttggagctgctgaactccgagcacagggtgaagaccccggcgctaccaaccacagcctggcagcctggtctccgcggcacccactggggctgcatccccctcccccgagagggctgcgcaggcgggaagacgcccagaggccagcttcggtcccccttctgtctctcggttcctctttcctcccaagtaagggaataaaccgcgaagaaggagcgccccgggccaccgcgcaaccaagtgttgcctggtgaggaagagccaggacttctgaatttaccttgaatacagacaggaggatgttgcctaaggaatagcagagatcttgtctcatcttctgagaggtgcctgctgctgctgtatacacttgagtgctcccagaagtctcctgaaaggcttacatcgcaaacctgcaatgagccaggccctgggctgggcctccacttcagcctagtgaacaaaactccatcactgccctttagccactcacataaagtttaaaaatgggtgaagaacggtgggtctccctcactccagaagaatttgaccaactccagaaatattcagaatattcctccaagaagataaaagatgccttgactgaatttaatgagggtgggagcctcaaacaatatgacccacatgagccgattagctatgatgtcttcaagctgttcatgagggcgtacctggaggtggaccttccccagccactgagcactcacctcttcctggccttcagccagaagcccagacacgagacctctgaccacccgacggagggagccagcaacagtgaggccaacagcgcagatactaatatacagaatgcagataatgccaccaaagcagacgaggcctgtgcccctgatactgaatcaaatatggctgagaagcaagcaccagctgaagaccaagtggctgcgacccccctggaaccccccgtccctcggtcttcaagctcggaatccccagtggtatacctgaaggatgttgtgtgctacctgtccctgctggagacggggaggcctcaggataagctggagttcatgtttcgcctctatgattcagatgagaacggtctcctggaccaagcggagatggattgcattgtcaaccaaatgctgcatattgcccagtacctggagtgggatcccacagagctgaggcctatattgaaggagatgctgcaagggatggactacgaccgggacggctttgtgtctctacaggaatgggtccatggagggatgaccaccatcccattgctggtcctcctggggatggatgactctggctccaagggggatgggcggcacgcctggaccatgaagcacttcaagaaaccaacctactgcaacttctgccatatcatgctcatgggcgtccgcaagcaaggcctgtgctgcacttactgtaaatacactgtccacgaacgctgtgtgtccagaaacattcctggttgtgtcaaaacgtactcaaaagccaaaaggagtggtgaggtgatgcagcacgcatgggtggaagggaactcctccgtcaagtgtgaccggtgccacaaaagtatcaagtgctaccagagtgtcaccgcgcggcactgcgtgtggtgccggatgacgtttcaccgcaaatgtgaattatcaacgttgtgtgacggtggggaactcagagaccacatcttactgcccacctccatatgccccatcacccgggacaggccaggtgagaagtctgatggctgcgtgtccgccaagggcgaacttgtcatgcagtataagatcatccccaccccgggtacccaccccctgctggtcttggtgaaccccaagagtggagggagacaaggagaaagaattcttcggaaattccactatctgctcaaccccaaacaagttttcaacctggacaatggggggcctactccagggttgaactttttccgtgatactccagacttccgtgttttggcctgtggtggagatgggacagttggctggattttggattgcattgataaggccaactttgcaaagcatccaccagtggctgtcctgcctcttggaacaggaaatgaccttgcccgttgtctccgctggggaggaggttatgaagggggcagcttgacaaaaatcctgaaagacattgagcagagccccttggtgatgctggaccgctggcatctggaagtcatccccagagaggaagtggaaaacggggaccaggtcccatacagcatcatgaacaactatttctccattggtgtggacgcttccattgcacacagattccatgtgatgagagagaaacatcctgaaaaattcaacagcaggatgaagaacaagctgtggtactttgaatttggcacctcggagacttttgcagcgacctgcaagaaactccacgaccacattgagttggagtgtgatggggttggggtggacctgagcaacatcttcctggaaggcattgccattctcaacattcccagcatgtacggaggcaccaatctctggggagaaaacaagaagaaccgggctgtgatccgggaaagcaggaagggtgtcactgaccccaaagaactgaaattctgcgttcaagacctcagtgaccagctccttgaagtggtggggctagaaggagccatggagatggggcagatctacaccggcctgaagagtgcaggcaggaggctggcccagtgcgcctctgtcaccatcaggacaaacaagctgctgccaatgcaagtggatggagaaccctggatgcagccatgttgcacgattaaaattactcacaagaaccaagcgcccatgatgatggggcctccccagaagagcagcttcttctcgttgagaaggaagagccgttcaaaagactaaacagtgtgccaaacaccagctaaaccaagagagaaagcaagaaactataatgcacactcacacacaatttatgtgcacactcacacatgcacacacacacacacatacacactcttctctaaccagtggaagcaaagccacccttcgggaagaaaacgtcaccttgccatacattctgtttcaacagtgggtacacccctaacagagccagtgccaacaaaacattttgaatggacttagggcccatgaggttgtggctggcttaggcagcaacctccacattcccacaggccttgagcagaattttctgagactgaagggaaatccccctttctttctaccagccctgcaagtttcctcatggacgctcgcgaggagcaggctgcaggtttcctgcctatggtgagatcagatgtggccaagggaaggagctctggttccagagaatttgcacaaagttccctctgtacagagacaaaacggcctccggctctcagagcataatccttggcagggctcagcaggcgcacgttggtttcttggtcgtcctttgagtgacaacttctccgtgaacctgctgaagaggcagaaaggctgtggaaagctgtatttccattcttgggtttctgcgccgtcggtgggcacttgttattttccaggaaccttctcctggtgtctacatgtttgcttagaggcggctccaagagcccccagagctgcctgcatagcacaccttagatgtggtatttattttcttagttctgtgaacacctgggagggagagcggagaaactgggatttatttttcaaattggtgtcataatattgtgtaaaaagggaaggaaaaaaaaaaccacccccagcttctttctttttcaagccaaagcgtgtttcctgtttgagttccaagccctggtggcagactattcctgaaggcagaaaagatgggaaggaaggaactttgctggggaaaccaggagacggttccctcctgcttctttgcactcaccactcccagagtatgacctgaaggaccttctgatggtcttaacgtgtgtgcgcgcgtgtgtgtgtgtgtgtgcgtgtatatatatatatttagcctatatatttatatatatatatatataaatatttatttactgatggacttttcctcattggaaaaaaaaaacataggtagtatgagacagaaagtggtaaggaaaaagaaggttctcactcccccactccaccgtttcattgtcaggacgcatctccctgtggtgatcacaagggttaaggggaatgaaagtagctccctattatgaacgaagagaccgagaactcctattctggatcctcaaaacaagcatgaaagacctgctgggctggatttactctcccatttgtcagataagaaaattgagtctcagaaaagttcagagacttttccatggtgtcttggctaatgcagcttgagagtaggtgccgttacaaagatatttaatggagaaaagaacccacacatctcagagtagggtcatttctggtcactgaaaagtgagtccacttggatccaggttgccagggaggaacaaacgtacagcacatgcgtggatgggatatccccacacaagaaaacgagcgcctcatgctgcttcccagaggttctctctgacctgaatggaaaagaagttggtctgagatcgaaggtactaaacagatcatcagactgaactctccacatgtcacctcatcatggtcatcatagtctcttagtttggaaacaaccttggctgcagggatgacctcagtggagagtcacaagaaggactgaggcgtcttctgcaagatactgccagccaggacagaggggtctcagcagagctcagtgggcttcattcagcaagtgccagcattaccatcctttcccaagggcaaggccatgcagagcttcattgggcctccatccctctctgagatttatcagtggaaacttggacccacttgatatcgttccactgagctgcctctaatcttgcattggacaggagctttggacaaagaagggaatattaagattgtgtgtacaaatggcacttaactgtgaaggaccacctaggagcaagatcttggaccattctgctcaacctaacagtgcagaatgctaagtaaggggaaaaccaggccacctgaagaatatctttaatgatggtattcttggtgatgggaccaacaagctccagaattactacaggtactatcttggaagccacttgtttctgaaactgaggcaggttcaggtttggggtcactgattctaagacatttacagaagttcgtgcatgtgtttcagccatgatccccaagattgaggctattgagacatggcactatcaacaggtgaaattgattctcagagactcacaggtctcatgaaggggcagtgcagaaaatggcccttacctgctgcaccctagtgcacaggacttgcaatgttgcttgagagacatatcccaagtccttcttagaggcatggagtataacaacttcagtggaattgcacttccagtttggtaaccttagtaaatcttgtgttgttgtttaatcgtgccttgcaaatcatcctttaaacactatgactgtggtttcttgtggtggagtccctcatcatagtgaccctcatagcaacctctgaggttagcagagaaggtattattatctcgatctcaatgaggagaacaaggcttaatgaggtttagtgacttctcaaagccacatggttagtcaggggagaacctaatcccttatttcttatcttattctgattctggccatgctacaaacatgttctcacctgccccccatgcttctaccccaacagcaataaaaactgtaaagcaggaa

SEQ ID NO: 8257 - DNA, 3445 bp, Homo sapiens
  source 1..3445: mol_type = unassigned DNA
ggagcgccccgggccaccgcgcaaccaagtgttgcctggtgaggaagagccaggacttctgaatttaccttgaatacagacaggaggatgttgcctaaggaatagcagagatcttgtctcatcttctgagaggtgcctgctgctgctgtatacacttgagtgctcccagaagtctcctgaaaggcttacatcgcaaacctgcaatgagccaggccctgggctgggcctccacttcagcctagtgaacaaaactccatcactgccctttagccactcacataaagtttaaaaatgggtgaagaacggtgggtctccctcactccagaagaatttgaccaactccagaaatattcagaatattcctccaagaagataaaagatgccttgactgaatttaatgagggtgggagcctcaaacaatatgacccacatgagccgattagctatgatgtcttcaagctgttcatgagggcgtacctggaggtggaccttccccagccactgagcactcacctcttcctggccttcagccagaagcccagacacgagacctctgaccacccgacggagggagccagcaacagtgaggccaacagcgcagatactaatatacagaatgcagataatgccaccaaagcagacgaggcctgtgcccctgatactgaatcaaatatggctgagaagcaagcaccagctgaagaccaagtggctgcgacccccctggaaccccccgtccctcggtcttcaagctcggaatccccagtggtatacctgaaggatgttgtgtgctacctgtccctgctggagacggggaggcctcaggataagctggagttcatgtttcgcctctatgattcagatgagaacggtctcctggaccaagcggagatggattgcattgtcaaccaaatgctgcatattgcccagtacctggagtgggatcccacagagctgaggcctatattgaaggagatgctgcaagggatggactacgaccgggacggctttgtgtctctacaggaatgggtccatggagggatgaccaccatcccattgctggtcctcctggggatggatgactctggctccaagggggatgggcggcacgcctggaccatgaagcacttcaagaaaccaacctactgcaacttctgccatatcatgctcatgggcgtccgcaagcaaggcctgtgctgcacttactgtaaatacactgtccacgaacgctgtgtgtccagaaacattcctggttgtgtcaaaacgtactcaaaagccaaaaggagtggtgaggtgatgcagcacgcatgggtggaagggaactcctccgtcaagtgtgaccggtgccacaaaagtatcaagtgctaccagagtgtcaccgcgcggcactgcgtgtggtgccggatgacgtttcaccgcaaatgtgaattatcaacgttgtgtgacggtggggaactcagagaccacatcttactgcccacctccatatgccccatcacccgggacaggccaggtgagaagtctgatggctgcgtgtccgccaagggcgaacttgtcatgcagtataagatcatccccaccccgggtacccaccccctgctggtcttggtgaaccccaagagtggagggagacaaggagaaaggttgaactttttccgtgatactccagacttccgtgttttggcctgtggtggagatgggacagttggctggattttggattgcattgataaggccaactttgcaaagcatccaccagtggctgtcctgcctcttggaacaggaaatgaccttgcccgttgtctccgctggggaggaggttatgaagggggcagcttgacaaaaatcctgaaagacattgagcagagccccttggtgatgctggaccgctggcatctggaagtcatccccagagaggaagtggaaaacggggaccaggtcccatacagcatcatgaacaactatttctccattggtgtggacgcttccattgcacacagattccatgtgatgagagagaaacatcctgaaaaattcaacagcaggatgaagaacaagctgtggtactttgaatttggcacctcggagacttttgcagcgacctgcaagaaactccacgaccacattgagttggagtgtgatggggttggggtggacctgagcaacatcttcctggaaggcattgccattctcaacattcccagcatgtacggaggcaccaatctctggggagaaaacaagaagaaccgggctgtgatccgggaaagcaggaagggtgtcactgaccccaaagaactgaaattctgcgttcaagacctcagtgaccagctccttgaagtggtggggctagaaggagccatggagatggggcagatctacaccggcctgaagagtgcaggcaggaggctggcccagtgcgcctctgtcaccatcaggacaaacaagctgctgccaatgcaagtggatggagaaccctggatgcagccatgttgcacgattaaaattactcacaagaaccaagcgcccatgatgatggggcctccccagaagagcagcttcttctcgttgagaaggaagagccgttcaaaagactaaacagtgtgccaaacaccagctaaaccaagagagaaagcaagaaactataatgcacactcacacacaatttatgtgcacactcacacatgcacacacacacacacatacacactcttctctaaccagtggaagcaaagccacccttcgggaagaaaacgtcaccttgccatacattctgtttcaacagtgggtacacccctaacagagccagtgccaacaaaacattttgaatggacttagggcccatgaggttgtggctggcttaggcagcaacctccacattcccacaggccttgagcagaattttctgagactgaagggaaatccccctttctttctaccagccctgcaagtttcctcatggacgctcgcgaggagcaggctgcaggtttcctgcctatggtgagatcagatgtggccaagggaaggagctctggttccagagaatttgcacaaagttccctctgtacagagacaaaacggcctccggctctcagagcataatccttggcagggctcagcaggcgcacgttggtttcttggtcgtcctttgagtgacaacttctccgtgaacctgctgaagaggcagaaaggctgtggaaagctgtatttccattcttgggtttctgcgccgtcggtgggcacttgttattttccaggaaccttctcctggtgtctacatgtttgcttagaggcggctccaagagcccccagagctgcctgcatagcacaccttagatgtggtatttattttcttagttctgtgaacacctgggagggagagcggagaaactgggatttatttttcaaattggtgtcataatattgtgtaaaaagggaaggaaaaaaaaaa

SEQ ID NO: 8258 - DNA, 3152 bp, Homo sapiens
  source 1..3152: mol_type = unassigned DNA
ttgcctggtgaggaagagccaggacttctgaatttaccttgaatacagacaggaggatgttgcctaaggaatagcagagatcttgtctcatcttctgagaggtgcctgctgctgctgtatacacttgagtgctcccagaagtctcctgaaaggcttacatcgcaaacctgcaatgagccaggccctgggctgggcctccacttcagcctagtgaacaaaactccatcactgccctttagccactcacataaagtttaaaaatgggtgaagaacggtgggtctccctcactccagaagaatttgaccaactccagaaatattcagaatattcctccaagaagataaaagatgccttgactgaatttaatgagggtgggagcctcaaacaatatgacccacatgagccgattagctatgatgtcttcaagctgttcatgagggcgtacctggaggtggaccttccccagccactgagcactcacctcttcctggccttcagccagaagcccagacacgagacctctgaccacccgacggagggagccagcaacagtgaggccaacagcgcagatactaatatacagaatgcagataatgccaccaaagcagacgaggcctgtgcccctgatactgaatcaaatatggctgagaagcaagcaccagctgaagaccaagtggctgcgacccccctggaaccccccgtccctcggtcttcaagctcggaatccccagtggtatacctgaaggatgttgtgtgctacctgtccctgctggagacggggaggcctcaggataagctggagttcatgtttcgcctctatgattcagatgagaacggtctcctggaccaagcggagatggattgcattgtcaaccaaatgctgcatattgcccagtacctggagtgggatcccacagagctgaggcctatattgaaggagatgctgcaagggatggactacgaccgggacggctttgtgtctctacaggaatgggtccatggagggatgaccaccatcccattgctggtcctcctggggatggatgactctggctccaagggggatgggcggcacgcctggaccatgaagcacttcaagaaaccaacctactgcaacttctgccatatcatgctcatgggcgtccgcaagcaaggcctgtgctgcacttactgtaaatacactgtccacgaacgctgtgtgtccagaaacattcctggttgtgtcaaaacgtactcaaaagccaaaaggagtggtgagtttcaccgcaaatgtgaattatcaacgttgtgtgacggtggggaactcagagaccacatcttactgcccacctccatatgccccatcacccgggacaggccaggtgagaagtctgatggctgcgtgtccgccaagggcgaacttgtcatgcagtataagatcatccccaccccgggtacccaccccctgctggtcttggtgaaccccaagagtggagggagacaaggagaaagaattcttcggaaattccactatctgctcaaccccaaacaagttttcaacctggacaatggggggcctactccagggttgaactttttccgtgatactccagacttccgtgttttggcctgtggtggagatgggacagttggctggattttggattgcattgataaggccaactttgcaaagcatccaccagtggctgtcctgcctcttggaacaggaaatgaccttgcccgttgtctccgctggggaggaggttatgaagggggcagcttgacaaaaatcctgaaagacattgagcagagccccttggtgatgctggaccgctggcatctggaagtcatccccagagaggaagtggaaaacggggaccaggtcccatacagcatcatgaacaactatttctccattggtgtggacgcttccattgcacacagattccatgtgatgagagagaaacatcctgaaaaattcaacagcaggatgaagaacaagctgtggtactttgaatttggcacctcggagacttttgcagcgacctgcaagaaactccacgaccacattgagttggagtgtgatggggttggggtggacctgagcaacatcttcctggaaggcattgccattctcaacattcccagcatgtacggaggcaccaatctctggggagaaaacaagaagaaccgggctgtgatccgggaaagcaggaagggtgtcactgaccccaaagaactgaaattctgcgttcaagacctcagtgaccagctccttgaagtggtggggctagaaggagccatggagatggggcagatctacaccggcctgaagagtgcaggcaggaggctggcccagtgcgcctctgtcaccatcaggacaaacaagctgctgccaatgcaagtggatggagaaccctggatgcagccatgttgcacgattaaaattactcacaagaaccaagcgcccatgatgatggggcctccccagaagagcagcttcttctcgttgagaaggaagagccgttcaaaagactaaacagtgtgccaaacaccagctaaaccaagagagaaagcaagaaactataatgcacactcacacacaatttatgtgcacactcacacatgcacacacacacacacatacacactcttctctaaccagtggaagcaaagccacccttcgggaagaaaacgtcaccttgccatacattctgtttcaacagtgggtacacccctaacagagccagtgccaacaaaacattttgaatggacttagggcccatgaggttgtggctggcttaggcagcaacctccacattcccacaggccttgagcagaattttctgagactgaagggaaatccccctttctttctaccagccctgcaagtttcctcatggacgctcgcgaggagcaggctgcaggtttcctgcctatggtgagatcagatgtggccaagggaaggagctctggttccagagaatttgcacaaagttccctctgtacagagacaaaacggcctccggctctcagagcataatccttggcagggctcagcaggcgcacgttggtttcttggtcgtcctttgagtgacaacttctccgtgaacctgctgaagaggcagaaaggctgtggaaagctgtatttccattcttgggtttctgcgcc

SEQ ID NO: 8259 - DNA, 2343 bp, Homo sapiens
  source 1..2343: mol_type = unassigned DNA
gcagtgccgtagtagcgggccacggagatagacagctttggagctgctgaactccgagcacagggtgaagaccccggcgctaccaaccacagcctggcagcctggtctccgcggcacccactggggctgcatccccctcccccgagagggctgcgcaggcgggaagacgcccagaggccagcttcggtcccccttctgtctctcggttcctctttcctcccaagtaagggaataaaccgcgaagaaggagcgccccgggccaccgcgcaaccaagtgttgcctggtgaggaagagccaggacttctgaatttaccttgaatacagacaggaggatgttgcctaaggaatagcagagatcttgtctcatcttctgagaggtgcctgctgctgctgtatacacttgagtgctcccagaagtctcctgaaaggcttacatcgcaaacctgcaatgagccaggccctgggctgggcctccacttcagcctagtgaacaaaactccatcactgccctttagccactcacataaagtttaaaaatgggtgaagaacggtgggtctccctcactccagaagaatttgaccaactccagaaatattcagaatattcctccaagaagataaaagatgccttgactgaatttaatgagggtgggagcctcaaacaatatgacccacatgagccgattagctatgatgtcttcaagctgttcatgagggcgtacctggaggtggaccttccccagccactgagcactcacctcttcctggccttcagccagaagcccagacacgagacctctgaccacccgacggagggagccagcaacagtgaggccaacagcgcagatactaatatacagaatgcagataatgccaccaaagcagacgaggcctgtgcccctgatactgaatcaaatatggctgagaagcaagcaccagctgaagaccaagtggctgcgacccccctggaaccccccgtccctcggtcttcaagctcggaatccccagtggtatacctgaaggatgttgtgtgctacctgtccctgctggagacggggaggcctcaggataagctggagttcatgtttcgcctctatgattcagatgagaacggtctcctggaccaagcggagatggattgcattgtcaaccaaatgctgcatattgcccagtacctggagtgggatcccacagagctgaggcctatattgaaggagatgctgcaagggatggactacgaccgggacggctttgtgtctctacaggaatgggtccatggagggatgaccaccatcccattgctggtcctcctggggatggatgactctggctccaagggggatgggcggcacgcctggaccatgaagcacttcaagaaaccaacctactgcaacttctgccatatcatgctcatgggcgtccgcaagcaaggcctgtgctgcacttactgtaaatacactgtccacgaacgctgtgtgtccagaaacattcctggttgtgtcaaaacgtactcaaaagccaaaaggagtggtgagtttcaccgcaaatgtgaattatcaacgttgtgtgacggtggggaactcagagaccacatcttactgcccacctccatatgccccatcacccgggacaggccaggtgagaagtctgatggctgcgtgtccgccaagggcgaacttgtcatgcagtataagatcatccccaccccgggtacccaccccctgctggtcttggtgaaccccaagagtggagggagacaaggagaaagaattcttcggaaattccactatctgctcaaccccaaacaagttttcaacctggacaatggggggcctactccagggttgaactttttccgtgatactccagacttccgtgttttggcctgtggtggagatgggacagttggctggattttggattgcattgataaggccaactttgcaaagcatccaccagtggctgtcctgcctcttggaacaggaaatgaccttgcccgttgtctccgctggggaggaggttatgaagggggcagcttgacaaaaatcctgaaagacattgagcagagccccttggtgatgctggaccgctggcatctggaagtcatccccagagaggaagtggaaaacggggaccaggtcccatacagcatcatgaacaactatttctccattggtgtggacgcttccattgcacacagattccatgtgatgagagagaaacatcctgaaaaattcaacagcaggatgaagaacaagctgtggtactttgaatttggcacctcggagacttttgcagcgacctgcaagaaactccacgaccacattgagttggagtggtgt

SEQ ID NO: 8260 - DNA, 3211 bp, Homo sapiens
  source 1..3211: mol_type = unassigned DNA
agtgccgtagtagcgggccacggagatagacagctttggagctgctgaactccgagcacagggtgaagaccccggcgctaccaaccacagcctggcagcctggtctccgcggcacccactggggctgcatccccctcccccgagagggctgcgcaggcgggaagacgcccagaggccagcttcggtcccccttctgtctctcggttcctctttcctcccaagtaagggaataaaccgcgaagaaggagcgccccgggccaccgcgcaaccaagtgttgcctggtgaggaagagccaggacttctgaatttaccttgaatacagacaggaggatgttgcctaaggaatagcagagatcttgtctcatcttctgagaggtgcctgctgctgctgtatacacttgagtgctcccagaagtctcctgaaaggcttacatcgcaaacctgcaatgagccaggccctgggctgggcctccacttcagcctagtgaacaaaactccatcactgccctttagccactcacataaagtttaaaaatgggtgaagaacggtgggtctccctcactccagaagaatttgaccaactccagaaatattcagaatattcctccaagaagataaaagatgccttgactgaatttaatgagggtgggagcctcaaacaatatgacccacatgagccgattagctatgatgtcttcaagctgttcatgagggcgtacctggaggtggaccttccccagccactgagcactcacctcttcctggccttcagccagaagcccagacacgagacctctgaccacccgacggagggagccagcaacagtgaggccaacagcgcagatactaatatacagaatgcagataatgccaccaaagcagacgaggcctgtgcccctgatactgaatcaaatatggctgagaagcaagcaccagctgaagaccaagtggctgcgacccccctggaaccccccgtccctcggtcttcaagctcggaatccccagtggtatacctgaaggatgttgtgtgctacctgtccctgctggagacggggaggcctcaggataagctggagttcatgtttcgcctctatgattcagatgagaacggtctcctggaccaagcggagatggattgcattgtcaaccaaatgctgcatattgcccagtacctggagtgggatcccacagagctgaggcctatattgaaggagatgctgcaagggatggactacgaccgggacggctttgtgtctctacaggaatgggtccatggagggatgaccaccatcccattgctggtcctcctggggatggatgactctggctccaagggggatgggcggcacgcctggaccatgaagcacttcaagaaaccaacctactgcaacttctgccatatcatgctcatgggcgtccgcaagcaaggcctgtgctgcacttactgtaaatacactgtccacgaacgctgtgtgtccagaaacattcctggttgtgtcaaaacgtactcaaaagccaaaaggagtggtgagtttcaccgcaaatgtgaattatcaacgttgtgtgacggtggggaactcagagaccacatcttactgcccacctccatatgccccatcacccggtataagatcatccccaccccgggtacccaccccctgctggtcttggtgaaccccaagagtggagggagacaaggagaaagaattcttcggaaattccactatctgctcaaccccaaacaagttttcaacctggacaatggggggcctactccagggttgaactttttccgtgatactccagacttccgtgttttggcctgtggtggagatgggacagttggctggattttggattgcattgataaggccaactttgcaaagcatccaccagtggctgtcctgcctcttggaacaggaaatgaccttgcccgttgtctccgctggggaggaggttatgaagggggcagcttgacaaaaatcctgaaagacattgagcagagccccttggtgatgctggaccgctggcatctggaagtcatccccagagaggaagtggaaaacggggaccaggtcccatacagcatcatgaacaactatttctccattggtgtggacgcttccattgcacacagattccatgtgatgagagagaaacatcctgaaaaattcaacagcaggatgaagaacaagctgtggtactttgaatttggcacctcggagacttttgcagcgacctgcaagaaactccacgaccacattgagttggagtgtgatggggttggggtggacctgagcaacatcttcctggaaggcattgccattctcaacattcccagcatgtacggaggcaccaatctctggggagaaaacaagaagaaccgggctgtgatccgggaaagcaggaagggtgtcactgaccccaaagaactgaaattctgcgttcaagacctcagtgaccagctccttgaagtggtggggctagaaggagccatggagatggggcagatctacaccggcctgaagagtgcaggcaggaggctggcccagtgcgcctctgtcaccatcaggacaaacaagctgctgccaatgcaagtggatggagaaccctggatgcagccatgttgcacgattaaaattactcacaagaaccaagcgcccatgatgatggggcctccccagaagagcagcttcttctcgttgagaaggaagagccgttcaaaagactaaacagtgtgccaaacaccagctaaaccaagagagaaagcaagaaactataatgcacactcacacacaatttatgtgcacactcacacatgcacacacacacacacatacacactcttctctaaccagtggaagcaaagccacccttcgggaagaaaacgtcaccttgccatacattctgtttcaacagtgggtacacccctaacagagccagtgccaacaaaacattttgaatggacttagggcccatgaggttgtggctggcttaggcagcaacctccacattcccacaggccttgagcagaattttctgagactgaagggaaatccccctttctttctaccagccctgcaagtttcctcatggacgctcgcgaggagcaggctgcaggtttcctgcctatggtgagatcagatgtggccaagggaaggagctctggttccagagaatttgcacaaagttccctctgtacagagaca

SEQ ID NO: 8261 - DNA, 4124 bp, Homo sapiens
  source 1..4124: mol_type = unassigned DNA
gggtcgcagcctgtcctcctctctctccccctccgccgcagcccgtcgcctccgggcagagttcatgttcagcttgggctttcgctcgggatttaggaagaggccggcggggctggagggtgcgggccggcgcgggagggcgcgggaggcggggagcggcggcctctgattggccggggcgggggagtgagcggagtttcccacaatgccccggtgcggtgcagccgcggatggatgctgcgggaaggggctgccatttgctgcccctgccagcggcgcgcggacctgcccgcgctcctgcagccgccgccgccgccgccgccagcccgcccggcccctgcagcggcgccgcctgcgctccctccgcggccgccggagcgggcgccatgaaccccagctcctcggcgggagaggagaaaggggcgacgggcggcagcagcagcagcggaagcggcgccgggagctgctgcctgggcgccgagggcggcgcggacccgcggggcgcagggtcagccgcggcggcgggggccgctgccctggacgagcccgcggccgccggccagaaggagaaggacgaagcgctggaggagaagctgaggaacttaactttccggaagcaggtctcgtacaggaaagcaatctcccgggcaggcctccagcatctggctcctgcacatcccctcagccttcctgtggcaaatggtccagccaaggagcccagagcgactttggactggagtgagaatgccgtgaatggagaacacctgtggctggagaccaacgtctcgggagacctctgctaccttggagaggagaactgccaagtcagatttgcaaaatcagctctcaggaggaagtgtgcagtctgtaaaatcgtcgtccacaccgcctgcattgagcagctagaaaagattaatttcagatgtaaaccaacatttcgagaaggaggctcaaggtcaccaagagaaaattttgtacgtcatcactgggtgcacaggcgtcggcaggaggggaaatgtaagcagtgtggtaagggcttccagcaaaagttctccttccacagtaaagagattgtggctatcagctgttcctggtgcaagcaggcgtttcacaataaggtgacctgcttcatgctgcatcacattgaagaaccctgctccctgggggctcatgctgctgttattgtcccgcccacttggatcattaaggtgaagaaacctcagaactccctgaaggcttcaaatcggaagaagaagagaacaagctttaaaagaaaagccagtaaaagagggatggaacaggaaaacaaaggtcgtccttttgtgataaaacccatctcttctcctctcatgaaacccttgcttgtatttgtgaatcccaagagtggaggcaaccagggaaccaaagtcctgcagatgttcatgtggtacctgaatccacggcaagtctttgatctttctcaggaagggccaaaagatgcgcttgaattgtataggaaagtaccaaatctgcgaattctggcctgtggtggggatggaacggtgggctggatcctttccatcctggatgaactgcagctgagccctcagcctcctgtgggggtccttcctctggggactgggaatgacctggctcgaactctcaactggggagggggctacactgatgaacctgtttctaagatcctgtgtcaagtggaagatgggacagttgtacagctagatcgctggaacctccatgtggaaagaaaccccgacttgcctccagaagaacttgaagatggcgtatgtaagctccctctgaatgttttcaataactacttcagccttggatttgatgcccatgtcacactggagttccatgaatccagagaagcaaatccagagaaattcaacagtcgttttcgaaataaaatgttctatgcaggggcagctttttctgacttcctacagagaagttctagagatctatccaaacatgttaaagttgtttgtgatggaacagatctcaccccaaagattcaggaactgaagttccagtgtatagtatttttaaatatacccagatattgtgctggcacaatgccctggggaaacccaggtgatcaccatgatttcgaacctcagcgtcatgatgatggttatattgaagtcattggatttaccatggcctctttggcagccctgcaagttgggggccatggagagaggctacaccagtgtcgagaagtcatgcttctaacttacaaatccatccccatgcaagtggatggggagccctgtaggttggccccagctatgattcggatctccctgaggaatcaggccaacatggtacagaagagcaagaggagaacatccatgcctttactcaatgatccccagtctgtcccagatcgtctgaggatccgggtgaacaaaatcagtttacaagactatgaaggattccactatgacaaggagaaactccgagaagcttctatttcagactggttaagaaccattgctggggaactagtgcagtcatttggagcgatacctctgggtattctagttgtgcgtggagactgtgatttggagacttgccgtatgtacatagaccgcctacaggaggacctacagtcagtttcttctggctcccagagagttcattaccaggaccatgaaacctccttccccagggctctctcagcacagaggctctctcctcggtggtgcttcctagatgacagatctcaggaacatttgcactttgtgatggagatttcccaagatgagatttttattctggacccagatatggtggtgtcacagccggcggggacacctccgggcatgcctgacctggtggtggaacaagcctcggggatctcagactggtggaatcctgccctgcggaaacgcatgctgagtgacagtgggctggggatgatagctccctattatgaggactcagatctgaaagatctcagccactcccgcgtgctacagtcaccagtctcttcagaagatcatgcaattttgcaggcagtaatagctggtgatcttatgaagctaatagaaagctataaaaatggaggcagtctgctaattcagggaccagaccactgttcactccttcactacgcagctaaaaccggcaacggggagattgtgaaatatatccttgaccacggaccttccgagttattggatatggcagacagtgaaacgggtgagactgcactgcacaaggctgcctgccagcggaaccgggctgtgtgccagcttctggtggatgcaggagcatctctgagaaagacggactccaagggtaagacacctcaagaaagagcacagcaggctggggacccagacttggctgcttacctagaaagccgtcagaactataaggtcattggccatgaggacctggaaactgctgtttgaccctggtattcgggcaaagaggacatgagcaagcgtatcacatctgccctccctgcaattgggcagctcccctggaagaagctgatggaattcatatatctgtctctctcctgcaagaatctacctgagaccatgccactagcttttaagggctaccaagatgtacaacagaacatgatagcccattgagaaggaggcaggatacctggagatttgtggaatacagtacgagttccacaaaatttgatccttattgcttccagcaagtagcatgaacttctgtgttcacctgtataatttattttaaagattcaaaggatgttcgtataaatggcactgctccatcctccccctatgcattggtttttttccctgtaccatacaattctactgtaactacccatcaacttaaagaaaaatattatctcttctctttacattcagtcttggaagaccacaagattgtctgaaggccttctaaaaccttctgaatgtcctgcagaaatataactgtaaaaccacttccatttctaagactaaatatatcaagactatttagtgactctctctgcatgtccccctcacccgccaaccctccgtttcattatataggagctgggaagtgccacatggataatgtcaacttgtgtgctatatctctgaggaatggtgaggtggcatgggagatgtctgtgc

SEQ ID NO: 8262 - DNA, 4133 bp, Homo sapiens
  source 1..4133: mol_type = unassigned DNA
gggtcgcagcctgtcctcctctctctccccctccgccgcagcccgtcgcctccgggcagagttcatgttcagcttgggctttcgctcgggatttaggaagaggccggcggggctggagggtgcgggccggcgcgggagggcgcgggaggcggggagcggcggcctctgattggccggggcgggggagtgagcggagtttcccacaatgccccggtgcggtgcagccgcggatggatgctgcgggaaggggctgccatttgctgcccctgccagcggcgcgcggacctgcccgcgctcctgcagccgccgccgccgccgccgccagcccgcccggcccctgcagcggcgccgcctgcgctccctccgcggccgccggagcgggcgccatgaaccccagctcctcggcgggagaggagaaaggggcgacgggcggcagcagcagcagcggaagcggcgccgggagctgctgcctgggcgccgagggcggcgcggacccgcggggcgcagggtcagccgcggcggcgggggccgctgccctggacgagcccgcggccgccggccagaaggagaaggacgaagcgctggaggagaagctgaggaacttaactttccggaagcaggtctcgtacaggaaagcaatctcccgggcaggcctccagcatctggctcctgcacatcccctcagccttcctgtggcaaatggtccagccaaggagcccagagcgactttggactggagtgagaatgccgtgaatggagaacacctgtggctggagaccaacgtctcgggagacctctgctaccttggagaggagaactgccaagtcagatttgcaaaatcagctctcaggaggaagtgtgcagtctgtaaaatcgtcgtccacaccgcctgcattgagcagctagaaaagattaatttcagatgtaaaccaacatttcgagaaggaggctcaaggtcaccaagagaaaattttgtacgtcatcactgggtgcacaggcgtcggcaggaggggaaatgtaagcagtgtggtaagggcttccagcaaaagttctccttccacagtaaagagattgtggctatcagctgttcctggtgcaagcaggcgtttcacaataaggtgacctgcttcatgctgcatcacattgaagaaccctgctccctgggggctcatgctgctgttattgtcccgcccacttggatcattaaggtgaagaaacctcagaactccctgaaggcttcaaatcggaagaagaagagaacaagctttaaaagaaaagccagtaaaagagggatggaacaggaaaacaaaggtcgtccttttgtgataaaacccatctcttctcctctcatgaaacccttgcttgtatttgtgaatcccaagagtggaggcaaccagggaaccaaagtcctgcagatgttcatgtggtacctgaatccacggcaagtctttgatctttctcaggaagggccaaaagatgcgcttgaattgtataggaaagtaccaaatctgcgaattctggcctgtggtggggatggaacggtgggctggatcctttccatcctggatgaactgcagctgagccctcagcctcctgtgggggtccttcctctggggactgggaatgacctggctcgaactctcaactggggagggggctacactgatgaacctgtttctaagatcctgtgtcaagtggaagatgggacagttgtacagctagatcgctggaacctccatgtggaaagaaaccccgacttgcctccagaagaacttgaagatggcgtatgtaagctccctctgaatgttttcaataactacttcagccttggatttgatgcccatgtcacactggagttccatgaatccagagaagcaaatccagagaaattcaacagtcgttttcgaaataaaatgttctatgcaggggcagctttttctgacttcctacagagaagttctagagatctatccaaacatgttaaagttgtttgtgatggaacagatctcaccccaaagattcaggaactgaagttccagtgtatagtatttttaaatatacccagatattgtgctggcacaatgccctggggaaacccaggtgatcaccatgatttcgaacctcagcgtcatgatgatggttatattgaagtcattggatttaccatggcctctttggcagccctgcaagttgggggccatggagagaggctacaccagtgtcgagaagtcatgcttctaacttacaaatccatccccatgcaagtggatggggagccctgtaggttggccccagctatgattcggatctccctgaggaatcaggccaacatggtacagaagagcaagaggagaacatccatgcctttactcaatgatattcatcaggtgcaaactgcggacctgcggcgagtgtctgctccccccggctccttcaccattccccagtctgtcccagatcgtctgaggatccgggtgaacaaaatcagtttacaagactatgaaggattccactatgacaaggagaaactccgagaagcttcgatacctctgggtattctagttgtgcgtggagactgtgatttggagacttgccgtatgtacatagaccgcctacaggaggacctacagtcagtttcttctggctcccagagagttcattaccaggaccatgaaacctccttccccagggctctctcagcacagaggctctctcctcggtggtgcttcctagatgacagatctcaggaacatttgcactttgtgatggagatttcccaagatgagatttttattctggacccagatatggtggtgtcacagccggcggggacacctccgggcatgcctgacctggtggtggaacaagcctcggggatctcagactggtggaatcctgccctgcggaaacgcatgctgagtgacagtgggctggggatgatagctccctattatgaggactcagatctgaaagatctcagccactcccgcgtgctacagtcaccagtctcttcagaagatcatgcaattttgcaggcagtaatagctggtgatcttatgaagctaatagaaagctataaaaatggaggcagtctgctaattcagggaccagaccactgttcactccttcactacgcagctaaaaccggcaacggggagattgtgaaatatatccttgaccacggaccttccgagttattggatatggcagacagtgaaacgggtgagactgcactgcacaaggctgcctgccagcggaaccgggctgtgtgccagcttctggtggatgcaggagcatctctgagaaagacggactccaagggtaagacacctcaagaaagagcacagcaggctggggacccagacttggctgcttacctagaaagccgtcagaactataaggtcattggccatgaggacctggaaactgctgtttgaccctggtattcgggcaaagaggacatgagcaagcgtatcacatctgccctccctgcaattgggcagctcccctggaagaagctgatggaattcatatatctgtctctctcctgcaagaatctacctgagaccatgccactagcttttaagggctaccaagatgtacaacagaacatgatagcccattgagaaggaggcaggatacctggagatttgtggaatacagtacgagttccacaaaatttgatccttattgcttccagcaagtagcatgaacttctgtgttcacctgtataatttattttaaagattcaaaggatgttcgtataaatggcactgctccatcctccccctatgcattggtttttttccctgtaccatacaattctactgtaactacccatcaacttaaagaaaaatattatctcttctctttacattcagtcttggaagaccacaagattgtctgaaggccttctaaaaccttctgaatgtcctgcagaaatataactgtaaaaccacttccatttctaagactaaatatatcaagactatttagtgactctctctgcatgtccccctcacccgccaaccctccgtttcattatataggagctgggaagtgccacatggataatgtcaacttgtgtgctatatctctgaggaatggtgaggtggcatgggagatgtctgtgc

SEQ ID NO: 8263 - DNA, 4687 bp, Homo sapiens
  source 1..4687: mol_type = unassigned DNA
gatggatgctgcgggaaggggctgccatttgctgcccctgccagcggcgcgcggacctgcccgcgctcctgcagccgccgccgccgccgccgccagcccgcccggcccctgcagcggcgccgcctgcgctccctccgcggccgccggagcgggcgccatgaaccccagctcctcggcgggagaggagaaaggggcgacgggcggcagcagcagcagcggaagcggcgccgggagctgctgcctgggcgccgagggcggcgcggacccgcggggcgcagggtcagccgcggcggcgggggccgctgccctggacgagcccgcggccgccggccagaaggagaaggacgaagcgctggaggagaagctgaggaacttaactttccggaagcaggtctcgtacaggaaagcaatctcccgggcaggcctccagcatctggctcctgcacatcccctcagccttcctgtggcaaatggtccagccaaggagcccagagcgactttggactggagtgagaatgccgtgaatggagaacacctgtggctggagaccaacgtctcgggagacctctgctaccttggagaggagaactgccaagtcagatttgcaaaatcagctctcaggaggaagtgtgcagtctgtaaaatcgtcgtccacaccgcctgcattgagcagctagaaaagattaatttcagatgtaaaccaacatttcgagaaggaggctcaaggtcaccaagagaaaattttgtacgtcatcactgggtgcacaggcgtcggcaggaggggaaatgtaagcagtgtggtaagggcttccagcaaaagttctccttccacagtaaagagattgtggctatcagctgttcctggtgcaagcaggcgtttcacaataaggtgacctgcttcatgctgcatcacattgaagaaccctgctccctgggggctcatgctgctgttattgtcccgcccacttggatcattaaggtgaagaaacctcagaactccctgaaggcttcaaatcggaagaagaagagaacaagctttaaaagaaaagccagtaaaagagggatggaacaggaaaacaaaggtcgtccttttgtgataaaacccatctcttctcctctcatgaaacccttgcttgtatttgtgaatcccaagagtggaggcaaccagggaaccaaagtcctgcagatgttcatgtggtacctgaatccacggcaagtctttgatctttctcaggaagggccaaaagatgcgcttgaattgtataggaaagtaccaaatctgcgaattctggcctgtggtggggatggaacggtgggctggatcctttccatcctggatgaactgcagctgagccctcagcctcctgtgggggtccttcctctggggactgggaatgacctggctcgaactctcaactggggagggggctacactgatgaacctgtttctaagatcctgtgtcaagtggaagatgggacagttgtacagctagatcgctggaacctccatgtggaaagaaaccccgacttgcctccagaagaacttgaagatggcgtatgtaagctccctctgaatgttttcaataactacttcagccttggatttgatgcccatgtcacactggagttccatgaatccagagaagcaaatccagagaaattcaacagtcgttttcgaaataaaatgttctatgcaggggcagctttttctgacttcctacagagaagttctagagatctatccaaacatgttaaagttgtttgtgatggaacagatctcaccccaaagattcaggaactgaagttccagtgtatagtatttttaaatatacccagatattgtgctggcacaatgccctggggaaacccaggtgatcaccatgatttcgaacctcagcgtcatgatgatggttatattgaagtcattggatttaccatggcctctttggcagccctgcaagttgggggccatggagagaggctacaccagtgtcgagaagtcatgcttctaacttacaaatccatccccatgcaagtggatggggagccctgtaggttggccccagctatgattcggatctccctgaggaatcaggccaacatggtacagaagagcaagaggagaacatccatgcctttactcaatgatccccagtctgtcccagatcgtctgaggatccgggtgaacaaaatcagtttacaagactatgaaggattccactatgacaaggagaaactccgagaagcttctatttcagactggttaagaaccattgctggggaactagtgcagtcatttggagcgatacctctgggtattctagttgtgcgtggagactgtgatttggagacttgccgtatgtacatagaccgcctacaggaggacctacagtcagtttcttctggctcccagagagttcattaccaggaccatgaaacctccttccccagggctctctcagcacagaggctctctcctcggtggtgcttcctagatgcaacttctgctgatcgcttttatcgaatagacagatctcaggaacatttgcactttgtgatggagatttcccaagatgagatttttattctggacccagatatggtggtgtcacagccggcggggacacctccgggcatgcctgacctggtggtggaacaagcctcggggtcaccagtctcttcagaagatcatgcaattttgcaggcagtaatagctggtgatcttatgaagctaatagaaagctataaaaatggaggcagtctgctaattcagggaccagaccactgttcactccttcactacgcagctaaaaccggcaacggggagattgtgaaatatatccttgaccacggaccttccgagttattggatatggcagacagtgaaacgggtgagactgcactgcacaaggctgcctgccagcggaaccgggctgtgtgccagcttctggtggatgcaggagcatctctgagaaagacggactccaagggtaagacacctcaagaaagagcacagcaggctggggacccagacttggctgcttacctagaaagccgtcagaactataaggtcattggccatgaggacctggaaactgctgtttgaccctggtattcgggcaaagaggacatgagcaagcgtatcacatctgccctccctgcaattgggcagctcccctggaagaagctgatggaattcatatatctgtctctctcctgcaagaatctacctgagaccatgccactagcttttaagggctaccaagatgtacaacagaacatgatagcccattgagaaggaggcaggatacctggagatttgtggaatacagtacgagttccacaaaatttgatccttattgcttccagcaagtagcatgaacttctgtgttcacctgtataatttattttaaagattcaaaggatgttcgtataaatggcactgctccatcctccccctatgcattggtttttttccctgtaccatacaattctactgtaactacccatcaacttaaagaaaaatattatctcttctctttacattcagtcttggaagaccacaagattgtctgaaggccttctaaaaccttctgaatgtcctgcagaaatataactgtaaaaccacttccatttctaagactaaatatatcaagactatttagtgactctctctgcatgtccccctcacccgccaaccctccgtttcattatataggagctgggaagtgccacatggataatgtcaacttgtgtgctatatctctgaggaatggtgaggtggcatgggagatgtctgtgcttggaggtacctcagagaggtaacccaggggtcagcccaggctgctgggctgtagccaatagccatgcaggactggttcagcttgggctgtctgtacagctccgtactgcctatgtgtagccatctttgccttttgctgcaatagaagatgagcaaaggattaaacagaggcccacagctagtttgcagaaccactcaattttaagtgctgtttaaattgcagagcaaataatcctgtgtgggaactgtggttacaggaaatggagcactctaacaatgtttacttctaaactttgttgaatgataatagaaagcaccctaattgacttggaaaaaaaaaacagcaaaagcaaaagtagcaacatatgtcaacatatgtcactgaaataggaaacagtcattggaatgttgcacagaggctaataactatagactgttggatacagtggtgagaggagccccattttaggtctttcttttaggtttttggttttcattactccaagtaatccttgacccaagaacaaaggcttgttgtatgagttccactgccagatttatgggatgcctggatcattcagaaggatgcttcaactattatttgtcaggtccaaaggtcgtacttaataaccccattttctatgtatggggtagtctaatatattattttatctactttatttttcccttttcagaaagtccttagtgcaaaccaccattggaatctagccagaaatgtctgtcagatagttagaattgtaacatctaaacctgccacggatcgaatggtacttacaggtacctctcttagggactctgtgatccctaaaatatcagaagaaaatgtctgtctttctgtccaaatatctacttgacttgggggta

SEQ ID NO: 8264 - DNA, 4636 bp, Homo sapiens
  source 1..4636: mol_type = unassigned DNA
gtaccgggccgtggagcggcggctcctgtacccccggcgcggacctaaaggggctcgggccgctcgggccgggaatggcggcggcggccgagcccggggcccgcgcctggctgggcggcggctccccgcgccccggcagcccggcctgcagccccgtgctgggctcaggaggccgcgcgcgcccggggccggggccggggccgggacccgagcgggcgggcgtcagagccccgggccccgctgccgcgccgggacacagcttccggaaggtgacgctcaccaagcccaccttctgccacctctgctccgacttcatctgggggctggccggcttcctgtgcgacgtctgcaatttcatgtctcatgagaagtgcctgaagcacgtgaggatcccgtgcacgagtgtggcacccagcctggtccgggttcctgtagcccactgcttcggcccccgggggctccacaagcgcaagttctgtgctgtctgccgcaaggtcctggaggcaccggcgctccactgcgaagtgtgtgagctgcacctccacccagactgtgtgcccttcgcctgcagtgactgccgccagtgccaccaggatgggcaccaggatcacgacacccatcaccaccactggcgggaggggaacctgccctcgggagcgcgctgcgaggtctgcaggaagacgtgcggctcctctgacgtgctggccggcgtgcgctgcgagtggtgcggggtccaggcgcactccctctgctccgcggcgctggctcccgagtgtggcttcgggcgtctgcgctccctggtcctgcctcccgcgtgcgtgcgccttctgcccggcggcttcagcaagacgcagagcttccgcatcgtggaggccgcggagccgggcgaggggggcgacggcgccgacgggagcgctgccgtgggtccaggcagagagacacaggcaactccggagtccgggaagcaaacgctgaagatctttgatggcgacgacgcggtgagaagaagccagttccgcctcgtcacggtgtcccgcctggccggtgccgaggaggtgctggaggccgcactgcgggcccaccacatccccgaggaccctggccacctggagctgtgccggctgcccccttcctctcaggcctgtgacgcctgggctgggggcaaggctgggagtgctgtgatctcggaggagggcagaagccccgggtccggcgaggccacgccagaggcctgggtcatccgggctctgccgcgggcccaggaggtcctgaagatctaccctggctggctcaaggtgggcgtggcctacgtgtccgtgcgagtgaccccgaagagcacggcccgctctgtggtgctggaggtcctgccgctgctcggccgccaggccgagagtcccgagagcttccagctggtggaggtggcgatgggctgcaggcacgtccagcggacgatgctgatggacgaacagcccctgctggaccggctacaggacatccggcagatgtctgtgcggcaggtgagccagacgcggttctacgtggcagagagcagggatgtagccccgcacgtctccctgtttgttggcggcctgcctcccggcctgtctcccgaggagtacagcagcctgctgcatgaggccggggctaccaaagccaccgtggtgtccgtgagtcacatctactcctcccaaggcgcggtagtgttggacgttgcctgctttgcggaggccgagcggctgtacatgctgctgaaggacatggctgtgcggggccggctgctcactgccctggtgctccccgacctgctgcacgcgaagctgcccccagacagctgtcccctccttgtgttcgtgaaccccaagagtggaggcctcaagggccgagacctgctctgcagcttccggaagctactgaaccctcatcaggtcttcgacctgaccaacggaggtcctcttcccgggctccacctgttctcccaggtgccctgcttccgggtgctggtgtgtggtggcgatggcactgtgggctgggtgcttggcgccctggaggagacacggtaccgactggcctgcccggagccttctgtggccatcctgcccctgggcacagggaatgaccttggtcgagtcctccgctggggggcgggctacagcggcgaggacccgttctccgtactgctgtctgtggacgaggccgacgccgtgctcatggaccgctggaccatcctgctggatgcccacgaggctggcagtgcagagaacgacacggcagacgcagagccccccaagatcgtgcagatgagtaactactgtggcattggcatcgacgcggagctgagcctggacttccaccaggcacgggaagaggagcctggcaagttcacaagcaggctgcacaacaagggtgtgtacgtgcgggtggggctgcagaagatcagtcactctcggagcctgcacaagcagatccggctgcaggtggagcggcaggaggtggagctgcccagtattgaaggcctcatcttcatcaacatccccagctggggctcgggggccgacctgtggggctccgacagcgacaccaggtttgagaagccacgcatggacgacgggctgctggaggttgtgggcgtgacgggcgtcgtgcacatgggccaggtccagggtgggctgcgctccggaatccggattgcccagggttcctacttccgagtcacgctcctcaaggccaccccggtgcaggtggacggggagccctgggtccaggccccggggcacatgatcatctcagctgctggccctaaggtgcacatgctgaggaaggccaagcagaagccgaggagggccgggaccaccagggatgcccgggcggatgctgcgcctgcccctgagagcgatcctaggtaggggtggctggggcagcccaagggctcgagccatctctgctcccgccagccttgttttcaggtggtctggaggcagctccacgtccacacagtggccggccctgtggtcggacctggctacagccctgaccacagcatcttcccagtgacggagcgggacccgccctcatcccattggtgacacatgttggtgtcacagccctcatcccactggagactggtgtgcgggtggcagtgttaccccgtgtcccgggtgggcgcagggctctggatggtgagccctctgccctgtgggggcctggtcctctcctcaggggtgggcacccatccctctccccactgagccccttgagctggacagtgctggatgcaggccgtccaggtgggtctgatctcactttgtgcccctcgggccgtccccctggccagtccttaagagcagcaggctccctggtgtgtccctgccccagcagacacaggctgccagtccctccagcctcacctccccgccctgggcagcaggtgtgggcagcgtgtgaggctgccgggtggtggtgactggtgacttccttgtgttcagggaagggagaaggtgccttcccttgttttctggccttgttatatacagatggcagcttggatctcaggtacagctccaggggcaggcagtgcccagctggacctggtggccctttcctagtgcctctgcttggggaggagaacctctgtccacgtggaggctaggaggtctcaggtgctgccctggcagcaccagagtgtgggccgggcccgagtgtctgcccctcggccctcagggtggggcacttagcacccagaagggaccaaaagcagggcatggcggtgcagaggagtttgggaggtgtaaacagcccatgcacgtggaggaggagctggctttcagccccagaccccacgctagcactttccacgctgcttgcccgctgttgatgtgcagttcccagtgcctgtgtgagccgacatctgctcagtcctatccctcgtcagcgtgtggagacccagctcctgcagccctcctgctcccacgcccccagacagcttggtggagggtcctgcatctgggccaggctggggtgcacccagccaaagacaaagctgcctccacgtgcccaaggattcagatggtgcactggccccgggaggagtctgaccaaaaatggagcccgctctgtggggaagccccgactcccccacgagaaacggtcccacggtgcggatctcccccttcccttgtggggcacagctggcctgggcctccaatcctgcggagctttcctgggtgtggctttgacctcagaagtggctctggtttggcctcaggagtgtggcctggcccagcctgctgcagcctcctggggggcccttgatgccactaatcccccgaccccccgcatctgccaaactgcacagacacacgcattgtaaggccgcttgtggcctccagcgtgcactcttgtttacgtcattgtcatcttcaagaccagtcctttgtgattagttttgcttcgcgagccctggtgtggactgtggtctgtatgaatcgtgtgtaactgtggtgaggggcttgtcctgtatgtgagtctgtacccaggtggggtctgtgccctgcacaccgggcccctctgtatttatcgctgcctgaatgcaacagtaatttatatccaggacaaatacagtctgggcgtcactatccta

SEQ ID NO: 8265 - DNA, 2044 bp, Homo sapiens
  source 1..2044: mol_type = unassigned DNA
ataatttggtggcggcgtccggagggtgctggtttgttctcggtgaacggcgcgcggggtctctcctgagtgcgagctacgggaccttcgccatgccggggatggtactcttcggccggcgctgggccatcgccagcgacgacttggtcttcccagggttcttcgagctggtcgtgcgagtgctgtggtggattggcattctgacgttgtatctcatgcacagaggaaagctggactgtgctggtggagccttgctcagcagttacttgatcgtcctcatgattctcctggcagttgtcatatgtactgtgtcagccatcatgtgtgtcagcatgagaggaacgatttgtaaccctggaccgcggaagtctatgtctaagctgctttacatccgcctggcgctgttttttccagagatggtctgggcctctctgggggctgcctgggtggcagatggtgttcagtgcgacaggacagttgtaaacggcatcatcgcaaccgtcgtggtcaggacacagatctggtgcccagcgacattgcggcgggcctcgccctgcttcatcagcaacaggacaatatcaggaacaaccaagagcctgcccaggtggtctgccatgccccagggagctcccagctgcagaagcagaaccacagactatgacttggtcggaggcgatcagctcaactgtcacttcggctccatcctgcacaccacagggctgcagtacagggacttcatccacgtcagcttccatgacaaggtttacgagctgccgtttttagtggctctggatcacaggaaagagtctgttgtggtcgctgtgagggggaccatgtctctgcaggatgtccttacggacctgtcagcggagagtgaggtgctggacgtggagtgtgaggtgcaggaccgcctggcacacaagggtatttctcaagctgccagatacgtttaccaacgactcatcaacgacgggattttgagccaagccttcagcattgctcctgagtaccggctggtcatagtgggccacagcctcgggggcggggcggccgccctgctggccaccatgctcagagccgcctacccgcaggtcaggtgctacgccttctccccaccccgggggctgtggagcaaagctctgcaggaatattctcagagcttcatcgtgtcactcgtcctggggaaggatgtgattcccaggctcagtgtgaccaacttggaagatctgaagagaagaatcttgcgagtggtcgcgcactgcaataaacccaagtacaagatcttgctgcacggtttgtggtacgaactgtttggaggaaaccccaacaacttgcccacggagctggacgggggcgaccaggaagtcctgacacagcctcttctgggggagcagagcctactgacgcgctggtccccggcctacagcttctccagcgactccccactggactcttctcccaagtacccccctctctaccctcccggcaggatcatccacctgcaggaggagggcgcctcggggcggtttggctgctgctctgctgctcactatagcgccaagtggtcacacgaagcggaattcagcaaaatactcataggtccgaagatgctcaccgaccacatgccagacatcctgatgcgggccttggacagcgtggtctccgacagagcggcctgcgtctcctgtccagcacaaggggtctccagtgtggacgtggcctgaccagggccactggaaactgtcccaggaacgatggactcacgcttttgtccttaaactgacttaccatccgaggagttcccatgacgccaaaacagcgaatgtccatcaacaggaatcggatgggaacagaattccatggtctcaatgacttaagtttatgggaagtcattgtggccataatggtagcagaagtagtgagcacgctcaggtgataggacgactcctgagacccagcgaccgtggagacagcctcgggaagccctggcccgtggatggatcccttggctgtctgaggactgctccagaagtgcgggaatcca

SEQ ID NO: 8266 - DNA, 5757 bp, Homo sapiens
  source 1..5757: mol_type = unassigned DNA
atcggggccttggggagcccaggatggaggtggcggtcgcggcggcgggccgagccctgcggcgggcgggaggaggtgagcaccaggcccactgagcctctgcagagccaccagccatgcccgggatcgtggtgttccggcggcgctggtctgtgggcagtgatgacctcgtcctaccggccatcttcctctttctcctgcataccacctggtttgtgatcctgtccgtggtgctcttcggcctggtctataacccgcacgaggcctgctccctgaacctggtggaccacggccgcggctacctgggcatcctgctgagctgcatgatcgctgagatggccatcatctggctgagcatgcgcgggggcatcctctacacggagccccgtgactccatgcagtacgtgctctacgtgcgcctggccatcctggtgatcgagttcatctacgccatcgtgggcatcgtctggctcactcagtactacacctcctgcaacgacctcactgccaagaatgtcaccctcggaatggttgtctgcaactgggtagtcatcctcagtgtgtgcatcactgtcctctgcgtcttcgaccccacgggccgcacctttgtcaagctgagagccaccaagaggaggcagcgtaacctgcggacctacaacctgcggcaccgcttagaggagggtcaagccaccagctggtcgcgccggctcaaagtgttcctctgctgcacgcggacgaaggactcccagtcagatgcctactcagaaatcgcctacctctttgcggagttcttccgggaccttgacattgtgccatccgacatcattgctggcctggtgctgctccggcagcggcagcgggccaagcgcaacgccgtgctggacgaggcaaacaatgacatcttggccttcctgtctgggatgccggtgaccagaaacaccaagtacctcgacctcaagaattcacaagagatgctccgctacaaagaggtctgctactacatgctctttgccctggctgcctacgggtggcccatgtacctgatgcggaagcccgcctgcggcctctgccaactggctcggtcctgctcgtgttgcctgtgtcctgcgaggccgcggttcgcccctggagtcaccatcgaggaagacaactgctgtggctgtaatgccattgccatccggcgccacttcctggacgagaacatgactgcggtggacatcgtctatacctcctgccatgatgcggtctatgaaacgcccttctacgtggcggtggaccatgacaagaagaaagtggtgatcagtatccgggggaccctgtcccccaaggatgccctgactgacctgacgggtgatgctgagcgcctccccgtggaggggcaccacggcacctggctgggccacaagggtatggtcctctcagctgagtacatcaagaagaaactggagcaggagatggtcctgtcccaggcctttgggcgagacctgggccgcggaaccaaacactacggcctgattgtggtgggccactccctgggcgcgggcactgctgccatcctctccttccttctgcgcccacagtatccgaccctcaagtgctttgcctactccccgccagggggcctgctgagtgaggatgcgatggagtattccaaggagttcgtgactgctgtggttctgggcaaagacctcgtccccaggattggcctctctcagctggaaggcttccgcagacagctcctggatgtcctgcagcgaagcaccaagcccaaatggcggatcatcgtgggggccaccaaatgcatccccaagtcggagctgcctgaggaggtagaggtgaccaccctggccagcacgcggctctggacccaccccagcgacctaactatagccctctcagccagcactccactctacccgcccggccgcatcatccacgtggtccacaaccaccctgcagagcagtgctgctgctgtgagcaggaggagcccacatactttgccatctggggcgacaacaaggccttcaatgaggtgatcatctcgccagccatgctgcatgagcacctgccctatgtggtcatggaggggctcaacaaggtgctggagaactacaacaaggggaagaccgctctgctctctgcagccaaggtcatggtgagccctaccgaggtggacctgactcctgagctcatcttccagcagcagccactccccacggggccgcccatgcccactggccttgccctggagctgccgactgcagaccaccgcaacagcagcgtcaggagcaagtcccagtctgagatgagcctggagggcttctcggaggggcggctgctgtcgccagtggttgcggcggcggcccgccaggacccggtggagctgctgctgctgtctacccaggagcggctggcggcggagctgcaggcccggcgggcaccactggccaccatggagagcctctcggacactgagtccctgtacagcttcgactcgcgccgctcctcaggcttccgcagcatccggggctcccccagcctccacgctgtgctggagcgtgatgaaggccacctcttctacattgaccctgccatccccgaggaaaacccatccctgagctcgcgcactgagctgctggcggccgacagcctgtccaagcactcacaggacacgcagcccctggaggcggccctgggcagtggcggcgtcactcctgagcggccccccagtgctgcggccaatgacgaggaggaagaggttggcggtgggggtggcgggccggcctcccgcggggagctggcgctgcacaatgggcgcctgggggactcgcccagtcctcaggtgctggaattcgccgagttcatcgacagcctcttcaacctggacagcaagagcagctccttccaagacctctactgcatggtggtgcccgagagccccaccagtgactacgctgagggccccaagtcccccagccagcaagagatcctgctccgtgcccagttcgagcccaacctggtgcccaagcccccacggctctttgccggctcagccgacccctcctcgggcatctcactctcgccctccttcccgctcagctcctcgggtgagctcatggacctgacgcccacgggcctcagtagccaggaatgcctggcggctgacaagatccggacttctacccccactggccacggagccagccccgccaagcaagatgagctggtcatctcagcacgctagcaccccagttgcgtggccagccgggcccaggcaggagcaggtggccctgtgggcacctggtgcctgccccctgccgggcagctttaaggacagacccccaggggcagtttagcctcaggcacaggcatcgctgctgagctgggggtccgcatccctacctcagcttaggacccccagagccaaggtggctgggatctggccccacagatggggaaagatggggaagggtgtggagtggggaggagcctgggcagcctgctgggtgggccacactcagcctgactgccctccatgggggcattctggcaccccctgctccaggacaggccatgggcaagctgcctcccatcactgcctgctggctgctctcccaggggccaggtggagagcagtgccccccgacacatgtattctcatctgtggtccaggccggcatcgtcctggccaccccccagatctggtgcctgctggccggccccctggggtgcccctgccgaggtggcctgcagtgctgtacatgtttacagaagctgctgggcttggctcaggatgtgttctgggcttgcaagccccccgcccaatcatgtgttcagtagccgtcctctgagcagggcccaaggcagccaggggcctggaggggccagaggagggtggggtcagggccgccccttctctgccttgtgcctctcatgctgcctcctctgcccatgggtcctgggcacccaggcctgccctgcctgctggctacttcctggcttaccttctacccccaaggatcctcaccacccaaagggtggtgggcactgctgtgaccaccccagctgcagagtcagtgccctgggtggaaggaaggcactgagagcccccttcctctgagggccccacctcaccccttggtgtcacccccaccacgcctaggcagctctgggccctgggatctggaaccaacacacccctgttcccctcagctttccctcctcgctggcctgggcaccctcctgggagcaggccttcctccctcccacccccaatgtcctgttggtaggaggtggggccaagagtggggtatggtgggccttggctggagacctctgtccactgcccagggaggggcctggggctgggagcagtcccggtttagcctgaggtccccatagggcttcctcccctgctgggtttgggaagcagttagggagatagcgacccggagtttccccagaagcggggtgggagggtgtgcatgctagtgttggcgcgtatgcatgtgcatgagtgtgcaccgttcctaaggaaggggcctctggggctgcccaccctacctgccctgcctgcctgctgcccctcccagcctgccaagaaaacggtaggggagcatgatggggcctttgaggcagggtcgcagggacaagctcagctttaggcaccatctgttcccatcgcgcctgctgctgtgacccgttttggaaaactggtgtgtaccgaggcgctgactgcacggctgaccgcctgctcgtgccttcattctgcagcggcatggtccctcccattctggctccacctgcagcctccctgggtggcctaggctcccccgaccaagagacctccctctcatgatcactggtacctgggggcctgaattctggcccccggctccccacacagctgggactggcctggatggctgtcctgggagcccctgcccaccctgacagagggagctgggcctcccctcatcctctgtaactcccgccttcaccagactcaaggacaccctggccctgctgaggcatacagagcttcagcccagcacagaagcaagacaaaatcagtggctcttagagtttagaaaacaagacagactctcagatgaaagatctgacaagcaccgtggccagtcacagggagagacttgatgtctggccttttaattcctcctctgccagggtgggtcctgggacctctaatgtgggcatgtcgtccaccccaggacgagccatcagggacagaccccccacccccaaggctgcagccacaccatgtttcaggcttggggctggggcaggcttgggctcaatcctgggcacccaggggcagcccacccctaacctggctcctacccacctcgcccttgaaggatgggcctgctgcacgtctccctcctccaccccataccacactggggggtctgagccacccccctcagccccgttcggctcagaccgacccccactccatccccagacctgcagcacaagtgcgcgggcctgtcctcccaggggcctgggcgactccatatgcaatcagtagcgagcagccgggccccacagaccctcatgcactctcttacgtgccattctccccagactttttttgtacttaatgtatgaaagatccaaactaatattgctgtaaaaaggagagacaaattaatatagcttattctataaatatatctgtatataaaggtttctgtatattgtatagagctgtgtataaactggatgtagaagca

SEQ ID NO: 8267 - DNA, 2897 bp, Homo sapiens
  source 1..2897: mol_type = unassigned DNA
agtgcgcttgcgccgatctcggcctcagcgtgagcatgcgcaggtccccgccctcgctgcgtttgcgcttgagcgccgataatttggtggcggcgtccggagggtgctggtttgttctcggtgaacggcgcgcggggtctctcctgagtgcgagctacgggaccttcgccatgccggggatggtactcttcggccggcgctgggccatcgccagcgacgacttggtcttcccagggttcttcgagctggtcgtgcgagtgctgtggtggattggcattctgacgttgtatctcatgcacagaggaaagctggactgtgctggtggagccttgctcagcagttacttgatcgtcctcatgattctcctggcagttgtcatatgtactgtgtcagccatcatgtgtgtcagcatgagaggaacgatttgtaaccctggaccgcggaagtctatgtctaagctgctttacatccgcctggcgctgttttttccagagatggtctgggcctctctgggggctgcctgggtggcagatggtgttcagtgcgacaggacagttgtaaacggcatcatcgcaaccgtcgtggtcagttggatcatcatcgctgccacagtggtttccattatcattgtctttgaccctcttggggggaaaatggctccatattcctctgccggccccagccacctggatagtcatgattcaagccagttacttaatggcctcaagacagcagctacaagcgtgtgggaaaccagaatcaagctcttgtgctgttgcattgggaaagacgaccatactcgggttgctttttcgagtacggcagagcttttctcaacctacttttcagacacagatctggtgcccagcgacattgcggcgggcctcgccctgcttcatcagcaacaggacaatatcaggaacaaccaagagcctgcccaggtggtctgccatgccccagggagctcccaggaagctgatctggatgcagaattagaaaactgccatcattacatgcagtttgcagcagcggcctatgggtggcccctctacatctacagaaaccccctcacggggctgtgcaggattggtggtgactgctgcagaagcagaaccacagactatgacttggtcggaggcgatcagctcaactgtcacttcggctccatcctgcacaccacagggctgcagtacagggacttcatccacgtcagcttccatgacaaggtttacgagctgccgtttttagtggctctggatcacaggaaagagtctgttgtggtcgctgtgagggggaccatgtctctgcaggatgtccttacggacctgtcagcggagagtgaggtgctggacgtggagtgtgaggtgcaggaccgcctggcacacaagggtatttctcaagctgccagatacgtttaccaacgactcatcaacgacgggattttgagccaagccttcagcattgctcctgagtaccggctggtcatagtgggccacagcctcgggggcggggcggccgccctgctggccaccatgctcagagccgcctacccgcaggtcaggtgctacgccttctccccaccccgggggctgtggagcaaagctctgcaggaatattctcagagcttcatcgtgtcactcgtcctggggaaggatgtgattcccaggctcagtgtgaccaacttggaagatctgaagagaagaatcttgcgagtggtcgcgcactgcaataaacccaagtacaagatcttgctgcacggtttgtggtacgaactgtttggaggaaaccccaacaacttgcccacggagctggacgggggcgaccaggaagtcctgacacagcctcttctgggggagcagagcctactgacgcgctggtccccggcctacagcttctccagcgactccccactggactcttctcccaagtacccccctctctaccctcccggcaggatcatccacctgcaggaggagggcgcctcggggcggtttggctgctgctctgctgctcactatagcgccaagtggtcacacgaagcggaattcagcaaaatactcataggtccgaagatgctcaccgaccacatgccagacatcctgatgcgggccttggacagcgtggtctccgacagagcggcctgcgtctcctgtccagcacaaggggtctccagtgtggacgtggcctgaccagggccactggaaactgtcccaggaacgatggactcacgcttttgtccttaaactgacttaccatccgaggagttcccatgacgccaaaacagcgaatgtccatcaacaggaatcggatgggaacagaattccatggtctcaatgacttaagtttatgggaagtcattgtggccataatggtagcagaagtagtgagcacgctcaggtgataggacgactcctgagacccagcgaccgtggagacagcctcgggaagccctggcccgtggatggatcccttggctgtctgaggactgctccagaagtgcgggaatccagggcccacccagaagaccgtgaacagttccttagcctcccacccccaaggcagctcttttcatccaactcagtttacaggcgtggtttgtttttcaaactgggcttcctggatgtacaaatggaactgtggtgagggtgcgggctggggttttctcctgggcgtcaccaagggcagccctgggctctggctggggatgaagacgaaacccgatcgggaaagtaagtggagcccccggccccgccgagccacagccccccaactgcctattcccactgcccagttgtttgtccacatcaggagttgctgattgaattcttgctactcttctggctctggggtcggccagtggattcaggagttgaaacaataaagcgcgcgtcaccata

SEQ ID NO: 8268 - DNA, 1374 bp, Homo sapiens
  source 1..1374: mol_type = unassigned DNA
aatttggtggcggcgtccggagggtgctggtttgttctcggtgaacggcgcgcggggtctctcctgagtgcgagctacgggaccttcgccatgccggggatggtactcttcggccggcgctgggccatcgccagcgacgacttggtcttcccagggttcttcgagctggtcgtgcgagtgctgtggtggattggcattctgacgttgtatctcatgcacagaggaaagctggactgtgctggtggagccttgctcagcagttacttgatcgtcctcatgattctcctggcagttgtcatatgtactgtgtcagccatcatgtgtgtcagcatgagaggacacagatctggtgcccagcgacattgcggcgggcctcgccctgcttcatcagcaacaggacaatatcaggaacaaccaagagcctgcccaggtggtctgccatgccccagggagctcccagctgcagaagcagaaccacagactatgacttggtcggaggcgatcagctcaactgtcacttcggctccatcctgcacaccacagggctgcagtacagggacttcatccacgtcagcttccatgacaaggtttacgagctgccgtttttagtggctctggatcacaggaaagagtctgttgtggtcgctgtgagggggaccatgtctctgcaggatgtccttacggacctgtcagcggagagtgaggtgctggacgtggagtgtgaggtgcaggaccgcctggcacacaagggtatttctcaagctgccagatacgtttaccaacgactcatcaacgacgggattttgagccaagccttcagcattgctcctgagtaccggctggtcatagtgggccacagcctcgggggcggggcggccgccctgctggccaccatgctcagagccgcctacccgcaggtcaggtgctacgccttctccccaccccgggggctgtggaggtgagcctttgttttcctgctctaacagcttgctacttacaagtcatgtggtcaagactcatcttttttttcttttattttcctgagatgaagtcttgctctgtcgcccaggctggagtgcagtggcgtgatctcggctcactgcaagctccacctcccaggttcaggcggttcttctgcctcagcctcccgagttgctgggactacagacacccgccagcatgccggctaatttttgtatttttagtagtggtggggtttcaccatgttggccaggctggtcttgatctcctgacctcaagtgatctgcccgcctcggcctcccaaagtgcagggattacaggcgtgagccaccgcacccagctgagcaaagctctgcaggaatattctcagagcttcatcgtgtcactcgtcct

SEQ ID NO: 8269 - DNA, 1729 bp, Homo sapiens
  source 1..1729: mol_type = unassigned DNA
aatttggtggcggcgtccggagggtgctggtttgttctcggtgaacggcgcgcggggtctctcctgagtgcgagctacgggaccttcgccatgccggggatggtactcttcggccggcgctgggccatcgccagcgacgacttggtcttcccagggttcttcgagctggtcgtgcgagtgctgtggtggattggcattctgacgttgtatctcatgcacagaggaaagctggactgtgctggtggagccttgctcagcagttacttgatcgtcctcatgattctcctggcagttgtcatatgtactgtgtcagccatcatgtgtgtcagcatgagagttggatcatcatcgctgccacagtggtttccattatcattgtctttgaccctcttggggggaaaatggctccatattcctctgccggccccagccacctggatagtcatgattcaagccagttacttaatggcctcaagacagcagctacaagcgtgtgggaaaccagaatcaagctcttgtgctgttgcattgggaaagacgaccatactcgggttgctttttcgagtacggcagagcttttctcaacctacttttcagacacagatctggtgcccagcgacattgcggcgggcctcgccctgcttcatcagcaacaggacaatatcaggaacaaccaagagcctgcccaggtggtctgccatgccccagggagctcccaggaagctgatctggatgcagaattagaaaactgccatcattacatgcagtttgcagcagcggcctatgggtggcccctctacatctacagaaaccccctcacggggctgtgcaggattggtggtgactgctgcagaagcagaaccacagactatgacttggtcggaggcgatcagctcaactgtcacttcggctccatcctgcacaccacagggctgcagtacagggacttcatccacgtcagcttccatgacaaggtttacgagctgccgtttttagtggctctggatcacaggaaagagtctgttgtggtcgctgtgagggggaccatgtctctgcaggatgtccttacggacctgtcagcggagagtgaggtgctggacgtggagtgtgaggtgcaggaccgcctggcacacaagggtatttctcaagctgccagatacgtttaccaacgactcatcaacgacgggattttgagccaagccttcagcattgctcctgagtaccggctggtcatagtgggccacagcctcgggggcggggcggccgccctgctggccaccatgctcagagccgcctacccgcagcaaagctctgcaggaatattctcagagcttcatcgtgtcactcgtcctggggaaggatgtgattcccaggctcagtgtgaccaacttggaagatctgaagagaagaatcttgcgagtggtcgcgcactgcaataaacccaagtacaagatcttgctgcacggtttgtggtacgaactgtttggaggaaaccccaacaacttgcccacggagctggacgggggcgaccaggaagtcctgacacagcctcttctgggggagcagagcctactgacgcgctggtccccggcctacagcttctccagcgactccccactggactcttctcccaagtacccccctctctaccctcccggcaggatcatccacctgcaggaggagggcgcctcggggcggtttggctgctgctctgctgctcactatagcg

SEQ ID NO: 8270 - DNA, 916 bp, Homo sapiens
  source 1..916: mol_type = unassigned DNA
gcgtttgcgcttgagcgccgataatttggtggcggcgtccggagggtgctggtttgttctcggtgaacggcgcgcggggtctctcctgagtgcgagctacgggaccttcgccatgccggggatggtactcttcggccggcgctgggccatcgccagcgacgacttggtcttcccagggttcttcgagctggtcgtgcgagtgctgtggtggattggcattctgacgttgtatctcatgcacagaggaaagctggactgtgctggtggagccttgctcagcagttacttgatcgtcctcatgattctcctggcagttgtcatatgtactgtgtcagccatcatgtgtgtcagcatgagaggaacgatttgtaaccctggaccgcggaagtctatgtctaagctgctttacatccgcctggcgctgttttttccagagatggtctgggcctctctgggggctgcctgggtggcagatggtgttcagtgcgacaggacagttgtaaacggcatcatcgcaaccgtcgtggtcagttggatcatcatcgctgccacagtggtttccattatcattgtctttgaccctcttggggggaaaatggctccatattcctctgccggccccagccacctggatagtcatgattcaagccagttacttaatggcctcaagacagcagctacaagcgtgtgggaaaccagaatcaagctcttgtgctgttgcattgggaaagacgaccatactcgggttgctttttcgagtacggcagagcttttctcaacctacttttcagacacagatctggtgcccagcgacattgcggcgggcctcgccctgcttcatcagcaacaggacaataccagggccactggaaactgtcccaggaacgatggactcacgcttttgtccttaaactga

SEQ ID NO: 8271 - DNA, 2004 bp, Homo sapiens
  source 1..2004: mol_type = unassigned DNA
aggccccgcctcaggtcggccgcggactacaaatggacgagagaggcggccgtccattagttagcggctccggagcaacgcagccgttgtccttgaggccgacgggcctgacgcgggcgggttgaacgcgctggtgaggcggtcacccgggctacggcggccggcagggggcagtggcggccgttgtctagggcccggaggtggggccgcgcgcctcgggcgctacgaacccggcaggcccacgcttggctgcggccgggtgcgggctgaggccatgggcgaccgcggcagctcccggcgccggaggacagggtcgcggccctcgagccacggcggcggcgggcctgcggcggcggaagaggaggtgcgggacgccgctgcgggccccgacgtgggagccgcgggggacgcgccagccccggcccccaacaaggacggagacgccggcgtgggcagcggccactgggagctgaggtgccatcgcctgcaggattctttattcagctctgacagtggcttcagcaactaccgtggcatcctgaactggtgtgtggtgatgctgatcttgagcaatgcccggttatttctggagaacctcatcaagtatggcatcctggtggaccccatccaggtggtttctctgttcctgaaggatccctatagctggcccgccccatgcctggttattgcggccaatgtctttgctgtggctgcattccaggttgagaagcgcctggcggtgggtgccctgacggagcaggcgggactgctgctgcacgtggccaacctggccaccattctgtgtttcccagcggctgtggtcttactggttgagtctatcactccagtgggctccctgctggcgctgatggcgcacaccatcctcttcctcaagctcttctcctaccgcgacgtcaactcatggtgccgcagggccagggccaaggctgcctctgcagggaagaaggccagcagtgctgctgccccgcacaccgtgagctacccggacaatctgacctaccgcgatctctactacttcctcttcgcccccaccttgtgctacgagctcaactttccccgctctccccgcatccggaagcgctttctgctgcgacggatccttgagatgctgttcttcacccagctccaggtggggctgatccagcagtggatggtccccaccatccagaactccatgaagcccttcaaggacatggactactcacgcatcatcgagcgcctcctgaagctggcggtccccaatcacctcatctggctcatcttcttctactggctcttccactcctgcctgaatgccgtggctgagctcatgcagtttggagaccgggagttctaccgggactggtggaactccgagtctgtcacctacttctggcagaactggaacatccctgtgcacaagtggtgcatcagacacttctacaagcccatgcttcgacggggcagcagcaagtggatggccaggacaggggtgttcctggcctcggccttcttccacgagtacctggtgagcgtccctctgcgaatgttccgcctctgggcgttcacgggcatgatggctcagatcccactggcctggttcgtgggccgctttttccagggcaactatggcaacgcagctgtgtggctgtcgctcatcatcggacagccaatagccgtcctcatgtacgtccacgactactacgtgctcaactatgaggccccagcggcagaggcctgagctgcacctgagggcctggcttctcactgccacctcacacccgctgccagagcccacctctcctcctaggcctcgagtgctggggatgggcctggctgcacagcatcctcctctggtcccagggaggcctctctgcccctatggggctctgtcctgcacccctcagggatggcgacagcaggccagacacagtctgatgccagctgggagtcttgctgaccctgccccgggtccgagggtgtcaataaagtgctgtccagtga

SEQ ID NO: 8272 - DNA, 2453 bp, Homo sapiens
  source 1..2453: mol_type = unassigned DNA
ctgccccgttgtgaggtgataaagtgttgcgctccgggacgccagcgccgcggctgccgcctctgctggggtctaggctgtttctctcgcgccaccactggccgccggccgcagctccaggtgtcctagccgcccagcctcgacgccgtcccgggacccctgtgctctgcgcgaagccctggccccgggggccggggcatgggccaggggcgcggggtgaagcggcttcccgcggggccgtgactgggcgggcttcagccatgaagaccctcatagccgcctactccggggtcctgcgcggcgagcgtcaggccgaggctgaccggagccagcgctctcacggaggacctgcgctgtcgcgcgaggggtctgggagatggggcactggatccagcatcctctccgccctccaggacctcttctctgtcacctggctcaataggtccaaggtggaaaagcagctacaggtcatctcagtgctccagtgggtcctgtccttccttgtactgggagtggcctgcagtgccatcctcatgtacatattctgcactgattgctggctcatcgctgtgctctacttcacttggctggtgtttgactggaacacacccaagaaaggtggcaggaggtcacagtgggtccgaaactgggctgtgtggcgctactttcgagactactttcccatccagctggtgaagacacacaacctgctgaccaccaggaactatatctttggataccacccccatggtatcatgggcctgggtgccttctgcaacttcagcacagaggccacagaagtgagcaagaagttcccaggcatacggccttacctggctacactggcaggcaacttccgaatgcctgtgttgagggagtacctgatgtctggaggtatctgccctgtcagccgggacaccatagactatttgctttcaaagaatgggagtggcaatgctatcatcatcgtggtcgggggtgcggctgagtctctgagctccatgcctggcaagaatgcagtcaccctgcggaaccgcaagggctttgtgaaactggccctgcgtcatggagctgacctggttcccatctactcctttggagagaatgaagtgtacaagcaggtgatcttcgaggagggctcctggggccgatgggtccagaagaagttccagaaatacattggtttcgccccatgcatcttccatggtcgaggcctcttctcctccgacacctgggggctggtgccctactccaagcccatcaccactgttgtgggagagcccatcaccatccccaagctggagcacccaacccagcaagacatcgacctgtaccacaccatgtacatggaggccctggtgaagctcttcgacaagcacaagaccaagttcggcctcccggagactgaggtcctggaggtgaactgagccagccttcggggccaattccctggaggaaccagctgcaaatcacttttttgctctgtaaatttggaagtgtcatgggtgtctgtgggttatttaaaagaaattataacaattttgctaaaccattacaatgttaggtcttttttaagaaggaaaaagtcagtatttcaagttctttcacttccagcttgccctgttctaggtggtggctaaatctgggcctaatctgggtggctcagctaacctctcttcttcccttcctgaagtgacaaaggaaactcagtcttcttggggaagaaggattgccattagtgacttggaccagttagatgattcactttttgcccctagggatgagaggcgaaagccacttctcatacaagcccctttattgccactaccccacgctcgtctagtcctgaaactgcaggaccagtttctctgccaaggggaggagttggagagcacagttgccccgttgtgtgagggcagtagtaggcatctggaatgctccagtttgatctcccttctgccacccctacctcacccctagtcactcatatcggagcctggactggcctccaggatgaggatgggggtggcaatgacaccctgcaggggaaaggactgccccccatgcaccattgcagggaggatgccgccaccatgagctaggtggagtaactggtttttcttgggtggctgatgacatggatgcagcacagactcagccttggcctggagcacatgcttactggtggcctcagtttaccttccccagatcctagattctggatgtgaggaagagatccctcttcagaaggggcctggccttctgagcagcagattagttccaaagcaggtggcccccgaacccaagcctcacttttctgtgccttcctgagggggttgggccggggaggaaacccaaccctctcctgtgtgttctgttatctcttgatgagatcattgcaccatgtcagacttttgtatatgccttgaaaataaatgaaagtgagaatcctc

SEQ ID NO: 8273 - DNA, 2202 bp, Homo sapiens
  source 1..2202: mol_type = unassigned DNA
gtcctagccgcccagcctcgacgccgtcccgggacccctgtgctctgcgcgaagccctggccccgggggccggggcatgggccaggggcgcggggtgaagcggcttcccgcggggccgtgactgggcgggcttcagccatgaagaccctcatagccgcctactccggggtcctgcgcggcgagcgtcaggccgaggctgaccggagccagcgctctcacggaggacctgcgctgtcgcgcgaggggtctgggagatggggagtggcctgcagtgccatcctcatgtacatattctgcactgattgctggctcatcgctgtgctctacttcacttggctggtgtttgactggaacacacccaagaaaggtggcaggaggtcacagtgggtccgaaactgggctgtgtggcgctactttcgagactactttcccatccagctggtgaagacacacaacctgctgaccaccaggaactatatctttggataccacccccatggtatcatgggcctgggtgccttctgcaacttcagcacagaggccacagaagtgagcaagaagttcccaggcatacggccttacctggctacactggcaggcaacttccgaatgcctgtgttgagggagtacctgatgtctggaggtatctgccctgtcagccgggacaccatagactatttgctttcaaagaatgggagtggcaatgctatcatcatcgtggtcgggggtgcggctgagtctctgagctccatgcctggcaagaatgcagtcaccctgcggaaccgcaagggctttgtgaaactggccctgcgtcatggagctgacctggttcccatctactcctttggagagaatgaagtgtacaagcaggtgatcttcgaggagggctcctggggccgatgggtccagaagaagttccagaaatacattggtttcgccccatgcatcttccatggtcgaggcctcttctcctccgacacctgggggctggtgccctactccaagcccatcaccactgttgtgggagagcccatcaccatccccaagctggagcacccaacccagcaagacatcgacctgtaccacaccatgtacatggaggccctggtgaagctcttcgacaagcacaagaccaagttcggcctcccggagactgaggtcctggaggtgaactgagccagccttcggggccaattccctggaggaaccagctgcaaatcacttttttgctctgtaaatttggaagtgtcatgggtgtctgtgggttatttaaaagaaattataacaattttgctaaaccattacaatgttaggtcttttttaagaaggaaaaagtcagtatttcaagttctttcacttccagcttgccctgttctaggtggtggctaaatctgggcctaatctgggtggctcagctaacctctcttcttcccttcctgaagtgacaaaggaaactcagtcttcttggggaagaaggattgccattagtgacttggaccagttagatgattcactttttgcccctagggatgagaggcgaaagccacttctcatacaagcccctttattgccactaccccacgctcgtctagtcctgaaactgcaggaccagtttctctgccaaggggaggagttggagagcacagttgccccgttgtgtgagggcagtagtaggcatctggaatgctccagtttgatctcccttctgccacccctacctcacccctagtcactcatatcggagcctggactggcctccaggatgaggatgggggtggcaatgacaccctgcaggggaaaggactgccccccatgcaccattgcagggaggatgccgccaccatgagctaggtggagtaactggtttttcttgggtggctgatgacatggatgcagcacagactcagccttggcctggagcacatgcttactggtggcctcagtttaccttccccagatcctagattctggatgtgaggaagagatccctcttcagaaggggcctggccttctgagcagcagattagttccaaagcaggtggcccccgaacccaagcctcacttttctgtgccttcctgagggggttgggccggggaggaaacccaaccctctcctgtgtgttctgttatctcttgatgagatcattgcaccatgtcagacttttgtatatgccttgaaaataaatgaaagtgagaatcctc

SEQ ID NO: 8274 - DNA, 9333 bp, Homo sapiens
  source 1..9333: mol_type = unassigned DNA
gggcactttgaagaatcacgtgtgttgaggccctcttaaagagataggcacctacttttccctccaccctaaacaccgccctgagggcggcggcgaccgtggtaattgcaactgctcaggggcagggcttgccccagcgccgagtagtggcaacggcgtggttgcgtcgggggtgcctgggagcctggagtcccgggggcctgaaatcggcagcttcccgggcagacactctctccctcaggaagaggtgccgccgagtcagcgcggggcagtgtgagcgccccgaggtgctttctcagttgaggagaggtggggttacagggcacaggtgacagggccggagaaagatggagcagcccggggcggcggcgtcgggagcgggaggcggcagcgaggaacccggtgggggccggagcaacaagcggagcgcggggaaccgggccgccaatgaagaggaaacgaaaaacaaacccaaattgaacattcaaataaaaactttggcagatgatgtgcgtgaccgaattacaagttttagaaaatctactgtcaaaaaagaaaaacctcttattcaacatcctattgattctcaagtcgcgatgagtgagtttcctgcagctcagccattatatgatgaacgatctttgaatttgtcagaaaaggaagtattggatctctttgaaaaaatgatggaggacatgaaccttaacgaagagaaaaaagctcctttacgaaacaaagactttaccaccaaacgtgagatggttgtccagtatatttctgccactgccaaatctggtgggctgaaaaacagcaaacatgaatgcaccctgtcttcacaagaatatgttcatgaattacgatcgggtatatcagatgagaaacttcttaattgcctagaatccctcagggtttctttaaccagcaatccggtcagctgggttaacaactttggccatgaaggtcttggactcttattggatgagctggaaaagcttctggacaaaaaacagcaagaaaatattgacaagaagaatcagtataaacttattcaatgcctcaaagcatttatgaataataagtttggattacaaaggattctaggagatgaaagaagtcttttactattggcaagagcaattgaccccaaacaacccaacatgatgactgaaatagtaaaaatactttctgctatttgcattgttggagaagagaacattctagataaacttttaggggctataacaacagcagcagaaagaaataacagggaacgattttcaccaattgtggaaggtttagaaaatcaggaagccttgcaattacaggtggcctgcatgcagtttataaatgcccttgtcacttctccttatgagcttgattttcgaatacatttaaggaatgaattcctccgttcaggactaaaaacaatgttaccagatctaaaagaaaaagagaatgatgagcttgatattcagttgaaagtatttgatgaaaacaaagaagatgacctaactgaattatcacaccgtctcaatgacattcgagcagaaatggatgatatgaatgaagtctaccatcttctatataatatgctgaaggacactgctgctgaaaattacttcttatctattctacaacattttttgcttatcagaaatgattattatatcaggccacaatattataaaataattgaggaatgtgtttcacagatagtgctacactgcagtggtatggatccagacttcaaatacaggcaaagattagacatcgatttaactcatctgatagattcttgtgtgaacaaggcgaaagttgaagaaagtgaacaaaaagctgcagagttttcaaagaagttcgatgaagaattcacagctcgacaggaagctcaagcagagcttcaaaaaagagatgagaaaatcaaagaacttgaagcagaaatccagcaacttcgaacccaggcacaagtactctcaagttcatcaggaattccaggtcctcctgcagcacctccattgccaggtgtagggccgcctccaccaccacccgcgccacctctacccggaggagctcctcttcctcctccaccacctcctttacctggaatgatggggataccaccaccacccccaccaccacttttatttgggggacctcctccaccaccaccccttggaggagttcctcctcccccaggaatatcacttaatctaccttatggaatgaagcagaaaaaaatgtataaacctgaagtgtccatgaagagaatcaattggtcaaagattgaacccacagaattatctgagaactgtttctggttaagagtcaaagaagacaagtttgagaatccagatctctttgccaaattggcattgaattttgctactcagataaaagttcaaaagaacgcagaagcattagaagaaaagaagactgggcctacaaagaagaaagtgaaagaactgagaattttggatcccaaaacagctcagaatctgtccatctttctgggatcatatcgcatgccatatgaagacataagaaacgttattctggaggttaatgaagacatgctgagtgaggctttaattcagaaccttgtgaaacatcttcctgagcagaagatactcaacgaattagcagagcttaagaatgaatatgatgacctctgtgagcctgaacaatttggagttgtgatgagctctgtgaaaatgttacagcctcgtctcagtagtatcctgttcaagctcacatttgaagaacacataaacaacatcaaaccaagcatcatagcagtaactcttgcctgtgaagaactgaagaaaagtgaaagctttaacagacttttagagttagttcttcttgttggaaactacatgaactcaggctcaagaaatgcccagtctttgggatttaagatcaacttcctttgtaagatcagagatactaaatcagcggatcaaaaaacaacccttttgcattttattgccgacatttgtgaggaaaaatatcgagatatcctaaaatttcctgaagaactggaacacgtagaaagtgcaagcaaagtttcagctcaaattctcaagagcaaccttgcatcaatggaacaacaaattgttcatctggaacgtgacatcaagaaattcccccaagcagaaaatcaacacgataagtttgtggaaaagatgaccagctttacaaagactgcccgagaacagtatgaaaaactctccaccatgcacaacaacatgatgaagctctatgagaatcttggagaatacttcatttttgactcaaagacagtgagcatagaagagttctttggtgatctcaacaacttccgaactttgtttttggaagcagtgagagaaaacaataagagaagagaaatggaagagaagaccaggagggcaaaacttgcaaaagagaaagctgaacaagaaaagttagaacgccagaagaaaaagaaacaactcattgatataaacaaagagggtgatgagactggtgtgatggataatcttctagaagccctacaatcaggtgcagcattcagagaccgtcgaaagcggattccaaggaatccagataacagacgagtacctttggaaaggtcacgctctcgccacaatggagctatctcatctaagtgattcctgatgccaaagaatatgaaaatatttaagtaaaaacaaaatgatgcattttgagaagaacaaagtgtgcactcagcggctggaaaggaaataagtgcatttctgcaaagatcaagataagctggatgaagtagtgtgcatttgtaatactattgcaagactcctcccacaattattctaatctgaacacagttatcaggattacaaaatgtgttccattttagtgtaaagatgtgtatcatttgtaattgtgtgtgacctgactgtgatgatggaagtgtaagaaattgaagagttctaaggctttcaaaaacactcagtcaaaaatttaaaatcttaaatgtgtaagtcacccccaccaaaaacaaaagagaagaaaaagaatagaaagaattatccagtgtcagcttccaatccctagtacatatataatagaaaagggccaagaaaaatatgcatcttgatttggagagaggctaatattatgcacactgtaagagaagccattttggaaattcacgaaagtactgctccaccccagttgagttatttagaattttatctcaagtgaaagctgatggattcatctgctttggctgaaattaaacttatcattagtctagctagcatttcagcatgatattgcaagcacttctcattgctaaaaataaataaaccaaagtttaaccgaatcagttagggaaagtgatttaaactttatttaaagaggtattttctaattatgcacagatatctactttatacaaatactttatatggctatttttgagaaaaccctcacattttaatgtttatgctagggatgaacctgaaaattctattacgtttatttagatttcaaaggcaaatattgattcctatgctctgtggtttatttcttttttctattgcttctttctcccttgagtcccttgaaggcagggaatagacttctagaaaacctgagaggaaaaagaattctttttacaggaggcagcagaaaactgtctgaaaggtcaattgttttatctccctttccactctctttccaatttcactttggtggtctgaagaagaaaaagaaattttatgtatgtatgtgtaaatatgtgtatatatttctatctcttgctacaataattccaactaagtgaacttctcaattatcatcatacttacttaccttatattaacaaattaagatgatgctgccaaaacaagtctagcagggaaaacaggttctacatttttcttaaataaattagggagtaaaagttatacttaacttgtctgtctattattttaaaatatgcattgaaataatgtggtataacttctctggagtgcaattttaagtctaattcatgcagatgattgattgtgattattgtaagaaatttcttacatgtatatttcttatgtagaaaatactgtttctactcattcaaagcacattgtagatattcagagagaagaacaaatggctggcttggcaaatccccatctgagataaagtaaacaagtgaccagcagcccacagatgattcctttatatagatgtataatgattcaaactgctgcctttgcctccagtgcatccttacttaggtattatacttctttaaaaagctctgaagctgctacaatagaaaaatcaaaaagggtaacagtatctgaaatttcacagtcctatccgatctgaaaacacacatacacaaatgcacacacatgcacacacacatttaagggacatagcagtaacactgttttttaacaacaacaaaagtttaggttctaatttatgtaaatacctagtatgtgtatttttgactttacaaagtctttcttttctgaaatcttcgtggtatggcttttttaattcttttgacagcttatcagtctgtaggagaatgatcttgaaatgttaaccctgactaaaatttgggagcatatgccttgctatattatcaagctggtcaaggtagaaatactgatatgtatcatcaccttttccagatacaaacttgccttattttctagtttgtgaacaagaacgaatgaagtactattattgataacttatatatttttatttagagcaatcccacatgcttttcacaaacattaaaaaaaaaaacctttcagggtctttcatgaagttccaatagttgagtgagttaaaaggtttgtttcccagatttgtaatggtcctgctctagccatttgcagttttgttttagatgattggaaagtatatcaccaaaaaaagtatatagtgacatttttagtatgaaaccaaattacactaaggtcttttgttggccatattactgccacacatgagaagcaccatttatgcagattttcttcagaatatttttaaaaggtacagaatccttaaaatattaacaactaattgcatccatcatctcctttggctgctgtaacaaattaccaccaataatatgatggcttaacacaacagaaacttatttgcttacatttttgaagggcagcaaagccatgctccctccagaggctctagaggagaatctttccttgccacgtccaccttttggtggctattggcattttttggcttatggccacatttctctttctgctgtgtcttcacatcaccctcctctgtatacctaatctgcctctgcctctgtttaataaggatccttatgatgacttttagggactacccagattactccaggataatctcctcacctcatgagtcttaacttaattacatctgcaaggcccccttctccaaataagataaattcatggttttggggattaggatgtggctatgtcttttaggaagccactcttagcccaccagagtctgccctttggcccaaaatttatgtctgtctcatgtgtaaaagacattcatcccatcctaacattaccaaaagtctcaacccattatatcaatcctaagtccaaaatttcattcaaatatcatcggttcaaaagttccaaagcttatcatttagatcatctaaatcaggtatgagtgaaactctgggtatggtctttcctgaggccaaattcctcttcctctgagaaccagtgaaacagaaaagttaatctgctttcaaattacaatggtgggaacaggcataggataacagttacagacatttctgtctcaaaaaggagagaatggaaattggaatggagtctcctgtcccaatcattttcaaaatctagccaggcaaatttctgttatatttcaaggcctggcagtaatcctctttctcagggctccaccctttgggcctgtagctcttctttcttggactatggattgggcctctgcctctgtgcctatgggttgcacttcttcctctgttcccacacttgggcctctgcctctgtacctgcagctctgctctcgggatggtgcttcctttatcttgaagggtggcacatgtttgcagctgagaagttttatcaacgggtttcctacctgtagaattctggcagtctcacaatcttctttcatttttttctgtctctgtcccttttaggcccagttggaagtgtttctgatggtagaacattctcaaaaatcttgtgggtcttctacgtatgtcacattgattcacacattcagaaaagagggtcctcacagatttttcctgaacaaccccatctctattcttggcttctgttgaaacagtcaaataaatccacaagttaatgcctaacctcttcagcactagccaaaggttgtcaagacacacccttgggcttatctacagagcacacttttctaacagtgaatctcctaattttagcatctttttttttttttacaatcattcagattgtgaattcaggctcagaatttacccagtcatcagatactgattccttttgtccacttatatagttattttctctttaaaaaaaaattttttttaatgtattagagatgaggtctcactctgtcacccaggctgcagtgtagtggtgcaaacatagctccctgtaacctcaaactcccaggctcaagggatcctcctgcatcagccttccaagtagctgggtctacaggtgcatgccaccatgcctggctaattttttgcatttttttgtagagacttgatcttgctatgttgtccaggctgctctcgaactcctagcctcaagcaatccacccatcttggcctcctaaagtgccggattacaggtgtaagccaccatgcccagcctgttttgtcaatgtatctgttttctgtcttattttactataagcactaagaagaaactaagctatatctctaacactagacttgaaaatttcctcagctaaacatccaagttcatcatttattcaacttttcacactactgtagtagacaatttagatagataaactttttgccactatatgacaaggattccctttcttccattttccaataaaatcttcatttccttctaaaccatcactagaaatgcctttaacattcatactactaccatctggtaaaggcaatctagttttttctatcacagccaccaaaattcttctagtctctacccattatccaattccaaagcctttttcacattttaagacatttgttacagaagtacccaatccgtcccagttccacaatctgcattagattcccatggctgctgtaacaaattaccctctagcccagtggcttaaaacaatagaaatttattatcttgttgttttggaggccaaaagtccaaaattgaggggttggcagggctgaacgtcttctggagactctaagggaaacactcttcccgtgtcttccagtttcttgtggctgccatcattccttggtttgtgactgcatctccctctcctctgtcttcacatcacttcccctctgtatatataatctacctctgcctctctcttataaggacacttgtgacgggacttagggcccatccagattacccatgataattcccttattccaagattcttaattatatctgaaaggaccttttttccaaataaggtactatcacaggttccagggagtaggatattgaatatcttttttggggagggggcaccatgcagctcactacactattcattgcacacaaatgaatttttcactttttaagatgcattcttggtgctcaaaccagatcgaagtttgtctctaaaagctattgtctgcacaggctgctgcatgctctgttgttaaatggatggacaggctattctaaattttggttgatacttttgctactatgggcaattaacttgaaaaaaataatcgatcccaactctgtgctctgatgtacctcttctgccccttttatgacacctttgaccaaatgccttctatggttcacagtgcaggcacaaaactacctctgatacagaagggttctttacaagcttattttacataccgtgaatccctcacctaaagggagaggtgaaagcaaagactgctttgaatgggtattgagggagattgtgtccataccaagccaccctgaagaagtatttcacttgcagtagaactgtggatttgtgctgtcatttcaccttggaataaacacctatctctaagcaggaccaagaatgacttgcaatctatatgtaatggctacttacttattcaataaagttaagatatacgttaaa

SEQ ID NO: 8275 - DNA, 3782 bp, Homo sapiens
  source 1..3782: mol_type = unassigned DNA
ctcggctgcgggagtaggaagcagctttgcgcgcccgggcggccgatgcgggcactttgaagaatcacgtgtgttgaggccctcttaaagagataggcacctacttttccctccaccctaaacaccgccctgagggcggcggcgaccgtggtaattgcaactgctcaggggcagggcttgccccagcgccgagtagtggcaacggcgtggttgcgtcgggggtgcctgggagcctggagtcccgggggcctgaaatcggcagcttcccgggcagacactctctccctcaggaagaggtgccgccgagtcagcgcggggcagtgtgagcgccccgaggtgctttctcagttgaggagaggtggggttacagggcacaggtgacagggccggagaaagatggagcagcccggggcggcggcgtcgggagcgggaggcggcagcgaggaacccggtgggggccggagcaacaagcggagcgcggggaaccgggccgccaatgaagaggaaacgaaaaacaaacccaaattgaacattcaaataaaaactttggcagatgatgtgcgtgaccgaattacaagttttagaaaatctactgtcaaaaaagaaaaacctcttattcaacatcctattgattctcaagtcgcgatgagtgagtttcctgcagctcagccattatatgatgaacgatctttgaatttgtcagaaaaggaagtattggatctctttgaaaaaatgatggaggacatgaaccttaacgaagagaaaaaagctcctttacgaaacaaagactttaccaccaaacgtgagatggttgtccagtatatttctgccactgccaaatctggtgggctgaaaaacagcaaacatgaatgcaccctgtcttcacaagaatatgttcatgaattacgatcgggtatatcagatgagaaacttcttaattgcctagaatccctcagggtttctttaaccagcaatccggtcagctgggttaacaactttggccatgaaggtcttggactcttattggatgagctggaaaagcttctggacaaaaaacagcaagaaaatattgacaagaagaatcagtataaacttattcaatgcctcaaagcatttatgaataataagtttggattacaaaggattctaggagatgaaagaagtcttttactattggcaagagcaattgaccccaaacaacccaacatgatgactgaaatagtaaaaatactttctgctatttgcattgttggagaagagaacattctagataaacttttaggggctataacaacagcagcagaaagaaataacagggaacgattttcaccaattgtggaaggtttagaaaatcaggaagccttgcaattacaggtggcctgcatgcagtttataaatgcccttgtcacttctccttatgagcttgattttcgaatacatttaaggaatgaattcctccgttcaggactaaaaacaatgttaccagatctaaaagaaaaagagaatgatgagcttgatattcagttgaaagtatttgatgaaaacaaagaagatgacctaactgaattatcacaccgtctcaatgacattcgagcagaaatggatgatatgaatgaagtctaccatcttctatataatatgctgaaggacactgctgctgaaaattacttcttatctattctacaacattttttgcttatcagaaatgattattatatcaggccacaatattataaaataattgaggaatgtgtttcacagatagtgctacactgcagtggtatggatccagacttcaaatacaggcaaagattagacatcgatttaactcatctgatagattcttgtgtgaacaaggcgaaagttgaagaaagtgaacaaaaagctgcagagttttcaaagaagttcgatgaagaattcacagctcgacaggaagctcaagcagagcttcaaaaaagagatgagaaaatcaaagaacttgaagcagaaatccagcaacttcgaacccaggcacaagtactctcaagttcatcaggaattccaggtcctcctgcagcacctccattgccaggtgtagggccgcctccaccaccacccgcgccacctctacccggaggagctcctcttcctcctccaccacctcctttacctggaatgatggggataccaccaccacccccaccaccacttttatttgggggacctcctccaccaccaccccttggaggagttcctcctcccccaggaatatcacttaatctaccttatggaatgaagcagaaaaaaatgtataaacctgaagtgtccatgaagagaatcaattggtcaaagattgaacccacagaattatctgagaactgtttctggttaagagtcaaagaagacaagtttgagaatccagatctctttgccaaattggcattgaattttgctactcagataaaagttcaaaagaacgcagaagcattagaagaaaagaagactgggcctacaaagaagaaagtgaaagaactgagaattttggatcccaaaacagctcagaatctgtccatctttctgggatcatatcgcatgccatatgaagacataagaaacgttattctggaggttaatgaagacatgctgagtgaggctttaattcagaaccttgtgaaacatcttcctgagcagaagatactcaacgaattagcagagcttaagaatgaatatgatgacctctgtgagcctgaacaatttggagttgtgatgagctctgtgaaaatgttacagcctcgtctcagtagtatcctgttcaagctcacatttgaagaacacataaacaacatcaaaccaagcatcatagcagtaactcttgcctgtgaagaactgaagaaaagtgaaagctttaacagacttttagagttagttcttcttgttggaaactacatgaactcaggctcaagaaatgcccagtctttgggatttaagatcaacttcctttgtaagatcagagatactaaatcagcggatcaaaaaacaacccttttgcattttattgccgacatttgtgaggaaaaatatcgagatatcctaaaatttcctgaagaactggaacacgtagaaagtgcaagcaaagtttcagctcaaattctcaagagcaaccttgcatcaatggaacaacaaattgttcatctggaacgtgacatcaagaaattcccccaagcagaaaatcaacacgataagtttgtggaaaagatgaccatctttacaaagactgcccgagaacagtatgaaaaactctccaccatgcacaacaacatgatgaagctctatgagaatcttggagaatacttcatttttgactcaaagacagtgagcatagaagagttctttggtgatctcaacaacttccgaactttgtttttggaagcagtgagagaaaacaataagagaagagaaatggaagagaagaccaggagggcaaaacttgcaaaagagaaagctgaacaagaaaagttagaacgccagaagaaaaagaaacaactcattgatataaacaaagagggtgatgagactggtgtgatggataatcttctagaagccctacaatcaggtgcagcattcagagaccgtcgaaagcggattccaaggaatccagtggtaaatcatccctgtgcaacaagggctaatccaagatcagctacataaacggcctgagtgctgttttaaacaggattgggtgatggtacaacatgactttttaagataatcaagtagtaaaagtttctagtggaaacatgata

SEQ ID NO: 8276 - DNA, 3730 bp, Homo sapiens
  source 1..3730: mol_type = unassigned DNA
gggcactttgaagaatcacgtgtgttgaggccctcttaaagagataggcacctacttttccctccaccctaaacaccgccctgagggcggcggcgaccgtggtaattgcaactgctcaggggcagggcttgccccagcgccgagtagtggcaacggcgtggttgcgtcgggggtgcctgggagcctggagtcccgggggcctgaaatcggcagcttcccgggcagacactctctccctcaggaagaggtgccgccgagtcagcgcggggcagtgtgagcgccccgaggtgctttctcagttgaggagaggtggggttacagggcacaggtgacagggccggagaaagatggagcagcccggggcggcggcgtcgggagcgggaggcggcagcgaggaacccggtgggggccggagcaacaagcggagcgcggggaaccgggccgccaatgaagaggaaacgaaaaacaaacccaaattgaacattcaaataaaaactttggcagatgatgtgcgtgaccgaattacaagttttagaaaatctactgtcaaaaaagaaaaacctcttattcaacatcctattgattctcaagtcgcgatgagtgagtttcctgcagctcagccattatatgatgaacgatctttgaatttgtcagaaaaggaagtattggatctctttgaaaaaatgatggaggacatgaaccttaacgaagagaaaaaagctcctttacgaaacaaagactttaccaccaaacgtgagatggttgtccagtatatttctgccactgccaaatctggtgggctgaaaaacagcaaacatgaatgcaccctgtcttcacaagaatatgttcatgaattacgatcgggtatatcagatgagaaacttcttaattgcctagaatccctcagggtttctttaaccagcaatccggtcagctgggttaacaactttggccatgaaggtcttggactcttattggatgagctggaaaagcttctggacaaaaaacagcaagaaaatattgacaagaagaatcagtataaacttattcaatgcctcaaagcatttatgaataataagtttggattacaaaggattctaggagatgaaagaagtcttttactattggcaagagcaattgaccccaaacaacccaacatgatgactgaaatagtaaaaatactttctgctatttgcattgttggagaagagaacattctagataaacttttaggggctataacaacagcagcagaaagaaataacagggaacgattttcaccaattgtggaaggtttagaaaatcaggaagccttgcaattacaggtggcctgcatgcagtttataaatgcccttgtcacttctccttatgagcttgattttcgaatacatttaaggaatgaattcctccgttcaggactaaaaacaatgttaccagatctaaaagaaaaagagaatgatgagcttgatattcagttgaaagtatttgatgaaaacaaagaagatgacctaactgaattatcacaccgtctcaatgacattcgagcagaaatggatgatatgaatgaagtctaccatcttctatataatatgctgaaggacactgctgctgaaaattacttcttatctattctacaacattttttgcttatcagaaatgattattatatcaggccacaatattataaaataattgaggaatgtgtttcacagatagtgctacactgcagtggtatggatccagacttcaaatacaggcaaagattagacatcgatttaactcatctgatagattcttgtgtgaacaaggcgaaagttgaagaaagtgaacaaaaagctgcagagttttcaaagaagttcgatgaagaattcacagctcgacaggaagctcaagcagagcttcaaaaaagagatgagaaaatcaaagaacttgaagcagaaatccagcaacttcgaacccaggcacaagtactctcaagttcatcaggaattccaggtcctcctgcagcacctccattgccaggtgtagggccgcctccaccaccacccgcgccacctctacccggaggagctcctcttcctcctccaccacctcctttacctggaatgatggggataccaccaccacccccaccaccacttttatttgggggacctcctccaccaccaccccttggaggagttcctcctcccccaggaatatcacttaatctaccttatggaatgaagcagaaaaaaatgtataaacctgaagtgtccatgaagagaatcaattggtcaaagattgaacccacagaattatctgagaactgtttctggttaagagtcaaagaagacaagtttgagaatccagatctctttgccaaattggcattgaattttgctactcagataaaagttcaaaagaacgcagaagcattagaagaaaagaagactgggcctacaaagaagaaagtgaaagaactgagaattttggatcccaaaacagctcagaatctgtccatctttctgggatcatatcgcatgccatatgaagacataagaaacgttattctggaggttaatgaagacatgctgagtgaggctttaattcagaaccttgtgaaacatcttcctgagcagaagatactcaacgaattagcagagcttaagaatgaatatgatgacctctgtgagcctgaacaatttggagttgtgatgagctctgtgaaaatgttacagcctcgtctcagtagtatcctgttcaagctcacatttgaagaacacataaacaacatcaaaccaagcatcatagcagtaactcttgcctgtgaagaactgaagaaaagtgaaagctttaacagacttttagagttagttcttcttgttggaaactacatgaactcaggctcaagaaatgcccagtctttgggatttaagatcaacttcctttgtaagatcagagatactaaatcagcggatcaaaaaacaacccttttgcattttattgccgacatttgtgaggaaaaatatcgagatatcctaaaatttcctgaagaactggaacacgtagaaagtgcaagcaaagtttcagctcaaattctcaagagcaaccttgcatcaatggaacaacaaattgttcatctggaacgtgacatcaagaaattcccccaagcagaaaatcaacacgataagtttgtggaaaagatgaccagctttacaaagactgcccgagaacagtatgaaaaactctccaccatgcacaacaacatgatgaagctctatgagaatcttggagaatacttcatttttgactcaaagacagtgagcatagaagagttctttggtgatctcaacaacttccgaactttgtttttggaagcagtgagagaaaacaataagagaagagaaatggaagagaagaccaggagggcaaaacttgcaaaagagaaagctgaacaagaaaagttagaacgccagaagaaaaagaaacaactcattgatataaacaaagagggtgatgagactggtgtgatggataatcttctagaagccctacaatcaggtgcagcattcagagaccgtcgaaagcggattccaaggaatccagtggtaaatcatccctgtgcaacaagggctaatccaagatcagctacataaacggcctgagtgctgttttaaacaggattgggtgatggtacaacatgactttttaagataatcaagtagtaaaagtttctagtggaaacatg

SEQ ID NO: 8277 - DNA, 3690 bp, Homo sapiens
  source 1..3690: mol_type = unassigned DNA
ctcggctgcgggagtaggaagcagctttgcgcgcccgggcggccgatgcgggcactttgaagaatcacgtgtgttgaggccctcttaaagagataggcacctacttttccctccaccctaaacaccgccctgagggcggcggcgaccgtggtaattgcaactgctcaggggcagggcttgccccagcgccgagtagtggcaacggcgtggttgcgtcgggggtgcctgggagcctggagtcccgggggcctgaaatcggcagcttcccgggcagacactctctccctcaggaagaggtgccgccgagtcagcgcggggcagtgtgagcgccccgaggtgctttctcagttgaggagaggtggggttacagggcacaggtgacagggccggagaaagatggagcagcccggggcggcggcgtcgggagcgggaggcggcagcgaggaacccggtgggggccggagcaacaagcggagcgcggggaaccgggccgccaatgaagaggaaacgaaaaacaaacccaaattgcgtgaccgaattacaagttttagaaaatctactgtcaaaaaagaaaaacctcttattcaacatcctattgattctcaagtcgcgatgagtgagtttcctgcagctcagccattatatgatgaacgatctttgaatttgtcagaaaaggaagtattggatctctttgaaaaaatgatggaggacatgaaccttaacgaagagaaaaaagctcctttacgaaacaaagactttaccaccaaacgtgagatggttgtccagtatatttctgccactgccaaatctgtaatatcctcacatattaagggtgggctgaaaaacagcaaacatgaatgcaccctgtcttcacaagaatatgttcatgaattacgatcgggtatatcagatgagaaacttcttaattgcctagaatccctcagggtttctttaaccagcaatccggtcagctgggttaacaactttggccatgaaggtcttggactcttattggatgagctggaaaagcttctggacaaaaaacagcaagaaaatattgacaagaagaatcagtataaacttattcaatgcctcaaagcatttatgaataataagtttggattacaaaggattctaggagatgaaagaagtcttttactattggcaagagcaattgaccccaaacaacccaacatgatgactgaaatagtaaaaatactttctgctatttgcattgttggagaagagaacattctagataaacttttaggggctataacaacagcagcagaaagaaataacagggaacgattttcaccaattgtggaaggtttagaaaatcaggaagccttgcaattacaggtggcctgcatgcagtttataaatgcccttgtcacttctccttatgagcttgattttcgaatacatttaaggaatgaattcctccgttcaggactaaaaacaatgttaccagatctaaaagaaaaagagaatgatgagcttgatattcagttgaaagtatttgatgaaaacaaagaagatgacctaactgaattatcacaccgtctcaatgacattcgagcagaaatggatgatatgaatgaagtctaccatcttctatataatatgctgaaggacactgctgctgaaaattacttcttatctattctacaacattttttgcttatcagaaatgattattatatcaggccacaatattataaaataattgaggaatgtgtttcacagatagtgctacactgcagtggtatggatccagacttcaaatacaggcaaagattagacatcgatttaactcatctgatagattcttgtgtgaacaaggcgaaagttgaagaaagtgaacaaaaagctgcagagttttcaaagaagttcgatgaagaattcacagctcgacaggaagctcaagcagagcttcaaaaaagagatgagaaaatcaaagaacttgaagcagaaatccagcaacttcgaacccaggcacaagtactctcaagttcatcaggaattccaggtcctcctgcagcacctccattgccaggtgtagggccgcctccaccaccacccgcgccacctctacccggaggagctcctcttcctcctccaccacctcctttacctggaatgatggggataccaccaccacccccaccaccacttttatttgggggacctcctccaccaccaccccttggaggagttcctcctcccccaggaatatcacttaatctaccttatggaatgaagcagaaaaaaatgtataaacctgaagtgtccatgaagagaatcaattggtcaaagattgaacccacagaattatctgagaactgtttctggttaagagtcaaagaagacaagtttgagaatccagatctctttgccaaattggcattgaattttgctactcagataaaagttcaaaagaacgcagaagcattagaagaaaagaagactgggcctacaaagaagaaagtgaaagaactgagaattttggatcccaaaacagctcagaatctgtccatctttctgggatcatatcgcatgccatatgaagacataagaaacgttattctggaggttaatgaagacatgctgagtgaggctttaattcagaaccttgtgaaacatcttcctgagcagaagatactcaacgaattagcagagcttaagaatgaatatgatgacctctgtgagcctgaacaatttggagttgtgatgagctctgtgaaaatgttacagcctcgtctcagtagtatcctgttcaagctcacatttgaagaacacataaacaacatcaaaccaagcatcatagcagtaactcttgcctgtgaagaactgaagaaaagtgaaagctttaacagacttttagagttagttcttcttgttggaaactacatgaactcaggctcaagaaatgcccagtctttgggatttaagatcaacttcctttgtaagatcagagatactaaatcagcggatcaaaaaacaacccttttgcattttattgccgacatttgtgaggaaaaatatcgagatatcctaaaatttcctgaagaactggaacacgtagaaagtgcaagcaaagtttcagctcaaattctcaagagcaaccttgcatcaatggaacaacaaattgttcatctggaacgtgacatcaagaaattcccccaagcagaaaatcaacacgataagtttgtggaaaagatgaccatctttacaaagactgcccgagaacagtatgaaaaactctccaccatgcacaacaacatgatgaagctctatgagaatcttggagaatacttcatttttgactcaaagacagtgagcatagaagagttctttggtgatctcaacaacttccgaactttgtttttggaagcagtgagagaaaacaataagagaagagaaatggaagagaagaccaggagggcaaaacttgcaaaagagaaagctgaacaagaaaagttagaacgccagaagaaaaagaaacaactcattgatataaacaaagagggtgatgagactggtgtgatggataatcttctagaagccctacaatcaggtgcagcattcagagaccgtcgaaagcggattccaaggaatccagataacagacgagtacctttggaaaggtcacgctctcgccacaatggagctatctcatctaagtga

SEQ ID NO: 8278 - DNA, 4983 bp, Homo sapiens
  source 1..4983: mol_type = unassigned DNA
ctcggctgcgggagtaggaagcagctttgcgcgcccgggcggccgatgcgggcactttgaagaatcacgtgtgttgaggccctcttaaagagataggcacctacttttccctccaccctaaacaccgccctgagggcggcggcgaccgtggtaattgcaactgctcaggggcagggcttgccccagcgccgagtagtggcaacggcgtggttgcgtcgggggtgcctgggagcctggagtcccgggggcctgaaatcggcagcttcccgggcagacactctctccctcaggaagaggtgccgccgagtcagcgcggggcagtgtgagcgccccgaggtgctttctcagttgaggagaggtggggttacagggcacaggtgacagggccggagaaagatggagcagcccggggcggcggcgtcgggagcgggaggcggcagcgaggaacccggtgggggccggagcaacaagcggagcgcggggaaccgggccgccaatgaagaggaaacgaaaaacaaacccaaattgaacattcaaataaaaactttggcagatgatgtgcgtgaccgaattacaagttttagaaaatctactgtcaaaaaagaaaaacctcttattcaacatcctattgattctcaagtcgcgatgagtgagtttcctgcagctcagccattatatgatgaacgatctttgaatttgtcagaaaaggaagtattggatctctttgaaaaaatgatggaggacatgaaccttaacgaagagaaaaaagctcctttacgaaacaaagactttaccaccaaacgtgagatggttgtccagtatatttctgccactgccaaatctggtgggctgaaaaacagcaaacatgaatgcaccctgtcttcacaagaatatgttcatgaattacgatcgggtatatcagatgagaaacttcttaattgcctagaatccctcagggtttctttaaccagcaatccggtcagctgggttaacaactttggccatgaaggtcttggactcttattggatgagctggaaaagcttctggacaaaaaacagcaagaaaatattgacaagaagaatcagtataaacttattcaatgcctcaaagcatttatgaataataagtttggattacaaaggattctaggagatgaaagaagtcttttactattggcaagagcaattgaccccaaacaacccaacatgatgactgaaatagtaaaaatactttctgctatttgcattgttggagaagagaacattctagataaacttttaggggctataacaacagcagcagaaagaaataacagggaacgattttcaccaattgtggaaggtttagaaaatcaggaagccttgcaattacaggtggcctgcatgcagtttataaatgcccttgtcacttctccttatgagcttgattttcgaatacatttaaggaatgaattcctccgttcaggactaaaaacaatgttaccagatctaaaagaaaaagagaatgatgagcttgatattcagttgaaagtatttgatgaaaacaaagaagatgacctaactgaattatcacaccgtctcaatgacattcgagcagaaatggatgatatgaatgaagtctaccatcttctatataatatgctgaaggacactgctgctgaaaattacttcttatctattctacaacattttttgcttatcagaaatgattattatatcaggccacaatattataaaataattgaggaatgtgtttcacagatagtgctacactgcagtggtatggatccagacttcaaatacaggcaaagattagacatcgatttaactcatctgatagattcttgtgtgaacaaggcgaaagttgaagaaagtgaacaaaaagctgcagagttttcaaagaagttcgatgaagaattcacagctcgacaggaagctcaagcagagcttcaaaaaagagatgagaaaatcaaagaacttgaagcagaaatccagcaacttcgaacccaggcacaagtactctcaagttcatcaggaattccaggtcctcctgcagcacctccattgccaggtgtagggccgcctccaccaccacccgcgccacctctacccggaggagctcctcttcctcctccaccacctcctttacctggaatgatggggataccaccaccacccccaccaccacttttatttgggggacctcctccaccaccaccccttggaggagttcctcctcccccaggaatatcacttaatctaccttatggaatgaagcagaaaaaaatgtataaacctgaagtgtccatgaagagaatcaattggtcaaagattgaacccacagaattatctgagaactgtttctggttaagagtcaaagaagacaagtttgagaatccagatctctttgccaaattggcattgaattttgctactcagataaaagttcaaaagaacgcagaagcattagaagaaaagaagactgggcctacaaagaagaaagtgaaagaactgagaattttggatcccaaaacagctcagaatctgtccatctttctgggatcatatcgcatgccatatgaagacataagaaacgttattctggaggttaatgaagacatgctgagtgaggctttaattcagaaccttgtgaaacatcttcctgagcagaagatactcaacgaattagcagagcttaagaatgaatatgatgacctctgtgagcctgaacaatttggagttgtgatgagctctgtgaaaatgttacagcctcgtctcagtagtatcctgttcaagctcacatttgaagaacacataaacaacatcaaaccaagcatcatagcagtaactcttgcctgtgaagaactgaagaaaagtgaaagctttaacagacttttagagttagttcttcttgttggaaactacatgaactcaggctcaagaaatgcccagtctttgggatttaagatcaacttcctttgtaagatcagagatactaaatcagcggatcaaaaaacaacccttttgcattttattgccgacatttgtgaggaaaaatatcgagatatcctaaaatttcctgaagaactggaacacgtagaaagtgcaagcaaagtttcagctcaaattctcaagagcaaccttgcatcaatggaacaacaaattgttcatctggaacgtgacatcaagaaattcccccaagcagaaaatcaacacgataagtttgtggaaaagatgaccatctttacaaagactgcccgagaacagtatgaaaaactctccaccatgcacaacaacatgatgaagctctatgagaatcttggagaatacttcatttttgactcaaagacagtgagcatagaagagttctttggtgatctcaacaacttccgaactttgtttttggaagcagtgagagaaaacaataagagaagagaaatggaagagaagaccaggagggcaaaacttgcaaaagagaaagctgaacaagaaaagttagaacgccagaagaaaaagaaacaactcattgatataaacaaagagggtgatgagactggtgtgatggataatcttctagaagccctacaatcaggtgcagcattcagagaccgtcgaaagcggattccaaggaatccagataacagacgagtacctttggaaaggtcacgctctcgccacaatggagctatctcatctaagtgattcctgatgccaaagaatatgaaaatatttaagtaaaaacaaaatgatgcattttgagaagaacaaagtgtgcactcagcggctggaaaggaaataagtgcatttctgcaaagatcaagataagctggatgaagtagtgtgcatttgtaatactattgcaagactcctcccacaattattctaatctgaacacagttatcaggattacaaaatgtgttccattttagtgtaaagatgtgtatcatttgtaattgtgtgtgacctgactgtgatgatggaagtgtaagaaattgaagagttctaaggctttcaaaaacactcagtcaaaaatttaaaatcttaaatgtgtaagtcacccccaccaaaaacaaaagagaagaaaaagaatagaaagaattatccagtgtcagcttccaatccctagtacatatataatagaaaagggccaagaaaaatatgcatcttgatttggagagaggctaatattatgcacactgtaagagaagccattttggaaattcacgaaagtactgctccaccccagttgagttatttagaattttatctcaagtgaaagctgatggattcatctgctttggctgaaattaaacttatcattagtctagctagcatttcagcatgatattgcaagcacttctcattgctaaaaataaataaaccaaagtttaaccgaatcagttagggaaagtgatttaaactttatttaaagaggtattttctaattatgcacagatatctactttatacaaatactttatatggctatttttgagaaaaccctcacattttaatgtttatgctagggatgaacctgaaaattctattacgtttatttagatttcaaaggcaaatattgattcctatgctctgtggtttatttcttttttctattgcttctttctcccttgagtcccttgaaggcagggaatagacttctagaaaacctgagaggaaaaagaattctttttacaggaggcagcagaaaactgtctgaaaggtcaattgttttatctccctttccactctctttccaatttcactttggtggtctgaagaagaaaaagaaattttatgtatgtatgtgtaaatatgtgtatatatttctatctcttgctacaataattccaactaagtgaacttctcaattatcatcatacttacttaccttatattaacaaattaagatgatgctgccaaaacaagtctagcagggaaaacaggttctacatttttcttaaataaattagggagtaaaagtta

SEQ ID NO: 8279 - DNA, 3376 bp, Homo sapiens
  source 1..3376: mol_type = unassigned DNA
agaggtggggttacagggcacaggtgacagggccggagaaagatggagcagcccggggcggcggcgtcgggagcgggaggcggcagcgaggaacccggtgggggccggagcaacaagcggagcgcggggaaccgggccgccaatgaagaggaaacgaaaaacaaacccaaattgaacattcaaataaaaactttggcagatgatgtgcgtgaccgaattacaagttttagaaaatctactgtcaaaaaagaaaaacctcttattcaacatcctattgattctcaagtcgcgatgagtgagtttcctgcagctcagccattatatgatgaacgatctttgaatttgtcagaaaaggaagtattggatctctttgaaaaaatgatggaggacatgaaccttaacgaagagaaaaaagctcctttacgaaacaaagactttaccaccaaacgtgagatggttgtccagtatatttctgccactgccaaatctatagttggaagtaaagttacgggtgggctgaaaaacagcaaacatgaatgcaccctgtcttcacaagaatatgttcatgaattacgatcgggtatatcagatgagaaacttcttaattgcctagaatccctcagggtttctttaaccagcaatccggtcagctgggttaacaactttggccatgaaggtcttggactcttattggatgagctggaaaagcttctggacaaaaaacagcaagaaaatattgacaagaagaatcagtataaacttattcaatgcctcaaagcatttatgaataataagtttggattacaaaggattctaggagatgaaagaagtcttttactattggcaagagcaattgaccccaaacaacccaacatgatgactgaaatagtaaaaatactttctgctatttgcattgttggagaagagaacattctagataaacttttaggggctataacaacagcagcagaaagaaataacagggaacgattttcaccaattgtggaaggtttagaaaatcaggaagccttgcaattacaggtggcctgcatgcagtttataaatgcccttgtcacttctccttatgagcttgattttcgaatacatttaaggaatgaattcctccgttcaggactaaaaacaatgttaccagatctaaaagaaaaagagaatgatgagcttgatattcagttgaaagtatttgatgaaaacaaagaagatgacctaactgaattatcacaccgtctcaatgacattcgagcagaaatggatgatatgaatgaagtctaccatcttctatataatatgctgaaggacactgctgctgaaaattacttcttatctattctacaacattttttgcttatcagaaatgattattatatcaggccacaatattataaaataattgaggaatgtgtttcacagatagtgctacactgcagtggtatggatccagacttcaaatacaggcaaagattagacatcgatttaactcatctgatagattcttgtgtgaacaaggcgaaagttgaagaaagtgaacaaaaagctgcagagttttcaaagaagttcgatgaagaattcacagctcgacaggaagctcaagcagagcttcaaaaaagagatgagaaaatcaaagaacttgaagcagaaatccagcaacttcgaacccaggcacaagtactctcaagttcatcaggaattccaggtcctcctgcagcacctccattgccaggtgtagggccgcctccaccaccacccgcgccacctctacccggaggagctcctcttcctcctccaccacctcctttacctggaatgatggggataccaccaccacccccaccaccacttttatttgggggacctcctccaccaccaccccttggaggagttcctcctcccccaggaatatcacttaatctaccttatggaatgaagcagaaaaaaatgtataaacctgaagtgtccatgaagagaatcaattggtcaaagattgaacccacagaattatctgagaactgtttctggttaagagtcaaagaagacaagtttgagaatccagatctctttgccaaattggcattgaattttgctactcagataaaagttcaaaagaacgcagaagcattagaagaaaagaagactgggcctacaaagaagaaagtgaaagaactgagaattttggatcccaaaacagctcagaatctgtccatctttctgggatcatatcgcatgccatatgaagacataagaaacgttattctggaggttaatgaagacatgctgagtgaggctttaattcagaaccttgtgaaacatcttcctgagcagaagatactcaacgaattagcagagcttaagaatgaatatgatgacctctgtgagcctgaacaatttggagttgtgatgagctctgtgaaaatgttacagcctcgtctcagtagtatcctgttcaagctcacatttgaagaacacataaacaacatcaaaccaagcatcatagcagtaactcttgcctgtgaagaactgaagaaaagtgaaagctttaacagacttttagagttagttcttcttgttggaaactacatgaactcaggctcaagaaatgcccagtctttgggatttaagatcaacttcctttgtaagatcagagatactaaatcagcggatcaaaaaacaacccttttgcattttattgccgacatttgtgaggaaaaatatcgagatatcctaaaatttcctgaagaactggaacacgtagaaagtgcaagcaaagtttcagctcaaattctcaagagcaaccttgcatcaatggaacaacaaattgttcatctggaacgtgacatcaagaaattcccccaagcagaaaatcaacacgataagtttgtggaaaagatgaccatctttacaaagactgcccgagaacagtatgaaaaactctccaccatgcacaacaacatgatgaagctctatgagaatcttggagaatacttcatttttgactcaaagacagtgagcatagaagagttctttggtgatctcaacaacttccgaactttgtttttggaagcagtgagagaaaacaataagagaagagaaatggaagagaagaccaggagggcaaaacttgcaaaagagaaagctgaacaagaaaagttagaacgccagaagaaaaagaaacaactcattgatataaacaaagagggtgatgagactggtgtgatggataatcttctagaagccctacaatcaggtgcagcattcagagaccgtcgaaagcggattccaaggaatccagtggtaaatcatccctgtgcaacaagggctaatccaagatcagctacataaacggcctgagtgctgttttaaa

SEQ ID NO: 8280 - DNA, 829 bp, Homo sapiens
  source 1..829: mol_type = unassigned DNA
ggagactgcgccgacatggagctgttcctcgcgggccgccgggtgctggtcaccggggcaggcaaaggtatagggcgcggcacggtccaggcgctgcacgcgacgggcgcgcgggtggtggctgtgagccggactcaggcggatcttgacagccttgtccgcgagtgcccggggatagaacccgtgtgcgtggacctgggtgactgggaggccaccgagcgggcgctgggcagcgtgggccccgtggacctgctggtgaacaacgccgctgtcgccctgctgcagcccttcctggaggtcaccaaggaggcctttgacagatcctttgaggtgaacctgcgtgcggtcatccaggtgtcgcagattgtggccaggggcttaatagcccggggagtcccaggggccatcgtgaatgtctccagccagtgctcccagcgggcagtaactaaccatagcgtctactgctccaccaagggtgccctggacatgctgaccaaggtgatggccctagagctcgggccccacaagatccgagtgaatgcagtaaaccccacagtggtgatgacgtccatgggccaggccacctggagtgacccccacaaggccaagactatgctgaaccgaatcccacttggcaagtttgctgaggtagagcacgtggtgaacgccatcctctttctgctgagtgaccgaagtggcatgaccacgggttccactttgccggtggaagggggcttctgggcctgctgagctccctccacacacctcaagccccatgccgtgctcatcctacccccaatccctccaataaacctgattctgctgccca

SEQ ID NO: 8281 - DNA, 10277 bp, Homo sapiens
  source 1..10277: mol_type = unassigned DNA
cggaggcgcggcgcaggctgctgcaggcccaggtgaatggagtaacctgacagcggggacgaggcgacggcgagcgcgaggaaatggcggcgggggcggcggcgccgggcggctccgggaggcctgggctgtgacgcgcgcgccggagcggggtccgatggttctcgaaggcccgcggcgccccgtgctgcagtaagctgtgctagaacaaaaatgcaatgaaagaaacactggatgaatgaaaagccctgctttgcaacccctcagcatggcaggcctgcagctcatgacccctgcttcctcaccaatgggtcctttctttggactgccatggcaacaagaagcaattcatgataacatttatacgccaagaaaatatcaggttgaactgcttgaagcagctctggatcataataccatcgtctgtttaaacactggctcagggaagacatttattgcagtactactcactaaagagctgtcctatcagatcaggggagacttcagcagaaatggaaaaaggacggtgttcttggtcaactctgcaaaccaggttgctcaacaagtgtcagctgtcagaactcattcagatctcaaggttggggaatactcaaacctagaagtaaatgcatcttggacaaaagagagatggaaccaagagtttactaagcaccaggttctcattatgacttgctatgtcgccttgaatgttttgaaaaatggttacttatcactgtcagacattaaccttttggtgtttgatgagtgtcatcttgcaatcctagaccacccctatcgagaaattatgaagctctgtgaaaattgtccatcatgtcctcgcattttgggactaactgcttccattttaaatgggaaatgtgatccagaggaattggaagaaaagattcagaaactagagaaaattcttaagagtaatgctgaaactgcaactgacctggtggtcttagacaggtatacttctcagccatgtgagattgtggtggattgtggaccatttactgacagaagtgggctttatgaaagactgctgatggaattagaagaagcacttaattttatcaatgattgtaatatatctgtacattcaaaagaaagagattctactttaatttcgaaacagatactatcagactgtcgtgccgtattggtagttctgggaccctggtgtgcagataaagtagctggaatgatggtaagagaactacagaaatacatcaaacatgagcaagaggagctgcacaggaaatttttattgtttacagacactttcctaaggaaaatacatgcactatgtgaagagcacttctcacctgcctcacttgacctgaaatttgtaactcctaaagtaatcaaactgctcgaaatcttacgcaaatataaaccatatgagcgacagcagtttgaaagcgttgagtggtataataatagaaatcaggataattatgtgtcatggagtgattctgaggatgatgatgaggatgaagaaattgaagaaaaagagaagccagagacaaattttccttctccttttaccaacattttgtgcggaattatttttgtggaaagaagatacacagcagttgtcttaaacagattgataaaggaagctggcaaacaagatccagagctggcttatatcagtagcaatttcataactggacatggcattgggaagaatcagcctcgcaacaaacagatggaagcagaattcagaaaacaggaagaggtacttaggaaatttcgagcacatgagaccaacctgcttattgcaacaagtattgtagaagagggtgttgatataccaaaatgcaacttggtggttcgttttgatttgcccacagaatatcgatcctatgttcaatctaaaggaagagcaagggcacccatctctaattatataatgttagcggatacagacaaaataaaaagttttgaagaagaccttaaaacctacaaagctattgaaaagatcttgagaaacaagtgttccaagtcggttgatactggtgagactgacattgatcctgtcatggatgatgatgacgttttcccaccatatgtgttgaggcctgacgatggtggtccacgagtcacaatcaacacggccattggacacatcaatagatactgtgctagattaccaagtgatccgtttactcatctagctcctaaatgcagaacccgagagttgcctgatggtacattttattcaactctttatctgccaattaactcacctcttcgagcctccattgttggtccaccaatgagctgtgtacgattggctgaaagagttgtagctctcatttgctgtgagaaactgcacaaaattggcgaactggatgaccatttgatgccagttgggaaagagactgttaaatatgaagaggagcttgatttgcatgatgaagaagagaccagtgttccaggaagaccaggttccacgaaacgaaggcagtgctacccaaaagcaattccagagtgtttgagggatagttatcccagacctgatcagccctgttacctgtatgtgataggaatggttttaactacacctttacctgatgaactcaactttagaaggcggaagctctatcctcctgaagataccacaagatgctttggaatactgacggccaaacccatacctcagattccacactttcctgtgtacacacgctctggagaggttaccatatccattgagttgaagaagtctggtttcatgttgtctctacaaatgcttgagttgattacaagacttcaccagtatatattctcacatattcttcggcttgaaaaacctgcactagaatttaaacctacagacgctgattcagcatactgtgttctacctcttaatgttgttaatgactccagcactttggatattgactttaaattcatggaagatattgagaagtctgaagctcgcataggcattcccagtacaaagtatacaaaagaaacaccctttgtttttaaattagaagattaccaagatgccgttatcattccaagatatcgcaattttgatcagcctcatcgattttatgtagctgatgtgtacactgatcttaccccactcagtaaatttccttcccctgagtatgaaacttttgcagaatattataaaacaaagtacaaccttgacctaaccaatctcaaccagccactgctggatgtggaccacacatcttcaagacttaatcttttgacacctcgacatttgaatcagaaggggaaagcgcttcctttaagcagtgctgagaagaggaaagccaaatgggaaagtctgcagaataaacagatactggttccagaactctgtgctatacatccaattccagcatcactgtggagaaaagctgtttgtctccccagcatactttatcgccttcactgccttttgactgcagaggagctaagagcccagactgccagcgatgctggcgtgggagtcagatcacttcctgcggattttagataccctaacttagacttcgggtggaaaaaatctattgacagcaaatctttcatctcaatttctaactcctcttcagctgaaaatgataattactgtaagcacagcacaattgtccctgaaaatgctgcacatcaaggtgctaatagaacctcctctctagaaaatcatgaccaaatgtctgtgaactgcagaacgttgctcagcgagtcccctggtaagctccacgttgaagtttcagcagatcttacagcaattaatggtctttcttacaatcaaaatctcgccaatggcagttatgatttagctaacagagacttttgccaaggaaatcagctaaattactacaagcaggaaatacccgtgcaaccaactacctcatattccattcagaatttatacagttacgagaaccagccccagcccagcgatgaatgtactctcctgagtaataaataccttgatggaaatgctaacaaatctacctcagatggaagtcctgtgatggccgtaatgcctggtacgacagacactattcaagtgctcaagggcaggatggattctgagcagagcccttctattgggtactcctcaaggactcttggccccaatcctggacttattcttcaggctttgactctgtcaaacgctagtgatggatttaacctggagcggcttgaaatgcttggcgactcctttttaaagcatgccatcaccacatatctattttgcacttaccctgatgcgcatgagggccgcctttcatatatgagaagcaaaaaggtcagcaactgtaatctgtatcgccttggaaaaaagaagggactacccagccgcatggtggtgtcaatatttgatccccctgtgaattggcttcctcctggttatgtagtaaatcaagacaaaagcaacacagataaatgggaaaaagatgaaatgacaaaagactgcatgctggcgaatggcaaactggatgaggattacgaggaggaggatgaggaggaggagagcctgatgtggagggctccgaaggaagaggctgactatgaagatgatttcctggagtatgatcaggaacatatcagatttatagataatatgttaatggggtcaggagcttttgtaaagaaaatctctctttctcctttttcaaccactgattctgcatatgaatggaaaatgcccaaaaaatcctccttaggtagtatgccattttcatcagattttgaggattttgactacagctcttgggatgcaatgtgctatctggatcctagcaaagctgttgaagaagatgactttgtggtggggttctggaatccatcagaagaaaactgtggtgttgacacgggaaagcagtccatttcttacgacttgcacactgagcagtgtattgctgacaaaagcatagcggactgtgtggaagccctgctgggctgctatttaaccagctgtggggagagggctgctcagcttttcctctgttcactggggctgaaggtgctcccggtaattaaaaggactgatcgggaaaaggccctgtgccctactcgggagaatttcaacagccaacaaaagaacctttcagtgagctgtgctgctgcttctgtggccagttcacgctcttctgtattgaaagactcggaatatggttgtttgaagattccaccaagatgtatgtttgatcatccagatgcagataaaacactgaatcaccttatatcggggtttgaaaattttgaaaagaaaatcaactacagattcaagaataaggcttaccttctccaggcttttacacatgcctcctaccactacaatactatcactgattgttaccagcgcttagaattcctgggagatgcgattttggactacctcataaccaagcacctttatgaagacccgcggcagcactccccgggggtcctgacagacctgcggtctgccctggtcaacaacaccatctttgcatcgctggctgtaaagtacgactaccacaagtacttcaaagctgtctctcctgagctcttccatgtcattgatgactttgtgcagtttcagcttgagaagaatgaaatgcaaggaatggattctgagcttaggagatctgaggaggatgaagagaaagaagaggatattgaagttccaaaggccatgggggatatttttgagtcgcttgctggtgccatttacatggatagtgggatgtcactggagacagtctggcaggtgtactatcccatgatgcggccactaatagaaaagttttctgcaaatgtaccccgttcccctgtgcgagaattgcttgaaatggaaccagaaactgccaaatttagcccggctgagagaacttacgacgggaaggtcagagtcactgtggaagtagtaggaaaggggaaatttaaaggtgttggtcgaagttacaggattgccaaatctgcagcagcaagaagagccctccgaagcctcaaagctaatcaacctcaggttcccaatagctgaaaccgctttttaaaattcaaaacaagaaacaaaacaaaaaaaattaaggggaaaattatttaaatcggaaaggaagacttaaagttgttagtgagtggaatgaattgaaggcagaatttaaagtttggttgataacaggatagataacagaataaaacatttaacatatgtataaaattttggaactaattgtagttttagttttttgcgcaaacacaatcttatcttctttcctcacttctgctttgtttaaatcacaagagtgctttaatgatgacatttagcaagtgctcaaaataattgacaggttttgtttttttttttttgagtttatgtcagctttgcttagtgttagaaggccatggagcttaaacctccagcagtccctaggatgatgtagattcttctccatctctccgtgtgtgcagtagtgccagtcctgcagtagttgataagctgaatagaaagataaggttttcgagaggagaagtgcgccaatgttgtcttttctttccacgttatactgtgtaaggtgatgttcccggtcgctgttgcacctgatagtaagggacagatttttaatgaacattggctggcatgttggtgaatcacattttagttttctgatgccacatagtcttgcataaaaaagggttcttgccttaaaagtgaaaccttcatggatagtctttaatctctgatctttttggaacaaactgttttacattcctttcattttattatgcattagacgttgagacagcgtgatacttacaactcactagtatagttgtaacttattacaggatcatactaaaatttctgtcatatgtatactgaagacattttaaaaaccagaatatgtagtctacggatattttttatcataaaaatgatctttggctaaacaccccattttactaaagtcctcctgccaggtagttcccactgatggaaatgtttatggcaaataattttgccttctaggctgttgctctaacaaaataaaccttagacatatcacacctaaaatatgctgcagattttataattgattggttacttatttaagaagcaaaacacagcacctttacccttagtctcctcacataaatttcttactatacttttcataatgttgcatgcatatttcacctaccaaagctgtgctgttaatgccgtgaaagtttaacgtttgcgataaactgccgtaattttgatacatctgtgatttaggtcattaatttagataaactagctcattatttccatctttggaaaaggaaaaaaaaaaaaacttctttaggcatttgcctaagtttctttaattagacttgtaggcactcttcacttaaatacctcagttcttcttttcttttgcatgcatttttcccctgtttggtgctatgtttatgtattatgcttgaaattttaatttttttttttttgcactgtaactataatacctcttaatttacctttttaaaagctgtgggtcagtcttgcactcccatcaacataccagtagaggtttgctgcaatttgccccgttaattatgcttgaagtttaagaaagctgagcagaggtgtctcatatttcccagcacatgattctgaacttgatgcttcgtggaatgctgcatttatatgtaagtgacatttgaatactgtccttcctgctttatctgcatcatccacccacagagaaatgcctctgtgcgagtgcaccgacagaaaactgtcagctctgctttctaaggaaccctgagtgaggggggtattaagcttctccagtgttttttgttgtctccaatcttaaacttaaattgagatctaaattattaaacgagtttttgagcaaattaggtgacttgttttaaaaatatttaattccgatttggaaccttagatgtctatttgattttttaaaaaaccttaatgtaagatatgaccagttaaaacaaagcaattcttgaattatataactgtaaaagtgtgcagttaacaaggctggatgtgaattttattctgagggtgatttgtgatcaagtttaatcacaaatctcttaatatttataaactacctgatgccaggagcttagggctttgcattgtgtctaatacattgatcccagtgttacgggattctcttgattcctggcaccaaaatcagattgttttcacagttatgattcccagtgggagaaaaatgcctcaatatatttgtaaccttaagaagagtatttttttgttaatactaagatgttcaaacttagacatgattaggtcatacattctcaggggttcaaatttccttctaccattcaaatgttttatcaacagcaaacttcagccgtttcactttttgttggagaaaaatagtagattttaatttgactcacagtttgaagcattctgtgatcccctggttactgagttaaaaaataaaaaagtacgagttagacatatgaaatggttatgaacgcttttgtgctgctgatttttaatgctgtaaagttttcctgtgtttagcttgttgaaatgttttgcatctgtcaattaaggaaaaaaaaaatcactctatgttgccccactttagagccctgtgtgccaccctgtgttcctgtgattgcaatgtgagaccgaatgtaatatggaaaacctaccagtggggtgtggttgtgccctgagcacgtgtgtaaaggactggggaggcgtgtcttgaaaaagcaactgcagaaattccttatgatgattgtgtgcaagttagttaacatgaaccttcatttgtaaattttttaaaatttcttttataatatgctttccgcagtcctaactatgctgcgttttataatagctttttcccttctgttctgttcatgtagcacagataagcattgcacttggtaccatgctttacctcatttcaagaaaatatgcttaacagagaggaaaaaaatgtggtttggccttgctgctgttttgatttatggaatttgaaaaagataattataatgcctgcaatgtgtcatatactcgcacaacttaaataggtcatttttgtctgtggcatttttactgtttgtgaaagtatgaaacagatttgttaactgaactcttaattatgtttttaaaatgtttgttatatttcttttcttttttcttttatattacgtgaagtgatgaaatttagaatgacctctaacactcctgtaattgtcttttaaaatactgatatttttatttgttaataatactttgccctcagaaagattctgataccctgccttgacaacatgaaacttgaggctgctttggttcatgaatccaggtgttcccccggcagtcggcttcttcagtcgctccctggaggcaggtgggcactgcagaggatcactggaatccagatcgagcgcagttcatgcacaaggccccgttgatttaaaatattggatcttgctctgttagggtgtctaatccctttacacaagattgaagccaccaaactgagaccttgatacctttttttaactgcatctgaaattatgttaagagtctttaacccatttgcattatctgcagaagagaaactcatgtcatgtttattacctatatggttgttttaattacatttgaataattatatttttccaaccactgattacttttcaggaatttaattatttccagataaatttctttattttatattgtacatgaaaagttttaaagatatgtttaagaccaagactattaaaatgatttttaaagttgttggagacgccaatagcaatatctaggaaatttgcattgagaccattgtattttccactagcagtgaaaatgatttttcacaactaacttgtaaatatattttaatcattacttctttttttctagtccatttttatttggacatcaaccacagacaatttaaattttatagatgcactaagaattcactgcagcagcaggttacatagcaaaaatgcaaaggtgaacaggaagtaaatttctggcttttctgctgtaaatagtgaaggaaaattactaaaatcaagtaaaactaatgcatattatttgattgacaataaaatatttaccatcacatgctgcagctgttttttaaggaacatgatgtcattcattcatacagtaatcatgctgcagaaatttgcagtctgcaccttatggatcacaattacctttagttgttttttttgtaataattgtagccaagtaaatctccaataaagttatcgtctgttca

SEQ ID NO: 8282 - DNA, 10220 bp, Homo sapiens
  source 1..10220: mol_type = unassigned DNA
ggaaactctgaaagaacttagaatcagcattttgagagcagaagcttgggcatgctgtgattttccaataaactgctatcacaatgtcaaaatgcagttcagacaagagcaacacagagatctcaaacattaaaacgtaagctgtgctagaacaaaaatgcaatgaaagaaacactggatgaatgaaaagccctgctttgcaacccctcagcatggcaggcctgcagctcatgacccctgcttcctcaccaatgggtcctttctttggactgccatggcaacaagaagcaattcatgataacatttatacgccaagaaaatatcaggttgaactgcttgaagcagctctggatcataataccatcgtctgtttaaacactggctcagggaagacatttattgcagtactactcactaaagagctgtcctatcagatcaggggagacttcagcagaaatggaaaaaggacggtgttcttggtcaactctgcaaaccaggttgctcaacaagtgtcagctgtcagaactcattcagatctcaaggttggggaatactcaaacctagaagtaaatgcatcttggacaaaagagagatggaaccaagagtttactaagcaccaggttctcattatgacttgctatgtcgccttgaatgttttgaaaaatggttacttatcactgtcagacattaaccttttggtgtttgatgagtgtcatcttgcaatcctagaccacccctatcgagaaattatgaagctctgtgaaaattgtccatcatgtcctcgcattttgggactaactgcttccattttaaatgggaaatgtgatccagaggaattggaagaaaagattcagaaactagagaaaattcttaagagtaatgctgaaactgcaactgacctggtggtcttagacaggtatacttctcagccatgtgagattgtggtggattgtggaccatttactgacagaagtgggctttatgaaagactgctgatggaattagaagaagcacttaattttatcaatgattgtaatatatctgtacattcaaaagaaagagattctactttaatttcgaaacagatactatcagactgtcgtgccgtattggtagttctgggaccctggtgtgcagataaagtagctggaatgatggtaagagaactacagaaatacatcaaacatgagcaagaggagctgcacaggaaatttttattgtttacagacactttcctaaggaaaatacatgcactatgtgaagagcacttctcacctgcctcacttgacctgaaatttgtaactcctaaagtaatcaaactgctcgaaatcttacgcaaatataaaccatatgagcgacagcagtttgaaagcgttgagtggtataataatagaaatcaggataattatgtgtcatggagtgattctgaggatgatgatgaggatgaagaaattgaagaaaaagagaagccagagacaaattttccttctccttttaccaacattttgtgcggaattatttttgtggaaagaagatacacagcagttgtcttaaacagattgataaaggaagctggcaaacaagatccagagctggcttatatcagtagcaatttcataactggacatggcattgggaagaatcagcctcgcaacaaacagatggaagcagaattcagaaaacaggaagaggtacttaggaaatttcgagcacatgagaccaacctgcttattgcaacaagtattgtagaagagggtgttgatataccaaaatgcaacttggtggttcgttttgatttgcccacagaatatcgatcctatgttcaatctaaaggaagagcaagggcacccatctctaattatataatgttagcggatacagacaaaataaaaagttttgaagaagaccttaaaacctacaaagctattgaaaagatcttgagaaacaagtgttccaagtcggttgatactggtgagactgacattgatcctgtcatggatgatgatgacgttttcccaccatatgtgttgaggcctgacgatggtggtccacgagtcacaatcaacacggccattggacacatcaatagatactgtgctagattaccaagtgatccgtttactcatctagctcctaaatgcagaacccgagagttgcctgatggtacattttattcaactctttatctgccaattaactcacctcttcgagcctccattgttggtccaccaatgagctgtgtacgattggctgaaagagttgtagctctcatttgctgtgagaaactgcacaaaattggcgaactggatgaccatttgatgccagttgggaaagagactgttaaatatgaagaggagcttgatttgcatgatgaagaagagaccagtgttccaggaagaccaggttccacgaaacgaaggcagtgctacccaaaagcaattccagagtgtttgagggatagttatcccagacctgatcagccctgttacctgtatgtgataggaatggttttaactacacctttacctgatgaactcaactttagaaggcggaagctctatcctcctgaagataccacaagatgctttggaatactgacggccaaacccatacctcagattccacactttcctgtgtacacacgctctggagaggttaccatatccattgagttgaagaagtctggtttcatgttgtctctacaaatgcttgagttgattacaagacttcaccagtatatattctcacatattcttcggcttgaaaaacctgcactagaatttaaacctacagacgctgattcagcatactgtgttctacctcttaatgttgttaatgactccagcactttggatattgactttaaattcatggaagatattgagaagtctgaagctcgcataggcattcccagtacaaagtatacaaaagaaacaccctttgtttttaaattagaagattaccaagatgccgttatcattccaagatatcgcaattttgatcagcctcatcgattttatgtagctgatgtgtacactgatcttaccccactcagtaaatttccttcccctgagtatgaaacttttgcagaatattataaaacaaagtacaaccttgacctaaccaatctcaaccagccactgctggatgtggaccacacatcttcaagacttaatcttttgacacctcgacatttgaatcagaaggggaaagcgcttcctttaagcagtgctgagaagaggaaagccaaatgggaaagtctgcagaataaacagatactggttccagaactctgtgctatacatccaattccagcatcactgtggagaaaagctgtttgtctccccagcatactttatcgccttcactgccttttgactgcagaggagctaagagcccagactgccagcgatgctggcgtgggagtcagatcacttcctgcggattttagataccctaacttagacttcgggtggaaaaaatctattgacagcaaatctttcatctcaatttctaactcctcttcagctgaaaatgataattactgtaagcacagcacaattgtccctgaaaatgctgcacatcaaggtgctaatagaacctcctctctagaaaatcatgaccaaatgtctgtgaactgcagaacgttgctcagcgagtcccctggtaagctccacgttgaagtttcagcagatcttacagcaattaatggtctttcttacaatcaaaatctcgccaatggcagttatgatttagctaacagagacttttgccaaggaaatcagctaaattactacaagcaggaaatacccgtgcaaccaactacctcatattccattcagaatttatacagttacgagaaccagccccagcccagcgatgaatgtactctcctgagtaataaataccttgatggaaatgctaacaaatctacctcagatggaagtcctgtgatggccgtaatgcctggtacgacagacactattcaagtgctcaagggcaggatggattctgagcagagcccttctattgggtactcctcaaggactcttggccccaatcctggacttattcttcaggctttgactctgtcaaacgctagtgatggatttaacctggagcggcttgaaatgcttggcgactcctttttaaagcatgccatcaccacatatctattttgcacttaccctgatgcgcatgagggccgcctttcatatatgagaagcaaaaaggtcagcaactgtaatctgtatcgccttggaaaaaagaagggactacccagccgcatggtggtgtcaatatttgatccccctgtgaattggcttcctcctggttatgtagtaaatcaagacaaaagcaacacagataaatgggaaaaagatgaaatgacaaaagactgcatgctggcgaatggcaaactggatgaggattacgaggaggaggatgaggaggaggagagcctgatgtggagggctccgaaggaagaggctgactatgaagatgatttcctggagtatgatcaggaacatatcagatttatagataatatgttaatggggtcaggagcttttgtaaagaaaatctctctttctcctttttcaaccactgattctgcatatgaatggaaaatgcccaaaaaatcctccttaggtagtatgccattttcatcagattttgaggattttgactacagctcttgggatgcaatgtgctatctggatcctagcaaagctgttgaagaagatgactttgtggtggggttctggaatccatcagaagaaaactgtggtgttgacacgggaaagcagtccatttcttacgacttgcacactgagcagtgtattgctgacaaaagcatagcggactgtgtggaagccctgctgggctgctatttaaccagctgtggggagagggctgctcagcttttcctctgttcactggggctgaaggtgctcccggtaattaaaaggactgatcgggaaaaggccctgtgccctactcgggagaatttcaacagccaacaaaagaacctttcagtgagctgtgctgctgcttctgtggccagttcacgctcttctgtattgaaagactcggaatatggttgtttgaagattccaccaagatgtatgtttgatcatccagatgcagataaaacactgaatcaccttatatcggggtttgaaaattttgaaaagaaaatcaactacagattcaagaataaggcttaccttctccaggcttttacacatgcctcctaccactacaatactatcactgattgttaccagcgcttagaattcctgggagatgcgattttggactacctcataaccaagcacctttatgaagacccgcggcagcactccccgggggtcctgacagacctgcggtctgccctggtcaacaacaccatctttgcatcgctggctgtaaagtacgactaccacaagtacttcaaagctgtctctcctgagctcttccatgtcattgatgactttgtgcagtttcagcttgagaagaatgaaatgcaaggaatggattctgagcttaggagatctgaggaggatgaagagaaagaagaggatattgaagttccaaaggccatgggggatatttttgagtcgcttgctggtgccatttacatggatagtgggatgtcactggagacagtctggcaggtgtactatcccatgatgcggccactaatagaaaagttttctgcaaatgtaccccgttcccctgtgcgagaattgcttgaaatggaaccagaaactgccaaatttagcccggctgagagaacttacgacgggaaggtcagagtcactgtggaagtagtaggaaaggggaaatttaaaggtgttggtcgaagttacaggattgccaaatctgcagcagcaagaagagccctccgaagcctcaaagctaatcaacctcaggttcccaatagctgaaaccgctttttaaaattcaaaacaagaaacaaaacaaaaaaaattaaggggaaaattatttaaatcggaaaggaagacttaaagttgttagtgagtggaatgaattgaaggcagaatttaaagtttggttgataacaggatagataacagaataaaacatttaacatatgtataaaattttggaactaattgtagttttagttttttgcgcaaacacaatcttatcttctttcctcacttctgctttgtttaaatcacaagagtgctttaatgatgacatttagcaagtgctcaaaataattgacaggttttgtttttttttttttgagtttatgtcagctttgcttagtgttagaaggccatggagcttaaacctccagcagtccctaggatgatgtagattcttctccatctctccgtgtgtgcagtagtgccagtcctgcagtagttgataagctgaatagaaagataaggttttcgagaggagaagtgcgccaatgttgtcttttctttccacgttatactgtgtaaggtgatgttcccggtcgctgttgcacctgatagtaagggacagatttttaatgaacattggctggcatgttggtgaatcacattttagttttctgatgccacatagtcttgcataaaaaagggttcttgccttaaaagtgaaaccttcatggatagtctttaatctctgatctttttggaacaaactgttttacattcctttcattttattatgcattagacgttgagacagcgtgatacttacaactcactagtatagttgtaacttattacaggatcatactaaaatttctgtcatatgtatactgaagacattttaaaaaccagaatatgtagtctacggatattttttatcataaaaatgatctttggctaaacaccccattttactaaagtcctcctgccaggtagttcccactgatggaaatgtttatggcaaataattttgccttctaggctgttgctctaacaaaataaaccttagacatatcacacctaaaatatgctgcagattttataattgattggttacttatttaagaagcaaaacacagcacctttacccttagtctcctcacataaatttcttactatacttttcataatgttgcatgcatatttcacctaccaaagctgtgctgttaatgccgtgaaagtttaacgtttgcgataaactgccgtaattttgatacatctgtgatttaggtcattaatttagataaactagctcattatttccatctttggaaaaggaaaaaaaaaaaaacttctttaggcatttgcctaagtttctttaattagacttgtaggcactcttcacttaaatacctcagttcttcttttcttttgcatgcatttttcccctgtttggtgctatgtttatgtattatgcttgaaattttaatttttttttttttgcactgtaactataatacctcttaatttacctttttaaaagctgtgggtcagtcttgcactcccatcaacataccagtagaggtttgctgcaatttgccccgttaattatgcttgaagtttaagaaagctgagcagaggtgtctcatatttcccagcacatgattctgaacttgatgcttcgtggaatgctgcatttatatgtaagtgacatttgaatactgtccttcctgctttatctgcatcatccacccacagagaaatgcctctgtgcgagtgcaccgacagaaaactgtcagctctgctttctaaggaaccctgagtgaggggggtattaagcttctccagtgttttttgttgtctccaatcttaaacttaaattgagatctaaattattaaacgagtttttgagcaaattaggtgacttgttttaaaaatatttaattccgatttggaaccttagatgtctatttgattttttaaaaaaccttaatgtaagatatgaccagttaaaacaaagcaattcttgaattatataactgtaaaagtgtgcagttaacaaggctggatgtgaattttattctgagggtgatttgtgatcaagtttaatcacaaatctcttaatatttataaactacctgatgccaggagcttagggctttgcattgtgtctaatacattgatcccagtgttacgggattctcttgattcctggcaccaaaatcagattgttttcacagttatgattcccagtgggagaaaaatgcctcaatatatttgtaaccttaagaagagtatttttttgttaatactaagatgttcaaacttagacatgattaggtcatacattctcaggggttcaaatttccttctaccattcaaatgttttatcaacagcaaacttcagccgtttcactttttgttggagaaaaatagtagattttaatttgactcacagtttgaagcattctgtgatcccctggttactgagttaaaaaataaaaaagtacgagttagacatatgaaatggttatgaacgcttttgtgctgctgatttttaatgctgtaaagttttcctgtgtttagcttgttgaaatgttttgcatctgtcaattaaggaaaaaaaaaatcactctatgttgccccactttagagccctgtgtgccaccctgtgttcctgtgattgcaatgtgagaccgaatgtaatatggaaaacctaccagtggggtgtggttgtgccctgagcacgtgtgtaaaggactggggaggcgtgtcttgaaaaagcaactgcagaaattccttatgatgattgtgtgcaagttagttaacatgaaccttcatttgtaaattttttaaaatttcttttataatatgctttccgcagtcctaactatgctgcgttttataatagctttttcccttctgttctgttcatgtagcacagataagcattgcacttggtaccatgctttacctcatttcaagaaaatatgcttaacagagaggaaaaaaatgtggtttggccttgctgctgttttgatttatggaatttgaaaaagataattataatgcctgcaatgtgtcatatactcgcacaacttaaataggtcatttttgtctgtggcatttttactgtttgtgaaagtatgaaacagatttgttaactgaactcttaattatgtttttaaaatgtttgttatatttcttttcttttttcttttatattacgtgaagtgatgaaatttagaatgacctctaacactcctgtaattgtcttttaaaatactgatatttttatttgttaataatactttgccctcagaaagattctgataccctgccttgacaacatgaaacttgaggctgctttggttcatgaatccaggtgttcccccggcagtcggcttcttcagtcgctccctggaggcaggtgggcactgcagaggatcactggaatccagatcgagcgcagttcatgcacaaggccccgttgatttaaaatattggatcttgctctgttagggtgtctaatccctttacacaagattgaagccaccaaactgagaccttgatacctttttttaactgcatctgaaattatgttaagagtctttaacccatttgcattatctgcagaagagaaactcatgtcatgtttattacctatatggttgttttaattacatttgaataattatatttttccaaccactgattacttttcaggaatttaattatttccagataaatttctttattttatattgtacatgaaaagttttaaagatatgtttaagaccaagactattaaaatgatttttaaagttgttggagacgccaatagcaatatctaggaaatttgcattgagaccattgtattttccactagcagtgaaaatgatttttcacaactaacttgtaaatatattttaatcattacttctttttttctagtccatttttatttggacatcaaccacagacaatttaaattttatagatgcactaagaattcactgcagcagcaggttacatagcaaaaatgcaaaggtgaacaggaagtaaatttctggcttttctgctgtaaatagtgaaggaaaattactaaaatcaagtaaaactaatgcatattatttgattgacaataaaatatttaccatcacatgctgcagctgttttttaaggaacatgatgtcattcattcatacagtaatcatgctgcagaaatttgcagtctgcaccttatggatcacaattacctttagttgttttttttgtaataattgtagccaagtaaatctccaataaagttatcgtctgttc

SEQ ID NO: 8283 - DNA, 10331 bp, Homo sapiens
  source 1..10331: mol_type = unassigned DNA
gcggaagtgggtgtttgttatttccccaaatgcggaggcccctgcaccactaacgcgaggaaacgcaggcgagtgggaaggttacctagggtatgaattaatacagacttggaaactctgaaagaacttagaatcagcattttgagagcagaagcttgggcatgctgtgattttccaataaactgctatcacaatgtcaaaatgcagttcagacaagagcaacacagagatctcaaacattaaaacgtaagctgtgctagaacaaaaatgcaatgaaagaaacactggatgaatgaaaagccctgctttgcaacccctcagcatggcaggcctgcagctcatgacccctgcttcctcaccaatgggtcctttctttggactgccatggcaacaagaagcaattcatgataacatttatacgccaagaaaatatcaggttgaactgcttgaagcagctctggatcataataccatcgtctgtttaaacactggctcagggaagacatttattgcagtactactcactaaagagctgtcctatcagatcaggggagacttcagcagaaatggaaaaaggacggtgttcttggtcaactctgcaaaccaggttgctcaacaagtgtcagctgtcagaactcattcagatctcaaggttggggaatactcaaacctagaagtaaatgcatcttggacaaaagagagatggaaccaagagtttactaagcaccaggttctcattatgacttgctatgtcgccttgaatgttttgaaaaatggttacttatcactgtcagacattaaccttttggtgtttgatgagtgtcatcttgcaatcctagaccacccctatcgagaaattatgaagctctgtgaaaattgtccatcatgtcctcgcattttgggactaactgcttccattttaaatgggaaatgtgatccagaggaattggaagaaaagattcagaaactagagaaaattcttaagagtaatgctgaaactgcaactgacctggtggtcttagacaggtatacttctcagccatgtgagattgtggtggattgtggaccatttactgacagaagtgggctttatgaaagactgctgatggaattagaagaagcacttaattttatcaatgattgtaatatatctgtacattcaaaagaaagagattctactttaatttcgaaacagatactatcagactgtcgtgccgtattggtagttctgggaccctggtgtgcagataaagtagctggaatgatggtaagagaactacagaaatacatcaaacatgagcaagaggagctgcacaggaaatttttattgtttacagacactttcctaaggaaaatacatgcactatgtgaagagcacttctcacctgcctcacttgacctgaaatttgtaactcctaaagtaatcaaactgctcgaaatcttacgcaaatataaaccatatgagcgacagcagtttgaaagcgttgagtggtataataatagaaatcaggataattatgtgtcatggagtgattctgaggatgatgatgaggatgaagaaattgaagaaaaagagaagccagagacaaattttccttctccttttaccaacattttgtgcggaattatttttgtggaaagaagatacacagcagttgtcttaaacagattgataaaggaagctggcaaacaagatccagagctggcttatatcagtagcaatttcataactggacatggcattgggaagaatcagcctcgcaacaaacagatggaagcagaattcagaaaacaggaagaggtacttaggaaatttcgagcacatgagaccaacctgcttattgcaacaagtattgtagaagagggtgttgatataccaaaatgcaacttggtggttcgttttgatttgcccacagaatatcgatcctatgttcaatctaaaggaagagcaagggcacccatctctaattatataatgttagcggatacagacaaaataaaaagttttgaagaagaccttaaaacctacaaagctattgaaaagatcttgagaaacaagtgttccaagtcggttgatactggtgagactgacattgatcctgtcatggatgatgatgacgttttcccaccatatgtgttgaggcctgacgatggtggtccacgagtcacaatcaacacggccattggacacatcaatagatactgtgctagattaccaagtgatccgtttactcatctagctcctaaatgcagaacccgagagttgcctgatggtacattttattcaactctttatctgccaattaactcacctcttcgagcctccattgttggtccaccaatgagctgtgtacgattggctgaaagagttgtagctctcatttgctgtgagaaactgcacaaaattggcgaactggatgaccatttgatgccagttgggaaagagactgttaaatatgaagaggagcttgatttgcatgatgaagaagagaccagtgttccaggaagaccaggttccacgaaacgaaggcagtgctacccaaaagcaattccagagtgtttgagggatagttatcccagacctgatcagccctgttacctgtatgtgataggaatggttttaactacacctttacctgatgaactcaactttagaaggcggaagctctatcctcctgaagataccacaagatgctttggaatactgacggccaaacccatacctcagattccacactttcctgtgtacacacgctctggagaggttaccatatccattgagttgaagaagtctggtttcatgttgtctctacaaatgcttgagttgattacaagacttcaccagtatatattctcacatattcttcggcttgaaaaacctgcactagaatttaaacctacagacgctgattcagcatactgtgttctacctcttaatgttgttaatgactccagcactttggatattgactttaaattcatggaagatattgagaagtctgaagctcgcataggcattcccagtacaaagtatacaaaagaaacaccctttgtttttaaattagaagattaccaagatgccgttatcattccaagatatcgcaattttgatcagcctcatcgattttatgtagctgatgtgtacactgatcttaccccactcagtaaatttccttcccctgagtatgaaacttttgcagaatattataaaacaaagtacaaccttgacctaaccaatctcaaccagccactgctggatgtggaccacacatcttcaagacttaatcttttgacacctcgacatttgaatcagaaggggaaagcgcttcctttaagcagtgctgagaagaggaaagccaaatgggaaagtctgcagaataaacagatactggttccagaactctgtgctatacatccaattccagcatcactgtggagaaaagctgtttgtctccccagcatactttatcgccttcactgccttttgactgcagaggagctaagagcccagactgccagcgatgctggcgtgggagtcagatcacttcctgcggattttagataccctaacttagacttcgggtggaaaaaatctattgacagcaaatctttcatctcaatttctaactcctcttcagctgaaaatgataattactgtaagcacagcacaattgtccctgaaaatgctgcacatcaaggtgctaatagaacctcctctctagaaaatcatgaccaaatgtctgtgaactgcagaacgttgctcagcgagtcccctggtaagctccacgttgaagtttcagcagatcttacagcaattaatggtctttcttacaatcaaaatctcgccaatggcagttatgatttagctaacagagacttttgccaaggaaatcagctaaattactacaagcaggaaatacccgtgcaaccaactacctcatattccattcagaatttatacagttacgagaaccagccccagcccagcgatgaatgtactctcctgagtaataaataccttgatggaaatgctaacaaatctacctcagatggaagtcctgtgatggccgtaatgcctggtacgacagacactattcaagtgctcaagggcaggatggattctgagcagagcccttctattgggtactcctcaaggactcttggccccaatcctggacttattcttcaggctttgactctgtcaaacgctagtgatggatttaacctggagcggcttgaaatgcttggcgactcctttttaaagcatgccatcaccacatatctattttgcacttaccctgatgcgcatgagggccgcctttcatatatgagaagcaaaaaggtcagcaactgtaatctgtatcgccttggaaaaaagaagggactacccagccgcatggtggtgtcaatatttgatccccctgtgaattggcttcctcctggttatgtagtaaatcaagacaaaagcaacacagataaatgggaaaaagatgaaatgacaaaagactgcatgctggcgaatggcaaactggatgaggattacgaggaggaggatgaggaggaggagagcctgatgtggagggctccgaaggaagaggctgactatgaagatgatttcctggagtatgatcaggaacatatcagatttatagataatatgttaatggggtcaggagcttttgtaaagaaaatctctctttctcctttttcaaccactgattctgcatatgaatggaaaatgcccaaaaaatcctccttaggtagtatgccattttcatcagattttgaggattttgactacagctcttgggatgcaatgtgctatctggatcctagcaaagctgttgaagaagatgactttgtggtggggttctggaatccatcagaagaaaactgtggtgttgacacgggaaagcagtccatttcttacgacttgcacactgagcagtgtattgctgacaaaagcatagcggactgtgtggaagccctgctgggctgctatttaaccagctgtggggagagggctgctcagcttttcctctgttcactggggctgaaggtgctcccggtaattaaaaggactgatcgggaaaaggccctgtgccctactcgggagaatttcaacagccaacaaaagaacctttcagtgagctgtgctgctgcttctgtggccagttcacgctcttctgtattgaaagactcggaatatggttgtttgaagattccaccaagatgtatgtttgatcatccagatgcagataaaacactgaatcaccttatatcggggtttgaaaattttgaaaagaaaatcaactacagattcaagaataaggcttaccttctccaggcttttacacatgcctcctaccactacaatactatcactgattgttaccagcgcttagaattcctgggagatgcgattttggactacctcataaccaagcacctttatgaagacccgcggcagcactccccgggggtcctgacagacctgcggtctgccctggtcaacaacaccatctttgcatcgctggctgtaaagtacgactaccacaagtacttcaaagctgtctctcctgagctcttccatgtcattgatgactttgtgcagtttcagcttgagaagaatgaaatgcaaggaatggattctgagcttaggagatctgaggaggatgaagagaaagaagaggatattgaagttccaaaggccatgggggatatttttgagtcgcttgctggtgccatttacatggatagtgggatgtcactggagacagtctggcaggtgtactatcccatgatgcggccactaatagaaaagttttctgcaaatgtaccccgttcccctgtgcgagaattgcttgaaatggaaccagaaactgccaaatttagcccggctgagagaacttacgacgggaaggtcagagtcactgtggaagtagtaggaaaggggaaatttaaaggtgttggtcgaagttacaggattgccaaatctgcagcagcaagaagagccctccgaagcctcaaagctaatcaacctcaggttcccaatagctgaaaccgctttttaaaattcaaaacaagaaacaaaacaaaaaaaattaaggggaaaattatttaaatcggaaaggaagacttaaagttgttagtgagtggaatgaattgaaggcagaatttaaagtttggttgataacaggatagataacagaataaaacatttaacatatgtataaaattttggaactaattgtagttttagttttttgcgcaaacacaatcttatcttctttcctcacttctgctttgtttaaatcacaagagtgctttaatgatgacatttagcaagtgctcaaaataattgacaggttttgtttttttttttttgagtttatgtcagctttgcttagtgttagaaggccatggagcttaaacctccagcagtccctaggatgatgtagattcttctccatctctccgtgtgtgcagtagtgccagtcctgcagtagttgataagctgaatagaaagataaggttttcgagaggagaagtgcgccaatgttgtcttttctttccacgttatactgtgtaaggtgatgttcccggtcgctgttgcacctgatagtaagggacagatttttaatgaacattggctggcatgttggtgaatcacattttagttttctgatgccacatagtcttgcataaaaaagggttcttgccttaaaagtgaaaccttcatggatagtctttaatctctgatctttttggaacaaactgttttacattcctttcattttattatgcattagacgttgagacagcgtgatacttacaactcactagtatagttgtaacttattacaggatcatactaaaatttctgtcatatgtatactgaagacattttaaaaaccagaatatgtagtctacggatattttttatcataaaaatgatctttggctaaacaccccattttactaaagtcctcctgccaggtagttcccactgatggaaatgtttatggcaaataattttgccttctaggctgttgctctaacaaaataaaccttagacatatcacacctaaaatatgctgcagattttataattgattggttacttatttaagaagcaaaacacagcacctttacccttagtctcctcacataaatttcttactatacttttcataatgttgcatgcatatttcacctaccaaagctgtgctgttaatgccgtgaaagtttaacgtttgcgataaactgccgtaattttgatacatctgtgatttaggtcattaatttagataaactagctcattatttccatctttggaaaaggaaaaaaaaaaaaacttctttaggcatttgcctaagtttctttaattagacttgtaggcactcttcacttaaatacctcagttcttcttttcttttgcatgcatttttcccctgtttggtgctatgtttatgtattatgcttgaaattttaatttttttttttttgcactgtaactataatacctcttaatttacctttttaaaagctgtgggtcagtcttgcactcccatcaacataccagtagaggtttgctgcaatttgccccgttaattatgcttgaagtttaagaaagctgagcagaggtgtctcatatttcccagcacatgattctgaacttgatgcttcgtggaatgctgcatttatatgtaagtgacatttgaatactgtccttcctgctttatctgcatcatccacccacagagaaatgcctctgtgcgagtgcaccgacagaaaactgtcagctctgctttctaaggaaccctgagtgaggggggtattaagcttctccagtgttttttgttgtctccaatcttaaacttaaattgagatctaaattattaaacgagtttttgagcaaattaggtgacttgttttaaaaatatttaattccgatttggaaccttagatgtctatttgattttttaaaaaaccttaatgtaagatatgaccagttaaaacaaagcaattcttgaattatataactgtaaaagtgtgcagttaacaaggctggatgtgaattttattctgagggtgatttgtgatcaagtttaatcacaaatctcttaatatttataaactacctgatgccaggagcttagggctttgcattgtgtctaatacattgatcccagtgttacgggattctcttgattcctggcaccaaaatcagattgttttcacagttatgattcccagtgggagaaaaatgcctcaatatatttgtaaccttaagaagagtatttttttgttaatactaagatgttcaaacttagacatgattaggtcatacattctcaggggttcaaatttccttctaccattcaaatgttttatcaacagcaaacttcagccgtttcactttttgttggagaaaaatagtagattttaatttgactcacagtttgaagcattctgtgatcccctggttactgagttaaaaaataaaaaagtacgagttagacatatgaaatggttatgaacgcttttgtgctgctgatttttaatgctgtaaagttttcctgtgtttagcttgttgaaatgttttgcatctgtcaattaaggaaaaaaaaaatcactctatgttgccccactttagagccctgtgtgccaccctgtgttcctgtgattgcaatgtgagaccgaatgtaatatggaaaacctaccagtggggtgtggttgtgccctgagcacgtgtgtaaaggactggggaggcgtgtcttgaaaaagcaactgcagaaattccttatgatgattgtgtgcaagttagttaacatgaaccttcatttgtaaattttttaaaatttcttttataatatgctttccgcagtcctaactatgctgcgttttataatagctttttcccttctgttctgttcatgtagcacagataagcattgcacttggtaccatgctttacctcatttcaagaaaatatgcttaacagagaggaaaaaaatgtggtttggccttgctgctgttttgatttatggaatttgaaaaagataattataatgcctgcaatgtgtcatatactcgcacaacttaaataggtcatttttgtctgtggcatttttactgtttgtgaaagtatgaaacagatttgttaactgaactcttaattatgtttttaaaatgtttgttatatttcttttcttttttcttttatattacgtgaagtgatgaaatttagaatgacctctaacactcctgtaattgtcttttaaaatactgatatttttatttgttaataatactttgccctcagaaagattctgataccctgccttgacaacatgaaacttgaggctgctttggttcatgaatccaggtgttcccccggcagtcggcttcttcagtcgctccctggaggcaggtgggcactgcagaggatcactggaatccagatcgagcgcagttcatgcacaaggccccgttgatttaaaatattggatcttgctctgttagggtgtctaatccctttacacaagattgaagccaccaaactgagaccttgatacctttttttaactgcatctgaaattatgttaagagtctttaacccatttgcattatctgcagaagagaaactcatgtcatgtttattacctatatggttgttttaattacatttgaataattatatttttccaaccactgattacttttcaggaatttaattatttccagataaatttctttattttatattgtacatgaaaagttttaaagatatgtttaagaccaagactattaaaatgatttttaaagttgttggagacgccaatagcaatatctaggaaatttgcattgagaccattgtattttccactagcagtgaaaatgatttttcacaactaacttgtaaatatattttaatcattacttctttttttctagtccatttttatttggacatcaaccacagacaatttaaattttatagatgcactaagaattcactgcagcagcaggttacatagcaaaaatgcaaaggtgaacaggaagtaaatttctggcttttctgctgtaaatagtgaaggaaaattactaaaatcaagtaaaactaatgcatattatttgattgacaataaaatatttaccatcacatgctgcagctgttttttaaggaacatgatgtcattcattcatacagtaatcatgctgcagaaatttgcagtctgcaccttatggatcacaattacctttagttgttttttttgtaataattgtagccaagtaaatctccaataaagttatcgtctgttca

SEQ ID NO: 8284 - DNA, 6179 bp, Homo sapiens
  source 1..6179: mol_type = unassigned DNA
gctggtttcatcctaaggctggatcttttcatgggtctgtgtagtgtaattgcagcagcaaatgggactaataatttcatgagtcatctttagagggaaagaaagacaactgcttctcttcaaccatcaaatgaaagtcctaaattttttgctgttggatgagcatgaaccaattcctctggccagggtaagctgtgctagaacaaaaatgcaatgaaagaaacactggatgaatgaaaagccctgctttgcaacccctcagcatggcaggcctgcagctcatgacccctgcttcctcaccaatgggtcctttctttggactgccatggcaacaagaagcaattcatgataacatttatacgccaagaaaatatcaggttgaactgcttgaagcagctctggatcataataccatcgtctgtttaaacactggctcagggaagacatttattgcagtactactcactaaagagctgtcctatcagatcaggggagacttcagcagaaatggaaaaaggacggtgttcttggtcaactctgcaaaccaggttgctcaacaagtgtcagctgtcagaactcattcagatctcaaggttggggaatactcaaacctagaagtaaatgcatcttggacaaaagagagatggaaccaagagtttactaagcaccaggttctcattatgacttgctatgtcgccttgaatgttttgaaaaatggttacttatcactgtcagacattaaccttttggtgtttgatgagtgtcatcttgcaatcctagaccacccctatcgagaaattatgaagctctgtgaaaattgtccatcatgtcctcgcattttgggactaactgcttccattttaaatgggaaatgtgatccagaggaattggaagaaaagattcagaaactagagaaaattcttaagagtaatgctgaaactgcaactgacctggtggtcttagacaggtatacttctcagccatgtgagattgtggtggattgtggaccatttactgacagaagtgggctttatgaaagactgctgatggaattagaagaagcacttaattttatcaatgattgtaatatatctgtacattcaaaagaaagagattctactttaatttcgaaacagatactatcagactgtcgtgccgtattggtagttctgggaccctggtgtgcagataaagtagctggaatgatggtaagagaactacagaaatacatcaaacatgagcaagaggagctgcacaggaaatttttattgtttacagacactttcctaaggaaaatacatgcactatgtgaagagcacttctcacctgcctcacttgacctgaaatttgtaactcctaaagtaatcaaactgctcgaaatcttacgcaaatataaaccatatgagcgacagcagtttgaaagcgttgagtggtataataatagaaatcaggataattatgtgtcatggagtgattctgaggatgatgatgaggatgaagaaattgaagaaaaagagaagccagagacaaattttccttctccttttaccaacattttgtgcggaattatttttgtggaaagaagatacacagcagttgtcttaaacagattgataaaggaagctggcaaacaagatccagagctggcttatatcagtagcaatttcataactggacatggcattgggaagaatcagcctcgcaacaaacagatggaagcagaattcagaaaacaggaagaggtacttaggaaatttcgagcacatgagaccaacctgcttattgcaacaagtattgtagaagagggtgttgatataccaaaatgcaacttggtggttcgttttgatttgcccacagaatatcgatcctatgttcaatctaaaggaagagcaagggcacccatctctaattatataatgttagcggatacagacaaaataaaaagttttgaagaagaccttaaaacctacaaagctattgaaaagatcttgagaaacaagtgttccaagtcggttgatactggtgagactgacattgatcctgtcatggatgatgatgacgttttcccaccatatgtgttgaggcctgacgatggtggtccacgagtcacaatcaacacggccattggacacatcaatagatactgtgctagattaccaagtgatccgtttactcatctagctcctaaatgcagaacccgagagttgcctgatggtacattttattcaactctttatctgccaattaactcacctcttcgagcctccattgttggtccaccaatgagctgtgtacgattggctgaaagagttgtagctctcatttgctgtgagaaactgcacaaaattggcgaactggatgaccatttgatgccagttgggaaagagactgttaaatatgaagaggagcttgatttgcatgatgaagaagagaccagtgttccaggaagaccaggttccacgaaacgaaggcagtgctacccaaaagcaattccagagtgtttgagggatagttatcccagacctgatcagccctgttacctgtatgtgataggaatggttttaactacacctttacctgatgaactcaactttagaaggcggaagctctatcctcctgaagataccacaagatgctttggaatactgacggccaaacccatacctcagattccacactttcctgtgtacacacgctctggagaggttaccatatccattgagttgaagaagtctggtttcatgttgtctctacaaatgcttgagttgattacaagacttcaccagtatatattctcacatattcttcggcttgaaaaacctgcactagaatttaaacctacagacgctgattcagcatactgtgttctacctcttaatgttgttaatgactccagcactttggatattgactttaaattcatggaagatattgagaagtctgaagctcgcataggcattcccagtacaaagtatacaaaagaaacaccctttgtttttaaattagaagattaccaagatgccgttatcattccaagatatcgcaattttgatcagcctcatcgattttatgtagctgatgtgtacactgatcttaccccactcagtaaatttccttcccctgagtatgaaacttttgcagaatattataaaacaaagtacaaccttgacctaaccaatctcaaccagccactgctggatgtggaccacacatcttcaagacttaatcttttgacacctcgacatttgaatcagaaggggaaagcgcttcctttaagcagtgctgagaagaggaaagccaaatgggaaagtctgcagaataaacagatactggttccagaactctgtgctatacatccaattccagcatcactgtggagaaaagctgtttgtctccccagcatactttatcgccttcactgccttttgactgcagaggagctaagagcccagactgccagcgatgctggcgtgggagtcagatcacttcctgcggattttagataccctaacttagacttcgggtggaaaaaatctattgacagcaaatctttcatctcaatttctaactcctcttcagctgaaaatgataattactgtaagcacagcacaattgtccctgaaaatgctgcacatcaaggtgctaatagaacctcctctctagaaaatcatgaccaaatgtctgtgaactgcagaacgttgctcagcgagtcccctggtaagctccacgttgaagtttcagcagatcttacagcaattaatggtctttcttacaatcaaaatctcgccaatggcagttatgatttagctaacagagacttttgccaaggaaatcagctaaattactacaagcaggaaatacccgtgcaaccaactacctcatattccattcagaatttatacagttacgagaaccagccccagcccagcgatgaatgtactctcctgagtaataaataccttgatggaaatgctaacaaatctacctcagatggaagtcctgtgatggccgtaatgcctggtacgacagacactattcaagtgctcaagggcaggatggattctgagcagagcccttctattgggtactcctcaaggactcttggccccaatcctggacttattcttcaggctttgactctgtcaaacgctagtgatggatttaacctggagcggcttgaaatgcttggcgactcctttttaaagcatgccatcaccacatatctattttgcacttaccctgatgcgcatgagggccgcctttcatatatgagaagcaaaaaggtcagcaactgtaatctgtatcgccttggaaaaaagaagggactacccagccgcatggtggtgtcaatatttgatccccctgtgaattggcttcctcctggttatgtagtaaatcaagacaaaagcaacacagataaatgggaaaaagatgaaatgacaaaagactgcatgctggcgaatggcaaactggatgaggattacgaggaggaggatgaggaggaggagagcctgatgtggagggctccgaaggaagaggctgactatgaagatgatttcctggagtatgatcaggaacatatcagatttatagataatatgttaatggggtcaggagcttttgtaaagaaaatctctctttctcctttttcaaccactgattctgcatatgaatggaaaatgcccaaaaaatcctccttaggtagtatgccattttcatcagattttgaggattttgactacagctcttgggatgcaatgtgctatctggatcctagcaaagctgttgaagaagatgactttgtggtggggttctggaatccatcagaagaaaactgtggtgttgacacgggaaagcagtccatttcttacgacttgcacactgagcagtgtattgctgacaaaagcatagcggactgtgtggaagccctgctgggctgctatttaaccagctgtggggagagggctgctcagcttttcctctgttcactggggctgaaggtgctcccggtaattaaaaggactgatcgggaaaaggccctgtgccctactcgggagaatttcaacagccaacaaaagaacctttcagtgagctgtgctgctgcttctgtggccagttcacgctcttctgtattgaaagactcggaatatggttgtttgaagattccaccaagatgtatgtttgatcatccagatgcagataaaacactgaatcaccttatatcggggtttgaaaattttgaaaagaaaatcaactacagattcaagaataaggcttaccttctccaggcttttacacatgcctcctaccactacaatactatcactgattgttaccagcgcttagaattcctgggagatgcgattttggactacctcataaccaagcacctttatgaagacccgcggcagcactccccgggggtcctgacagacctgcggtctgccctggtcaacaacaccatctttgcatcgctggctgtaaagtacgactaccacaagtacttcaaagctgtctctcctgagctcttccatgtcattgatgactttgtgcagtttcagcttgagaagaatgaaatgcaaggaatggattctgagcttaggagatctgaggaggatgaagagaaagaagaggatattgaagttccaaaggccatgggggatatttttgagtcgcttgctggtgccatttacatggatagtgggatgtcactggagacagtctggcaggtgtactatcccatgatgcggccactaatagaaaagttttctgcaaatgtaccccgttcccctgtgcgagaattgcttgaaatggaaccagaaactgccaaatttagcccggctgagagaacttacgacgggaaggtcagagtcactgtggaagtagtaggaaaggggaaatttaaaggtgttggtcgaagttacaggattgccaaatctgcagcagcaagaagagccctccgaagcctcaaagctaatcaacctcaggttcccaatagctgaaaccgctttttaaaattcaaaacaagaaacaaaacaaaaaaaattaaggggaaaattatttaaatcggaaaggaagacttaaagttgttagtgagtggaatgaattgaaggcagaatttaaagtttggttgataacaggatagataacagaataaaacatttaacatatgtataaaa

SEQ ID NO: 8285 - DNA, 498 bp, Homo sapiens
  source 1..498: mol_type = unassigned DNA
gtccgatggttctcgaaggcccgcggcgccccgtgctgcaggttacctagggtatgaattaatacagacttggaaactctgaaagaacttagaatcagcattttgagagttactactgggttatttggatttctcagccaaagcagaagcttgggcatgctgtgattttccaataaactgctatcacaatgtcaaaatgcagttcagacaagagcaacacagagatctcaaacattaaaacgtaagctgtgctagaacaaaaatgcaatgaaagaaacactggatgaatgaaaagccctgctttgcaacccctcagcatggcaggcctgcagctcatgacccctgcttcctcaccaatgggtcctttctttggactgccatggcaacaagaagcaattcatgataacatttatacgccaagaaaatatcaggttgaactgcttgaagcagctctggatcataataccatcgtctgtttaaacactggctcagggaaga

SEQ ID NO: 8286 - DNA, 607 bp, Homo sapiens
  source 1..607: mol_type = unassigned DNA
gtccgatggttctcgaaggcccgcggcgccccgtgctgcaggttacctagggtatgaattaatacagacttggaaactctgaaagaacttagaatcagcattttgagagcagaagcttgggcatgctgtgattttccaataaactgctatcacaatgtcaaaatgcagttcagacaagagcaacacagagatctcaaacattaaaacgtttcatagagtaatagcaatgaacactccaaagcagtgcaagagaggaaattcccttctgtggggcgaggaaatcctgctgacagtaaagccagtggtaggctttcacacagatatttgaatccctgaccctctgtttgaaggtaagctgtgctagaacaaaaatgcaatgaaagaaacactggatgaatgaaaagccctgctttgcaacccctcagcatggcaggcctgcagctcatgacccctgcttcctcaccaatgggtcctttctttggactgccatggcaacaagaagcaattcatgataacatttatacgccaagaaaatatcaggttgaactgcttgaagcagctctggatcataataccatcgtctgtttaaacactggctcagggaaga

SEQ ID NO: 8287 - DNA, 5621 bp, Homo sapiens
  source 1..5621: mol_type = unassigned DNA
actggatgaatgaaaagccctgctttgcaacccctcagcatggcaggcctgcagctcatgacccctgcttcctcaccaatgggtcctttctttggactgccatggcaacaagaagcaattcatgataacatttatacgccaagaaaatatcaggttgaactgcttgaagcagctctggatcataataccatcgtctgtttaaacactggctcagggaagacatttattgcagtactactcactaaagagctgtcctatcagatcaggggagacttcagcagaaatggaaaaaggacggtgttcttggtcaactctgcaaaccaggttgctcaacaagtgtcagctgtcagaactcattcagatctcaaggttggggaatactcaaacctagaagtaaatgcatcttggacaaaagagagatggaaccaagagtttactaagcaccaggttctcattatgacttgctatgtcgccttgaatgttttgaaaaatggttacttatcactgtcagacattaaccttttggtgtttgatgagtgtcatcttgcaatcctagaccacccctatcgagaaattatgaagctctgtgaaaattgtccatcatgtcctcgcattttgggactaactgcttccattttaaatgggaaatgtgatccagaggaattggaagaaaagattcagaaactagagaaaattcttaagagtaatgctgaaactgcaactgacctggtggtcttagacaggtatacttctcagccatgtgagattgtggtggattgtggaccatttactgacagaagtgggctttatgaaagactgctgatggaattagaagaagcacttaattttatcaatgattgtaatatatctgtacattcaaaagaaagagattctactttaatttcgaaacagatactatcagactgtcgtgccgtattggtagttctgggaccctggtgtgcagataaagtagctggaatgatggtaagagaactacagaaatacatcaaacatgagcaagaggagctgcacaggaaatttttattgtttacagacactttcctaaggaaaatacatgcactatgtgaagagcacttctcacctgcctcacttgacctgaaatttgtaactcctaaagtaatcaaactgctcgaaatcttacgcaaatataaaccatatgagcgacagcagtttgaaagcgttgagtggtataataatagaaatcaggataattatgtgtcatggagtgattctgaggatgatgatgaggatgaagaaattgaagaaaaagagaagccagagacaaattttccttctccttttaccaacattttgtgcggaattatttttgtggaaagaagatacacagcagttgtcttaaacagattgataaaggaagctggcaaacaagatccagagctggcttatatcagtagcaatttcataactggacatggcattgggaagaatcagcctcgcaacaaacagatggaagcagaattcagaaaacaggaagaggtacttaggaaatttcgagcacatgagaccaacctgcttattgcaacaagtattgtagaagagggtgttgatataccaaaatgcaacttggtggttcgttttgatttgcccacagaatatcgatcctatgttcaatctaaaggaagagcaagggcacccatctctaattatataatgttagcggatacagacaaaataaaaagttttgaagaagaccttaaaacctacaaagctattgaaaagatcttgagaaacaagtgttccaagtcggttgatactggtgagactgacattgatcctgtcatggatgatgatgacgttttcccaccatatgtgttgaggcctgacgatggtggtccacgagtcacaatcaacacggccattggacacatcaatagatactgtgctagattaccaagtgatccgtttactcatctagctcctaaatgcagaacccgagagttgcctgatggtacattttattcaactctttatctgccaattaactcacctcttcgagcctccattgttggtccaccaatgagctgtgtacgattggctgaaagagttgtagctctcatttgctgtgagaaactgcacaaaattggcgaactggatgaccatttgatgccagttgggaaagagactgttaaatatgaagaggagcttgatttgcatgatgaagaagagaccagtgttccaggaagaccaggttccacgaaacgaaggcagtgctacccaaaagcaattccagagtgtttgagggatagttatcccagacctgatcagccctgttacctgtatgtgataggaatggttttaactacacctttacctgatgaactcaactttagaaggcggaagctctatcctcctgaagataccacaagatgctttggaatactgacggccaaacccatacctcagattccacactttcctgtgtacacacgctctggagaggttaccatatccattgagttgaagaagtctggtttcatgttgtctctacaaatgcttgagttgattacaagacttcaccagtatatattctcacatattcttcggcttgaaaaacctgcactagaatttaaacctacagacgctgattcagcatactgtgttctacctcttaatgttgttaatgactccagcactttggatattgactttaaattcatggaagatattgagaagtctgaagctcgcataggcattcccagtacaaagtatacaaaagaaacaccctttgtttttaaattagaagattaccaagatgccgttatcattccaagatatcgcaattttgatcagcctcatcgattttatgtagctgatgtgtacactgatcttaccccactcagtaaatttccttcccctgagtatgaaacttttgcagaatattataaaacaaagtacaaccttgacctaaccaatctcaaccagccactgctggatgtggaccacacatcttcaagacttaatcttttgacacctcgacatttgaatcagaaggggaaagcgcttcctttaagcagtgctgagaagaggaaagccaaatgggaaagtctgcagaataaacagatactggttccagaactctgtgctatacatccaattccagcatcactgtggagaaaagctgtttgtctccccagcatactttatcgccttcactgccttttgactgcagaggagctaagagcccagactgccagcgatgctggcgtgggagtcagatcacttcctgcggattttagataccctaacttagacttcgggtggaaaaaatctattgacagcaaatctttcatctcaatttctaactcctcttcagctgaaaatgataattactgtaagcacagcacaattgtccctgaaaatgctgcacatcaaggtgctaatagaacctcctctctagaaaatcatgaccaaatgtctgtgaactgcagaacgttgctcagcgagtcccctggtaagctccacgttgaagtttcagcagatcttacagcaattaatggtctttcttacaatcaaaatctcgccaatggcagttatgatttagctaacagagacttttgccaaggaaatcagctaaattactacaagcaggaaatacccgtgcaaccaactacctcatattccattcagaatttatacagttacgagaaccagccccagcccagcgatgaatgtactctcctgagtaataaataccttgatggaaatgctaacaaatctacctcagatggaagtcctgtgatggccgtaatgcctggtacgacagacactattcaagtgctcaagggcaggatggattctgagcagagcccttctattgggtactcctcaaggactcttggccccaatcctggacttattcttcaggctttgactctgtcaaacgctagtgatggatttaacctggagcggcttgaaatgcttggcgactcctttttaaagcatgccatcaccacatatctattttgcacttaccctgatgcgcatgagggccgcctttcatatatgagaagcaaaaaggtcagcaactgtaatctgtatcgccttggaaaaaagaagggactacccagccgcatggtggtgtcaatatttgatccccctgtgaattggcttcctcctggttatgtagtaaatcaagacaaaagcaacacagataaatgggaaaaagatgaaatgacaaaagactgcatgctggcgaatggcaaactggatgaggattacgaggaggaggatgaggaggaggagagcctgatgtggagggctccgaaggaagaggctgactatgaagatgatttcctggagtatgatcaggaacatatcagatttatagataatatgttaatggggtcaggagcttttgtaaagaaaatctctctttctcctttttcaaccactgattctgcatatgaatggaaaatgcccaaaaaatcctccttaggtagtatgccattttcatcagattttgaggattttgactacagctcttgggatgcaatgtgctatctggatcctagcaaagctgttgaagaagatgactttgtggtggggttctggaatccatcagaagaaaactgtggtgttgacacgggaaagcagtccatttcttacgacttgcacactgagcagtgtattgctgacaaaagcatagcggactgtgtggaagccctgctgggctgctatttaaccagctgtggggagagggctgctcagcttttcctctgttcactggggctgaaggtgctcccggtaattaaaaggactgatcgggaaaaggccctgtgccctactcgggagaatttcaacagccaacaaaagaacctttcagtgagctgtgctgctgcttctgtggccagttcacgctcttctgtattgaaagactcggaatatggttgtttgaagattccaccaagatgtatgtttgatcatccagatgcagataaaacactgaatcaccttatatcggggtttgaaaattttgaaaagaaaatcaactacagattcaagaataaggcttaccttctccaggcttttacacatgcctcctaccactacaatactatcactgattgttaccagcgcttagaattcctgggagatgcgattttggactacctcataaccaagcacctttatgaagacccgcggcagcactccccgggggtcctgacagacctgcggtctgccctggtcaacaacaccatctttgcatcgctggctgtaaagtacgactaccacaagtacttcaaagctgtctctcctgagctcttccatgtcattgatgactttgtgcagtttcagcttgagaagaatgaaatgcaaggaatggattctgagaaaagttttctgcaaatgtaccccgttcccctgtgcgagaattgcttgaaatggaaccagaaactgccaaatttagcccggctgagagaacttacgacgggaaggtcagagtcactgtggaagtagtaggaaaggggaaatttaaaggtgttggtcgaagttacaggattgccaaatctgcagcagcaagaagagccctccgaagcctcaaagctaatcaacctcaggttcccaatagctgaaaccgc

SEQ ID NO: 8288 - DNA, 2776 bp, Homo sapiens
  source 1..2776: mol_type = unassigned DNA
ctcaaccagccactgctggatgtggaccacacatcttcaagacttaatcttttgacacctcgacatttgaatcagaaggggaaagcgcttcctttaagcagtgctgagaagaggaaagccaaatgggaaagtctgcagaataaacagatactggttccagaactctgtgctatacatccaattccagcatcactgtggagaaaagctgtttgtctccccagcatactttatcgccttcactgccttttgactgcagaggagctaagagcccagactgccagcgatgctggcgtgggagtcagatcacttcctgcggattttagctgaaaatgataattactgtaagcacagcacaattgtccctgaaaatgctgcacatcaaggtgctaatagaacctcctctctagaaaatcatgaccaaatgtctgtgaactgcagaacgttgctcagcgagtcccctggtaagctccacgttgaagtttcagcagatcttacagcaattaatggtctttcttacaatcaaaatctcgccaatggcagttatgatttagctaacagagacttttgccaaggaaatcagctaaattactacaagcaggaaatacccgtgcaaccaactacctcatattccattcagaatttatacagttacgagaaccagccccagcccagcgatgaatgtactctcctgagtaataaataccttgatggaaatgctaacaaatctacctcagatggaagtcctgtgatggccgtaatgcctggtacgacagacactattcaagtgctcaagggcaggatggattctgagcagagcccttctattgggtactcctcaaggactcttggccccaatcctggacttattcttcaggctttgactctgtcaaacgctagtgatggatttaacctggagcggcttgaaatgcttggcgactcctttttaaagcatgccatcaccacatatctattttgcacttaccctgatgcgcatgagggccgcctttcatatatgagaagcaaaaaggtcagcaactgtaatctgtatcgccttggaaaaaagaagggactacccagccgcatggtggtgtcaatatttgatccccctgtgaattggcttcctcctggttatgtagtaaatcaagacaaaagcaacacagataaatgggaaaaagatgaaatgacaaaagactgcatgctggcgaatggcaaactggatgaggattacgaggaggaggatgaggaggaggagagcctgatgtggagggctccgaaggaagaggctgactatgaagatgatttcctggagtatgatcaggaacatatcagatttatagataatatgttaatggggtcaggagcttttgtaaagaaaatctctctttctcctttttcaaccactgattctgcatatgaatggaaaatgcccaaaaaatcctccttaggtagtatgccattttcatcagattttgaggattttgactacagctcttgggatgcaatgtgctatctggatcctagcaaagctgttgaagaagatgactttgtggtggggttctggaatccatcagaagaaaactgtggtgttgacacgggaaagcagtccatttcttacgacttgcacactgagcagtgtattgctgacaaaagcatagcggactgtgtggaagccctgctgggctgctatttaaccagctgtggggagagggctgctcagcttttcctctgttcactggggctgaaggtgctcccggtaattaaaaggactgatcgggaaaaggccctgtgccctactcgggagaatttcaacagccaacaaaagaacctttcagtgagctgtgctgctgcttctgtggccagttcacgctcttctgtattgaaagactcggaatatggttgtttgaagattccaccaagatgtatgtttgatcatccagatgcagataaaacactgaatcaccttatatcggggtttgaaaattttgaaaagaaaatcaactacagattcaagaataaggcttaccttctccaggcttttacacatgcctcctaccactacaatactatcactgattgttaccagcgcttagaattcctgggagatgcgattttggactacctcataaccaagcacctttatgaagacccgcggcagcactccccgggggtcctgacagacctgcggtctgccctggtcaacaacaccatctttgcatcgctggctgtaaagtacgactaccacaagtacttcaaagctgtctctcctgagctcttccatgtcattgatgactttgtgcagtttcagcttgagaagaatgaaatgcaaggaatggattctgagcttaggagatctgaggaggatgaagagaaagaagaggatattgaagttccaaaggccatgggggatatttttgagtcgcttgctggtgccatttacatggatagtgggatgtcactggagacagtctggcaggtgtactatcccatgatgcggccactaatagaaaagttttctgcaaatgtaccccgttcccctgtgcgagaattgcttgaaatggaaccagaaactgccaaatttagcccggctgagagaacttacgacgggaaggtcagagtcactgtggaagtagtaggaaaggggaaatttaaaggtgttggtcgaagttacaggattgccaaatctgcagcagcaagaagagccctccgaagcctcaaagctaatcaacctcaggttcccaatagctgaaaccgctttttaaaattcaaaacaagaaac

SEQ ID NO: 8289 - DNA, 1790 bp, Homo sapiens
  source 1..1790: mol_type = unassigned DNA
ccctgcagtcaggactctgggaccgcagggggctcccggaccctgactctgcagccgaaccggcacggtttcgtggggacccaggcttgcaaagtgacggtcattttctctttctttctccctcttgagtccttctgagatgatggctctgggcgcagcgggagctacccgggtctttgtcgcgatggtagcggcggctctcggcggccaccctctgctgggagtgagcgccaccttgaactcggttctcaattccaacgctatcaagaacctgcccccaccgctgggcggcgctgcggggcacccaggctctgcagtcagcgccgcgccgggaatcctgtacccgggcgggaataagtaccagaccattgacaactaccagccgtacccgtgcgcagaggacgaggagtgcggcactgatgagtactgcgctagtcccacccgcggaggggacgcaggcgtgcaaatctgtctcgcctgcaggaagcgccgaaaacgctgcatgcgtcacgctatgtgctgccccgggaattactgcaaaaatggaatatgtgtgtcttctgatcaaaatcatttccgaggagaaattgaggaaaccatcactgaaagctttggtaatgatcatagcaccttggatgggtattccagaagaaccaccttgtcttcaaaaatgtatcacaccaaaggacaagaaggttctgtttgtctccggtcatcagactgtgcctcaggattgtgttgtgctagacacttctggtccaagatctgtaaacctgtcctgaaagaaggtcaagtgtgtaccaagcataggagaaaaggctctcatggactagaaatattccagcgttgttactgtggagaaggtctgtcttgccggatacagaaagatcaccatcaagccagtaattcttctaggcttcacacttgtcagagacactaaaccagctatccaaatgcagtgaactccttttatataatagatgctatgaaaaccttttatgaccttcatcaactcaatcctaaggatatacaagttctgtggtttcagttaagcattccaataacaccttccaaaaacctggagtgtaagagctttgtttctttatggaactcccctgtgattgcagtaaattactgtattgtaaattctcagtgtggcacttacctgtaaatgcaatgaaacttttaattatttttctaaaggtgctgcactgcctatttttcctcttgttatgtaaatttttgtacacattgattgttatcttgactgacaaatattctatattgaactgaagtaaatcatttcagcttatagttcttaaaagcataaccctttaccccatttaattctagagtctagaacgcaaggatctcttggaatgacaaatgataggtacctaaaatgtaacatgaaaatactagcttattttctgaaatgtactatcttaatgcttaaattatatttccctttaggctgtgatagtttttgaaataaaatttaacatttaatatcatgaaatgttataagtagacatacattttgggattgtgatcttagaggtttgtgtgtgtgtacgtatgtgtgtgttctacaagaacggaagtgtgatatgtttaaagatgatcagagaaaagacagtgtctaaatataagacaatattgatcagctctagaataactttaaagaaagacgtgttctgcattgataaactcaaatgatcatggcagaatgagagtgaatcttacattactactttcaaaaatagtttccaataaattaataataccta

SEQ ID NO: 8290 - DNA, 894 bp, Homo sapiens
  source 1..894: mol_type = unassigned DNA
gtcagactttgctcagccgatttcacgcaccttactcagactaaggtttacttctttcagaaaaagcagtgacaaacagacgacgtgctgagctgccagcttagtggaagctctgctctgggtggagagcagcctcgctttggtgacgcacagtgctgggaccctccaggagccccgggattgaaggatggtggcggccgtcctgctggggctgagctggctctgctctcccctgggagctctggtcctggacttcaacaacatcaggagctctgctgacctgcatggggcccggaagggctcacagtgcctgtctgacacggactgcaataccagaaagttctgcctccagccccgcgatgagaagccgttctgtgctacatgtcgtgggttgcggaggaggtgccagcgagatgccatgtgctgccctgggacactctgtgtgaacgatgtttgtactacgatggaagatgcaaccccaatattagaaaggcagcttgatgagcaagatggcacacatgcagaaggaacaactgggcacccagtccaggaaaaccaacccaaaaggaagccaagtattaagaaatcacaaggcaggaagggacaagagggagaaagttgtctgagaacttttgactgtggccctggactttgctgtgctcgtcatttttggacgaaaatttgtaagccagtccttttggagggacaggtctgctccagaagagggcataaagacactgctcaagctccagaaatcttccagcgttgcgactgtggccctggactactgtgtcgaagccaattgaccagcaatcggcagcatgctcgattaagagtatgccaaaaaatagaaaagctataaatatttcaaaataaagaagaatccacattgca

SEQ ID NO: 8291 - DNA, 999 bp, Homo sapiens
  source 1..999: mol_type = unassigned DNA
ctttgctcagccgatttcacgcaccttactcagactaaggtttacttctttcagaaaaagcagtgacaaacagacgacgtgctgagctgccagcttagtggaagctctgctctgggtggagagcagcctcgctttggtgacgcacagtgctgggaccctccaggagccccgggattgaaggatggtggcggccgtcctgctggggctgagctggctctgctctcccctgggagctctggtcctggacttcaacaacatcaggagctctgctgacctgcatggggcccggaagggctcacagtgcctgtctgacacggactgcaataccagaaagttctgcctccagccccgcgatgagaagccgttctgtgctacatgtcgtgggttgcggaggaggtgccagcgagatgccatgtgctgccctgggacactctgtgtgaacgatgtttgtactacgatggaagatgcaaccccaatattagaaaggcagcttgatgagcaagatggcacacatgcagaaggaacaactgggcacccagtccaggaaaaccaacccaaaaggaagccaagtattaagaaatcttccagcatgctcgattaagagtatgccaaaaaatagaaaagctataaatatttcaaaataaagaagaatccacattgcatttgagctcaatcttggacattaactttaaaatgcttccatacagatctctcttaaaatcaaatcttgtagcaagtgaaatagcctgaaactagagaactaagagatggcgaccttgtgatgaatgaaactagctttagccttttgtccgtttttccagaaaactgatgggactctgtaaccaaaaaaattatttctaatctagggactcaattaattcaaatctttaagaattgaagccaggcatggtggctcacgcctgtaatcccagcactttgggaggcagaggtgggtggatcacgaggtcaagagtttgagaccagactggccaacactgt

SEQ ID NO: 8292 - DNA, 1029 bp, Homo sapiens
  source 1..1029: mol_type = unassigned DNA
ccgggctcctgggtgaggccggcaagtttggagcgtggtcagacaataggggcgtggctacggctcgcggagcgcaaccaacgctctagaccagacctgggctcgagaccataactgtttggctttaacagtacgtgggcggccggaatccgggagtccggtgacccgggctgtggtctagcataaaggcggagcccagaagaaggggcggggtatgggagaagcctccccacctgcccccgcaaggcggcatctgctggtcctgctgctgctcctctctaccctggtgatcccctccgctgcagctcctatccatgatgctgacgcccaagagagctccttgggtctcacaggcctccagagcctactccaaggcttcagccgacttttcctgaaaggtaacctgcttcggggcatagacagcttattctctgcccccatggacttccggggcctccctgggaactaccacaaagaggagaaccaggagcaccagctggggaacaacaccctctccagccacctccagatcgacaagatgaccgacaacaagacaggagaggtgctgatctccgagaatgtggtggcatccattcaaccagcggaggggagcttcgagggtgatttgaaggtacccaggatggaggagaaggaggccctggtacccatccagaaggccacggacagcttccacacagaactccatccccgggtggccttctggatcattaagctgccacggcggaggtcccaccaggatgccctggagggcggccactggctcagcgagaagcgacaccgcctgcaggccatccgggatggactccgcaaggggacccacaaggacgtcctagaagaggggaccgagagctcctcccactccaggctgtccccccgaaagacccacttactgtacatcctcaggccctctcggcagctgtaggggtggggaccggggagcacctgcctgtagcccccatcagaccctgccccaagcaccatatggaaataaagttctttcttacatct

SEQ ID NO: 8293 - DNA, 664 bp, Homo sapiens
  source 1..664: mol_type = unassigned DNA
ccgggagtccggtgacccgggctgtggtctagcataaaggcggagcccagaagaaggggcggggtatgggagaagcctccccacctgcccccgcaaggcggcatctgctggtcctgctgctgctcctctctaccctggtgatcccctccgctgcagctcctatccatgatgctgacgcccaagagagctccttgggtctcacaggcctccagagcctactccaaggcttcagccgacttttcctgaaaggtaacctgcttcggggcatagacagcttattctctgcccccatggacttccggggcctccctgggaactaccacaaagaggagaaccaggagcaccagctggggaacaacaccctctccagccacctccagatcgacaaggtacccaggatggaggagaaggaggccctggtacccatccagaaggccacggacagcttccacacagaactccatccccgggtggccttctggatcattaagctgccacggcggaggtcccaccaggatgccctggagggcggccactggctcagcgagaagcgacaccgcctgcaggccatccgggatggactccgcaaggggacccacaaggacgtcctagaagaggggaccgagagctcctcccactccaggctgtccccccgaaagaccca

SEQ ID NO: 8294 - DNA, 2262 bp, Homo sapiens
  source 1..2262: mol_type = unassigned DNA
cagccatggccctgcgcaaggaactgctcaagtccatctggtacgcctttaccgcgctggacgtggagaagagtggcaaagtctccaagtcccagctcaaggtgctgtcccacaacctgtacacggtcctgcacatcccccatgaccccgtggccctggaggaacacttccgagatgatgatgacggccctgtgtccagccagggatacatgccctacctcaacaagtacatcctggacaaggtggaggagggggcttttgttaaagagcactttgatgagctgtgctggacgctgacggccaagaagaactatcgggcagatagcaacgggaacagtatgctctccaatcaggatgccttccgcctctggtgcctcttcaacttcctgtctgaggacaagtaccctctgatcatggttcctgatgaggtggaatacctgctgaaaaaggtactcagcagcatgagcttggaggtgagcttgggtgagctggaggagcttctggcccaggaggcccaggtggcccagaccaccggggggctcagcgtctggcagttcctggagctcttcaattcgggccgctgcctgcggggcgtgggccgggacaccctcagcatggccatccacgaggtctaccaggagctcatccaagatgtcctgaagcagggctacctgtggaagcgagggcacctgagaaggaactgggccgaacgctggttccagctgcagcccagctgcctctgctactttgggagtgaagagtgcaaagagaaaaggggcattatcccgctggatgcacactgctgcgtggaggtgctgccagaccgcgacggaaagcgctgcatgttctgtgtgaagacagccaaccgcacgtatgagatgagcgcctcagacacgcgccagcgccaggagtggacagctgccatccagatggcgatccggctgcaggccgaggggaagacgtccctacacaaggacctgaagcagaaacggcgcgagcagcgggagcagcgggagcggcgccgggcggccaaggaagaggagctgctgcggctgcagcagctgcaggaggagaaggagcggaagctgcaggagctggagctgctgcaggaggcgcagcggcaggccgagcggctgctgcaggaggaggaggaacggcgccgcagccagcaccgcgagctgcagcaggcgctcgagggccaactgcgcgaggcggagcaggcccgggcctccatgcaggctgagatggagctgaaggaggaggaggctgcccggcagcggcagcgcatcaaggagctggaggagatgcagcagcggttgcaggaggccctgcaactagaggtgaaagctcggcgagatgaagaatctgtgcgaatcgctcagaccagactgctggaagaggaggaagagaagctgaagcagttgatgcagctgaaggaggagcaggagcgctacatcgaacgggcgcagcaggagaaggaagagctgcagcaggagatggcacagcagagccgctccctgcagcaggcccagcagcagctggaggaggtgcggcagaaccggcagagggctgacgaggatgtggaggctgcccagagaaaactgcgccaggccagcaccaacgtgaaacactggaatgtccagatgaaccggctgatgcatccaattgagcctggagataagcgtccggtcaccagcagctccttctcaggcttccagccccctctgcttgcccaccgtgactcctccctaaagcgcctgacccgctggggatcccagggcaacaggaccccctcgcccaacagcaatgagcagcagaagtccctcaatggtggggatgaggctcctgccccggcttccacccctcaggaagataaactggatccagcaccagaaaattagcctctcttagccccttgttcttcccaatgtcatatccaccaggacctggccacagctggcctgtgggtgatcccagctcttactaggagagggagctgaggtcctggtgccaggggcccaggccctccaaccataaacagtccaggatggaacctggttcacccttcataccagctccaagccccagaccatgggagctgtctgggatgttgatccttgagaacttggccctgtgctttagacccaaggacccgattcttgggctaggaaagagagaacaagcaagccggggctacctgcccccaggtggccaccaagttgtggaagcacatttctaaataaaaactgctcttagaatgaa

SEQ ID NO: 8295 - DNA, 591 bp, Homo sapiens
  source 1..591: mol_type = unassigned DNA
agtgtcagagccgcccccagccgggcgggcgcctcagccatggccctgcgcaaggaactgctcaagtccatctggtacgcctttaccgcgctggacgtggagaagagtggcaaagtctccaagtcccagctcaaggtgctgtcccacaacctgtacacggtcctgcacatcccccatgaccccgtggccctggaggaacacttccgagatgatgatgacggccctgtgtccagccagggatacatgccctacctcaacaagtacatcctggacaaggatgccttccgcctctggtgcctcttcaacttcctgtctgaggacaagtaccctctgatcatggttcctgatgaggtggaatacctgctgaaaaaggtactcagcagcatgagcttggaggtgagcttgggtgagctggaggagcttctggcccaggaggcccaggtggcccagaccaccggggggctcagcgtctggcagttcctggagctcttcaattcgggccgctgcctgcggggcgtgggccgggacaccctcagcatggccatccacgaggtctaccaggagctcatccaagatgtcctgaagcagggt

SEQ ID NO: 8296 - DNA, 387 bp, Homo sapiens
  source 1..387: mol_type = unassigned DNA
ccgagatgatgatgacggccctgtgtccagccagggatacatgccctacctcaacaagtacatcctggacaaggatgccttccgcctctggtgcctcttcaacttcctgtctgaggacaagtaccctctgatcatggttcctgatgaggtggaatacctgctgaaaaaggtactcagcagcatgagcttggaggtgagcttgggtgagctggaggagcttctggcccaggaggcccaggtggcccagaccaccggggggctcagcgtctggcagttcctggagctcttcaattcgggccgctgcctgcggggcgtgggccgggacaccctcagcatggccatccacgaggtctaccaggagctcatccaagatgtcctgaagcaggg

SEQ ID NO: 8297 - DNA, 2006 bp, Homo sapiens
  source 1..2006: mol_type = unassigned DNA
agtgtcagagccgcccccagccgggcgggcgcctcagccatggccctgcgcaaggaactgctcaagtccatctggtacgcctttaccgcgctggacgtggagaagagtggcaaagtctccaagtcccagctcaaggtgctgtcccacaacctgtacacggtcctgcacatcccccatgaccccgtggccctggaggaacacttccgagatgatgatgacggccctgtgtccagccagggatacatgccctacctcaacaagtacatcctggacaaggtggaggagggggcttttgttaaagagcactttgatgagctgtgctggacgctgacggccaagaagaactatcgggcagatagcaacgggaacagtatgctctccaatcaggatgccttccgcctctggtgcctcttcaacttcctgtctgaggacaagtaccctctgatcatggttcctgatgagtagagacagcatttcaccgtgttggccaggctggtctcaaactcctgacctcagatgatctgcccacctcggcctcccaaagtgctgggattacaggtgctgccagaccgcgacggaaagcgctgcatgttctgtgtgaagacagccaaccgcacgtatgagatgagcgcctcagacacgcgccagcgccaggagtggacagctgccatccagatggcgatccggctgcaggccgaggggaagacgtccctacacaaggacctgaagcagaaacggcgcgagcagcgggagcagcgggagcggcgccgggcggccaaggaagaggagctgctgcggctgcagcagctgcaggaggagaaggagcggaagctgcaggagctggagctgctgcaggaggcgcagcggcaggccgagcggctgctgcaggaggaggaggaacggcgccgcagccagcaccgcgagctgcagcaggcgctcgagggccaactgcgcgaggcggagcaggcccgggcctccatgcaggctgagatggagctgaaggaggaggaggctgcccggcagcggcagcgcatcaaggagctggaggagatgcagcagcggttgcaggaggccctgcaactagaggtgaaagctcggcgagatgaagaatctgtgcgaatcgctcagaccagactgctggaagaggaggaagagaagctgaagcagttgatgcagctgaaggaggagcaggagcgctacatcgaacgggcgcagcaggagaaggaagagctgcagcaggagatggcacagcagagccgctccctgcagcaggcccagcagcagctggaggaggtgcggcagaaccggcagagggctgacgaggatgtggaggctgcccagagaaaactgcgccaggccagcaccaacgtgaaacactggaatgtccagatgaaccggctgatgcatccaattgagcctggagataagcgtccggtcaccagcagctccttctcaggcttccagccccctctgcttgcccaccgtgactcctccctaaagcgcctgacccgctggggatcccagggcaacaggaccccctcgcccaacagcaatgagcagcagaagtccctcaatggtggggatgaggctcctgccccggcttccacccctcaggaagataaactggatccagcaccagaaaattagcctctcttagccccttgttcttcccaatgtcatatccaccaggacctggccacagctggcctgtgggtgatcccagctcttactaggagagggagctgaggtcctggtgccaggggcccaggccctccaaccataaacagtccaggatggaacctggttcacccttcataccagctccaagccccagaccatgggagctgtctgggatgttgatccttgagaacttggccctgtgctttagacccaaggacccgattcttgggctaggaaagagagaacaagcaagccggggctacctgcccccaggtggccaccaagttgtggaagcacatttctaaataaaaactgctcttagaatg

SEQ ID NO: 8298 - DNA, 5286 bp, Homo sapiens
  source 1..5286: mol_type = unassigned DNA
atggcccagccggtccacagcctctgctccgcctttggcctccagtgctgcctcctcttccttctagcttcttggggggcaggtgctactacattccaagaatatcagaaaactggggaactctcaacatccgatcacatatttcccctcactccaggccttgtttatagtatcccttttgatcacattgttctgcattcaggacaaagacctccagagctccctaaatctacagaaatccatgagcaaaaacgccactgcaacaccacacgccattctaagccaactgacaagcctacaggcaactccaaaactatagaccacaaaagctctacagataatcatgaggctcctcccacttctgaagaaaactccagcaaccaagggaaagacccaatgatccggaaccagcgctctgttgatcctgctgactccactaccacacataaagaatccgctggaaaaaaacatataacgccagcacccaagagcaaaataaactgtcgtaagtccacaacaggcaaatcaacggtaacaagaaaatcagataaaactggaagacctttggaaaagtccatgagtactttggataagacaagtaccagctcacataagactacaacttccttccacaactcaggcaattcacagaccaagcaaaaaagcacatcttttccagaaaaaatcacagcagcctcaaaaacaacatacaagaccacaggaaccccagaagagtcagaaaaaactgaagattccagaacaacagttgcctcagacaagctcctgacaaaaactacaaaaaacatacaagagaccatatcagccaatgagctcacacaatctctagcagagcctacagaacatggaggaaggacagccaatgagaacaacacaccatccccagcagagcctacagaaaatagagaaaggacagccaatgagaacaccacactatccccagcagagcctatagaaaatagagaaaggacagccaatgagaacaccgcaccattcccagcagggcctacagaaaatagagaaatgacagccaatgagaataccacactattcccagcagagcctacagaacatggagaaaggacagccaatgagaacaccacaccatccccagcagagcctacagaacatggagaaaggacagccaatgagaacactacaccatccccagcagagcctacagaacatggagaaaggaccccatttgccaatgacaaaaccacatcatcctcagcagagtctacagaacatggagaaaggaccccactggccaacgagaacaccacaccatccccagcagagcctacagaaaatagagaaaggacagccaatgagaacaccacaccatccccagcagggcctacagaaaacagagaaacgacagccaacgagaagaccacactatccccagtagagcctacagaaaatagagaaacaacagccaatgagaagaccacaccatccccagcagagcctacagaaaatggacaaaggaccccatttgccaatgagaaaaccacatcatcctcagcagagcctacagaacacggagaaaggaccccactggccaatgagaacaccacaccatccccagcagagcctacagaaaatagagaaaggacagccaatgagaagaccacaccatccccagcagagcctacagaaaatggagacaggactcctttggccaatgagaagaccacgccatctctagcagagcctacagaaaatggacaaaggaccccatttgccaatgagaagaccacatcatcctcagcagagcctacagaacacgaagaaaggactccactggccaatgagaacaccacaccatccccggcagagcctacagaaaatagagaaaggacagccaatgagaacaccacaccatccccagcagggcctacagaaaatagagaaatgacagccaacgagaagaccacactattcccagcagagcctacagaaaatagagaaaggacagccaatgagaagaccacatcatccccagcagagcctacagaaaatggacaaaggaccccatttgccaatgagaaaaccacatcatcctcagcagagcctacagaacacggagaaaggaccccactggccaatgagaacaccacactatccccagcagagcctacagaaaatagagaaaggacagccaatgagaagaccacaccattcccagcagagcctacagaaaatagagaaaggacagccaatgagaacaccacaccatccccagcacagcctacagaaaatggagacaggactccattggccaatgagaagaccacaccatctctagcagagcctacagaaaatggaaaaaggaccccatttgccaatgagaagaccacatcatcctcagcagagcctacagaacacgcagaaaggactccactggccaatgagaacaccacatcatccccagcagagcctacagaaaatagagaaaggacagccaatgagaagaccacacaattcccagcagagcctacagaaaatagagaaagcacagccaatgagaagaccacaccattcccagcagagcctacagaaaatagagaatggacagccaatgagaacaccacactatccccagcagagcctacagaacatgaagaaatgaccccattggccaatgagaagaccacactatccccagcagagcctacagaaaatggagaaaggaccccatttaccaatgagaagaccacaccatcctcagcagagcctacagaacatggagaaaggaccccactggccaatgagatcaccacaccatcccgagcagagcctacagaacatggagaaaggatagccaatgagaaggccacaccatccccagcaaagcctacagaacatggagaaacgacagtcaatgaggacaccacaccatcctcagcagagcctacagaaaatggagaaaggaccccactggccaatgagaacaccacaacatccccaacagagtctacagaacatggagaaaggacagccaatgagaagaccacaccatccccagcagagcctacagaacatggagaaaggacaccatcagccaatgagaagaccataccatctccagcaaagcctacagaacacgaagaaatgaccccatcggccaatgagaacaccacaccatccccagtaaagcctacagaacatggagaaaagactacattggccaatgagaagatcacactatccccagaagggcctacagaacatggagcaaaaactacgtcggccaatgagaagatcacaccatccctagcaaagcctacagaacatggagaaaggaccacatcacccaatgacaagatcacctcatctgcagcagagtctacagaacatagagatagggctacatcagccaatgtgatcacaccagccccagcagagcctataaaacatgcaaaaaggaccacattggcccatgagaagatgacacaagtcacagaaaagtccacagaacacccagaaaagaccacgtcaaccacagagaaaaccacaagaaccccagaaaagcctacgctatactcagagaagaccatatgcaccaaagggaaaaacacaccagtcccagaaaagcctacagaaaacctggggaacaccacactgaccactgagaccataaaagccccagtaaagtccacagaaaacccagaaaaaacagcagcagtcacaaagactataaaaccttcagtcaaggtcacaggagacaaatctctcactactacctcttctcatctaaataaaactgaagttactcatcaggtgcccactggttctttcaccctcattacatctagaacgaagctgagttctatcacatcagaagccacaggaaacgagagccatccatacctcaataaagatggctcacagaaaggtatccacgctggacagatgggagagaatgattcattccctgcatgggccatagttattgtggtcctggtggctgtgattctcctcctggtgttccttggcctgatcttcttggtctcctatatgatgcggacacgccgcacactaacccagaacacccagtacaatgatgcagaggatgagggtggccccaattcctacccggtctacctgatggagcagcagaatcttggcatgggccagatcccttccccacggtgatcttggagtaggcgcccagccctggctcttccatgctctgcccctttcctggatgaggaaccggactcacaatttctatttccgggactacaggaagggcagagaatactgacggttaccagtattaacccttcatctgttcttgaaactggttggggaatgaggtgataagcaaggagggtgtaagtttaggggacaaagaagaaagaatgaataatacgagcagacattctctgtagaaggtaatggtctgagaatgaaaaggtgtttgatggacatgttgtgggggcaccaatgcagaacactgcactgagtcctaaaggaaggacaggagccttataggcaatgccccagactgacttgtgagtggggtttatggggaaagggagggactgagggcagagtctctgggtttcaggacagcattatgttatttccattcactattacttaagagtttgtgtgtaaacaggctcatctctgagttctcaggacccttgcccccacccccatttttttaatgaaaaaaaaaaacaaaaaaaacggatccaagaagaaaagagaatttatttccttctccactctctccatgccctggagaaaaaaaagtccagaagaaatcataaatatctctcatctacatggttgcttcctcttcctcccaaatcccttagttttcctaaatgtctacagtggacgccctgttggtttggcttgctgggttgtgggtggacacgcaaggaggggatttttatttggccagcagtctcacccactgatctccaccccagaccttccctgattggtgtctcagcatttattttcctgtctcttccaccaaaagccagctgtagctttatctcgtaaaagttacccatcttctctactgtccccattctctctcctcccaccttcaccccagattcaagttttcctccttgtaggcatttcatctgtgtgtgttttctggattttctctctctcttcttatggccatttcaccttattactgattgggtagagggggaaaaggagaatgatgatgatagtttccttctgtctattgaccttttttataataaagtataacatgtttataaaggg

SEQ ID NO: 8299 - DNA, 2627 bp, Homo sapiens
  source 1..2627: mol_type = unassigned DNA
ccattggccaatgagaagaccacactatccccagcagagcctacagaaaatggagaaaggaccccatttaccaatgagaagaccacaccatcctcagcagagcctacagaacatggagaaaggaccccactggccaatgagatcaccacaccatcccgagcagagcctacagaacatggagaaaggatagccaatgagaaggccacaccatccccagcaaagcctacagaacatggagaaacgacagtcaatgaggacaccacaccatcctcagcagagcctacagaaaatggagaaaggaccccactggccaatgagaacaccacaacatccccaacagagtctacagaacatggagaaaggacagccaatgagaagaccacaccatccccagcagagcctacagaacatggagaaaggacaccatcagccaatgagaagaccataccatctccagcaaagcctacagaacacgaagaaatgaccccatcggccaatgagaacaccacaccatccccagtaaagcctacagaacatggagaaaagactacattggccaatgagaagatcacactatccccagaagggcctacagaacatggagcaaaaactacgtcggccaatgagaagatcacaccatccctagcaaagcctacagaacatggagaaaggaccacatcacccaatgacaagatcacctcatctgcagcagagtctacagaacatagagatagggctacatcagccaatgtgatcacaccagccccagcagagcctataaaacatgcaaaaaggaccacactggcccatgagaagatgacacaagtcacagaaaagtccacagaacacccagaaaagaccacgtcaaccacagagaaaaccacaagaaccccagaaaagcctacgctatactcagagaagaccatatgcaccaaagggaaaaacacaccagtcccagaaaagcctacagaaaacctggggaacaccacactgaccactgagaccataaaagccccagtaaagtccacagaaaacccagaaaaaacagcagcagtcacaaagactataaaaccttcagtcaaggtcacaggagacaaatctctcactactacctcttctcatctaaataaaactgaagttactcatcaggtgcccactggttctttcaccctcattacatctagaacgaagctgagttctatcacatcagaagccacaggaaacgagagccatccatacctcaataaagatggctcacagaaaggtatccacgctggacagatgggagagaatgattcattccctgcatgggccatagttattgtggtcctggtggctgtgattctcctcctggtgttccttggcctgatcttcttggtctcctatatgatgcggacacgccgcacactaacccagaacacccagtacaatgatgcagaggatgagggtggccccaattcctacccggtctacctgatggagcagcagaatcttggcatgggccagatcccttccccacggtgatcttggagtaggcgcccagccctggctcttccatgctctgcccctttcctggatgaggaaccggactcacaatttctatttccgggactacaggaagggcagagaatactgacggttaccagtattaacccttcatctgttcttgaaactggttggggaatgaggtgataagcaaggagggtgtaagtttaggggacaaagaagaaagaatgaataatacgagcagacattctctgtagaaggtaatggtctgagaatgaaaaggtgtttgatggacatgttgtgggggcaccaatgcagaacactgcactgagtcctaaaggaaggacaggagccttataggcaatgccccagactgacttgtgagtggggtttatggggaaagggagggactgagggcagagtctctgggtttcaggacagcattatgttatttccattcactattacttaagagtttgtgtgtaaacaggctcatctctgagttctcaggacccttgcccccacccccatttttttaatgaaaaaaaaaacaaaaaaaacggatccaagaagaaaagagaatttatttccttctccactctctccatgccctggagaaaaaaaagtccagaagaaatcataaatatctctcatctacatggttgcttcctcttcctcccaaatcccttagttttcctaaatgtctacagtggacgccctgttggtttggcttgctgggttgtgggtggacacgcaaggaggggatttttatttggccagcagtctcacccactgatctccaccccagaccttccctgattggtgtctcagcatttattttcctgtctcttccaccaaaagccagctgtagctttatctcgtaaaagttacccatcttctctactgtccccattctctctcctcccaccttcaccccagattcaagttttcctccttgtaggcatttcatctgtgtgtgttttctggattttctctctctcttcttatggccatttcaccttattactgattgggtagagggggaaaaggagaatgatgatgatagtttccttctgtctattgaccttttttataataaagtataacatgtttataaaggg

SEQ ID NO: 8300 - DNA, 2627 bp, Homo sapiens
  source 1..2627: mol_type = unassigned DNA
ccattggccaatgagaagaccacactatccccagcagagcctacagaaaatggagaaaggaccccatttaccaatgagaagaccacaccatcctcagcagagcctacagaacatggagaaaggaccccactggccaatgagatcaccacaccatcccgagcagagcctacagaacatggagaaaggatagccaatgagaaggccacaccatccccagcaaagcctacagaacatggagaaacgacagtcaatgaggacaccacaccatcctcagcagagcctacagaaaatggagaaaggaccccactggccaatgagaacaccacaacatccccaacagagtctacagaacatggagaaaggacagccaatgagaagaccacaccatccccagcagagcctacagaacatggagaaaggacaccatcagccaatgagaagaccataccatctccagcaaagcctacagaacacgaagaaatgaccccatcagccaatgagaacaccacaccatccccagtaaagcctacagaacatggagaaaagactacattggccaatgagaagatcacactatccccagaagggcctacagaacatggagcaaaaactacgtcggccaatgagaagatcacaccatccctagcaaagcctacagaacatggagaaaggaccacatcacccaatgacaagatcacctcatctgcagcagagtctacagaacatagagatagggctacatcagccaatgtgatcacaccagccccagcagagcctataaaacatgcaaaaaggaccacattggcccatgagaagatgacacaagtcacagaaaagtccacagaacacccagaaaagaccacgtcaaccacagagaaaaccacaagaaccccagaaaagcctacgctatactcagagaagaccatatgcaccaaagggaaaaacacaccagtcccagaaaagcctacagaaaacctggggaacaccacactgaccactgagaccataaaagccccagtaaagtccacagaaaacccagaaaaaacagcagcagtcacaaagactataaaaccttcagtcaaggtcacaggagacaaatctctcactactacctcttctcatctaaataaaactgaagttactcatcaggtgcccactggttctttcaccctcattacatctagaacgaagctgagttctatcacatcagaagccacaggaaacaagagccatccatacctcaataaagatggctcacagaaaggtatccacgctggacagatgggagagaatgattcattccctgcatgggccatagttattgtggtcctggtggctgtgattctcctcctggtgttccttggcctgatcttcttggtctcctatatgatgcggacacgccgcacactaacccagaacacccagtacaatgatgcagaggatgagggtggccccaattcctacccggtctacctgatggagcagcagaatcttggcatgggccagatcccttccccacggtgatcttggagtaggcgcccagccctggctcttccatgctctgcccctttcctggatgaggaaccggactcacaatttctatttccgggactacaggaagggcagagaatactgacggttaccagtattaacccttcatctgttcttgaaactggttggggaatgaggtgataagcaaggagggtgtaagtttaggggacaaagaagaaagaatgaataatacgagcagacattctctgtagaaggtaatggtctgagaatgaaaaggtgtttgatggacatgttgtgggggcaccaatgcagaacactgcactgagtcctaaaggaaggacaggagccttataggcaatgccccagactgacttgtgagtggggtttatggggaaagggagggactgagggcagagtctctgggtttcaggacagcattatgttatttccattcactattacttaagagtttgtgtgtaaacaggctcatctctgagttctcaggacccttgcccccacccccatttttttaatgaaaaaaaaaacaaaaaaaacggatccaagaagaaaagagaatttatttccttctccactctctccatgccctggagaaaaaaaagtccagaagaaatcataaatatctctcatctacatggttgcttcctcttcctcccaaatcccttagttttcctaaatgtctacagtggacgccctgttggtttggcttgctgggttgtgggtggacacgcaaggaggggatttttatttggccagcagtctcacccactgatctccaccccagaccttccctgattggtgtctcagcatttattttcctgtctcttccaccaaaagccagctgtagctttatctcgtaaaagttacccatcttctctactgtccccattctctctcctcccaccttcaccccagattcaagttttcctccttgtaggcatttcatctgtgtgtgttttctggattttctctctctcttcttatggccatttcaccttattactgattgggtagagggggaaaaggagaatgatgatgatagtttccttctgtctattgaccttttttataataaagtataacatgtttataaaggg

SEQ ID NO: 8301 - DNA, 2627 bp, Homo sapiens
  source 1..2627: mol_type = unassigned DNA
ccattggccaatgagaagaccacactatccccagcagagcctacagaaaatggagaaaggaccccatttaccaatgagaagaccacaccatcctcagcagagcctacagaacatggagaaaggaccccactggccaatgagatcaccacaccatcccgagcagagcctacagaacatggagaaaggatagccaatgagaaggccacaccatccccagcaaagcctacagaacatggagaaacgacagtcaatgaggacaccacaccatcctcagcagagcctacagaaaatggagaaaggaccccactggccaatgagaacaccacaacatccccaacagagtctacagaacatggagaaaggacagccaatgagaagaccacaccatccccagcagagcctacagaacatggagaaaggacaccatcagccaatgagaagaccataccatctccagcaaagcctacagaacacgaagaaatgaccccatcggccaatgagaacaccacaccatccccagtaaagcctacagaacatggagaaaagactacattggccaatgagaagatcacactatccccagaagggcctacagaacatggagcaaaaactacgtcggccaatgagaagatcacaccatccctagcaaagcctacagaacatggagaaaggaccacatcacccaatgacaagatcacctcatctgcagcagagtctacagaacatagagatagggctacatcagccaatgtgatcacaccagccccagcagagcctataaaacatgcaaaaaggaccacattggcccatgagaagatgacacaagtcacagaaaagtccacagaacacccagaaaagaccacgtcaaccacagagaaaaccacaagaaccccagaaaagcctacgctatactcagagaagaccatatgcaccaaagggaaaaacacaccagtcccagaaaagcctacagaaaacctggggaacaccacactgaccactgagaccataaaagccccagtaaagtccacagaaaacccagaaaaaacagcagcagtcacaaagactataaaaccttcagtcaaggtcacaggagacaaatctctcactactacctcttctcatctaaataaaactgaagttactcatcaggtgcccactggttctttcaccctcattacatctagaacgaagctgagttctatcacatcagaagccacaggaaacgagagccatccatacctcaataaagatggctcacagaaaggtatccacgctggacagatgggagagaatgattcattccctgcatgggccatagttattgtggtcctggtggctgtgattctcctcctggtgttccttggcctgatcttcttggtctcctatatgatgcggacacgccgcacactaacccagaacacccagtacaatgatgcagaggatgagggtggccccaattcctacccggtctacctgatggagcagcagaatcttggcatgggccagatcccttccccacggtgatcttggagtaggcgcccagccctggctcttccatgctctgcccctttcctggatgaggaaccagactcacaatttctatttccgggactacaggaagggcagagaatactgacggttaccagtattaacccttcatctgttcttgaaactggttggggaatgaggtgataagcaaggagggtgtaagtttaggggacaaagaagaaagaatgaataatacgagcagacattctctgtagaaggtaatggtctgagaatgaaaaggtgtttgatggacatgttgtgggggcaccaatgcagaacactgcactgagtcctaaaggaaggacaggagccttataggcaatgccccagactgacttgtgagtggggtttatggggaaagggagggactgagggcagagtctctgggtttcaggacagcattatgttatttccattcactattacttaagagtttgtgtgtaaataggctcatctctgagttctcaggacccttgcccccacccccatttttttaatgaaaaaaaaaacaaaaaaaacggatccaagaagaaaagagaatttatttccttctccactctctccatgccctggagaaaaaaaagtccagaagaaatcataaatatctctcatctacatggttgcttcctcttcctcccaaatcccttagttttcctaaatgtctacagtggacgccctgttggtttggcttgctgggttgtgggtggacacgcaaggaggggatttttatttggccagcagtctcacccactgatctccaccccagaccttccctgattggtgtctcagcatttattttcctgtctcttccaccaaaagccagctgtagctttatctcgtaaaagttacccatcttctctactgtccccattctctctcctcccaccttcaccccagattcaagttttcctccttgtaggcatttcatctgtgtgtgttttctggattttctctctctcttcctatggccatttcaccttattactgattgggtagagggggaaaaggagaatgatgatgatagtttccttctgtctattgaccttttttataataaagtataacatgtttataaaggg

SEQ ID NO: 8302 - DNA, 2658 bp, Homo sapiens
  source 1..2658: mol_type = unassigned DNA
atggcccagccggtccacagcctctgctccgcctttggcctccagtgctgcctcctcttccttctagcttcttggggggcaggtgctactacattccaagaatatcagaaaactggggaactctcaacatccgatcacatatttcccctcactccaggccttgtttatagtatcccttttgatcacattgttctgcattcaggacaaagacctccagagctccctaaatctacagaaatccatgagcaaaaacgccactgcaacaccacacgccattctaagccaactgacaagcctacaggcaactccaaaactatagaccacaaaagctctacagataatcatgaggctcctcccacttctgaagaaaactccagcaaccaagggaaagacccaatgatccggaaccagcgctctgttgatcctgctgactccactaccacacataaagaatccgctggaaaaaaacatataacgccagcacccaagagcaaaataaactgtcgtaagtccacaacaggcaaatcaacggtaacaagaaaatcagataaaactggaagacctttggaaaagtccatgagtactttggataagacaagtaccagctcacataagactacaacttccttccacaactcaggcaattcacagaccaagcaaaaaagcacatcttttccagaaaaaatcacagcagcctcaaaaacaacatacaagaccacaggaaccccagaagagtcagaaaaaactgaagattccagaacaacagttgcctcagacaagctcctgacaaaaactacaaaaaacatacaagagaccatatcagccaatgagctcacacaatctctagcagagcctacagaacatggaggaaggacagccaatgagaacaacacaccatccccagcagagcctacagaaaatagagaaaggacagccaatgagaacaagaagaccatatgcaccaaagggaaaaacacaccagtcccagaaaagcctacagaaaacctggggaacaccacactgaccactgagaccataaaagccccagtaaagtccacagaaaacccagaaaaaacagcagcagtcacaaagactataaaaccttcagtcaaggtcacaggagacaaatctctcactactacctcttctcatctaaataaaactgaagttactcatcaggtgcccactggttctttcaccctcattacatctagaacgaagctgagttctatcacatcagaagccacaggaaacgagagccatccatacctcaataaagatggctcacagaaaggtatccacgctggacagatgggagagaatgattcattccctgcatgggccatagttattgtggtcctggtggctgtgattctcctcctggtgttccttggcctgatcttcttggtctcctatatgatgcggacacgccgcacactaacccagaacacccagtacaatgatgcagaggatgagggtggccccaattcctacccggtctacctgatggagcagcagaatcttggcatgggccagatcccttccccacggtgatcttggagtaggcgcccagccctggctcttccatgctctgcccctttcctggatgaggaaccggactcacaatttctatttccgggactacaggaagggcagagaatactgacggttaccagtattaacccttcatctgttcttgaaactggttggggaatgaggtgataagcaaggagggtgtaagtttaggggacaaagaagaaagaatgaataatacgagcagacattctctgtagaaggtaatggtctgagaatgaaaaggtgtttgatggacatgttgtgggggcaccaatgcagaacactgcactgagtcctaaaggaaggacaggagccttataggcaatgccccagactgacttgtgagtggggtttatggggaaagggagggactgagggcagagtctctgggtttcaggacagcattatgttatttccattcactattacttaagagtttgtgtgtaaacaggctcatctctgagttctcaggacccttgcccccacccccatttttttaatgaaaaaaaaaaacaaaaaaaacggatccaagaagaaaagagaatttatttccttctccactctctccatgccctggagaaaaaaaagtccagaagaaatcataaatatctctcatctacatggttgcttcctcttcctcccaaatcccttagttttcctaaatgtctacagtggacgccctgttggtttggcttgctgggttgtgggtggacacgcaaggaggggatttttatttggccagcagtctcacccactgatctccaccccagaccttccctgattggtgtctcagcatttattttcctgtctcttccaccaaaagccagctgtagctttatctcgtaaaagttacccatcttctctactgtccccattctctctcctcccaccttcaccccagattcaagttttcctccttgtaggcatttcatctgtgtgtgttttctggattttctctctctcttcttatggccatttcaccttattactgattgggtagagggggaaaaggagaatgatgatgatagtttccttctgtctattgaccttttttataataaagtataacatgtttataaaggg

SEQ ID NO: 8303 - DNA, 1689 bp, Homo sapiens
  source 1..1689: mol_type = unassigned DNA
atggcccagccggtccacagcctctgctccgcctttggcctccagtgctgcctcctcttccttctagcttcttggggggcaggtgctactacattccaagaatatcagaaaactggggaactctcaacatccgatcacatatttcccctcactccaggccttgtttatagtatcccttttgatcacattgttctgcattcaggacaaagacctccagagctccctaaatctacagaaatccatgagcaaaaacgccactgcaacaccacacgccattctaagccaactgacaagcctacaggcaactccaaaactatagaccacaaaagctctacagataatcatgaggctcctcccacttctgaagaaaactccagcaaccaagggaaagacccaatgatccggaaccagcgctctgttgatcctgctgactccactaccacacataaagaatccgctggaaaaaaacatataacgccagcacccaagagcaaaataaactgtcgtaagtccacaacaggcaaatcaacggtaacaagaaaatcagataaaactggaagacctttggaaaagtccatgagtactttggataagacaagtaccagctcacataagactacaacttccttccacaactcaggcaattcacagaccaagcaaaaaagcacatcttttccagaaaaaatcacagcagcctcaaaaacaacatacaagaccacaggaaccccagaagagtcagaaaaaactgaagattccagaacaacagttgcctcagacaagctcctgacaaaaactacaaaaaacatacaagagaccatatcagccaatgagctcacacaatctctagcagagcctacagaacatggaggaaggacagccaatgagaacaacacaccatccccagcagagcctacagaaaatagagaaaggacagccaatgagaacaagaagaccatatgcaccaaagggaaaaacacaccagtcccagaaaagcctacagaaaacctggggaacaccacactgaccactgagaccataaaagccccagtaaagtccacagaaaacccagaaaaaacagcagcagtcacaaagactataaaaccttcagtcaaggtcacaggagacaaatctctcactactacctcttctcatctaaataaaactgaagttactcatcaggtgcccactggttctttcaccctcattacatctagaacgaagctgagttctatcacatcagaagccacaggaaacgagagccatccatacctcaataaagatggctcacagaaaggtatccacgctggacagatgggagagaatgattcattccctgcatgggccatagttattgtggtcctggtggctgtgattctcctcctggtgttccttggcctgatcttcttggtctcctatatgatgcggacacgccgcacactaacccagaacacccagtacaatgatgcagaggatgagggtggccccaattcctacccggtctacctgatggagcagcagaatcttggcatgggccagatcccttccccacggtgatcttggagtaggcgcccagccctggctcttccatgctctgcccctttcctggatgaggaaccagactcacaatttctatttccgggactacaggaagggcagagaatactgacggttaccagtattaacccttca

SEQ ID NO: 8304 - DNA, 1689 bp, Homo sapiens
  source 1..1689: mol_type = unassigned DNA
atggcccagccggtccacagcctctgctccgcctttggcctccagtgctgcctcctcttccttctagcttcttggggggcaggtgctactacattccaagaatatcagaaaactggggaactctcaacatccgatcacatatttcccctcactccaggccttgtttatagtatcccttttgatcacattgttctgcattcaggacaaagacctccagagctccctaaatctacagaaatccatgagcaaaaacgccactgcaacaccacacgccattctaagccaactgacaagcctacaggcaactccaaaactatagaccacaaaagctctacagataatcatgaggctcctcccacttctgaagaaaactccagcaaccaagggaaagacccaatgatccggaaccagcgctctgttgatcctgctgactccactaccacacataaagaatccgctggaaaaaaacatataacaccagcacccaagagcaaaataaactgtcgtaagtccacaacaggcaaatcaacggtaacaagaaaatcagataaaactggaagacctttggaaaagtccatgagtactttggataagacaagtaccagctcacataagactacaacttccttccacaactcaggcaattcacagaccaagcaaaaaagcacatcttttccagaaaaaatcacagcagcctcaaaaacaacatacaagaccacaggaaccccagaagagtcagaaaaaactgaagattccagaacaacagttgcctcagacaagctcctgacaaaaactacaaaaaacatacaagagaccatatcagccaatgagctcacacaatctctagcagagcctacagaacatggaggaaggacagccaatgagaacaacacaccatccccagcagagcctacagaaaatagagaaaggacagccaatgagaacaagaagaccatatgcaccaaagggaaaaacacaccagtcccagaaaagcctacagaaaacctggggaacaccacactgaccactgagaccataaaagccccagtaaagtccacagaaaacccagaaaaaacagcagcagtcacaaagactataaaaccttcagtcaaggtcacaggagacaaatctctcactactacctcttctcatctaaataaaactgaagttactcatcaggtgcccactggttctttcaccctcattacatctagaacgaagctgagttctatcacatcagaagccacaggaaacgagagccatccatacctcaataaagatggctcacagaaaggtatccacgctggacagatgggagagaatgattcattccctgcatgggccatagttattgtggtcctggtggctgtgattctcctcctggtgttccttggcctgatcttcttggtctcctatatgatgcggacacgccgcacactaacccagaacacccagtacaatgatgcagaggatgagggtggccccaattcctacccggtctacctgatggagcagcagaatcttggcatgggccagatcccttccccacggtgatcttggagtaggcgcccagccctggctcttccatgctctgcccctttcctggatgaggaaccggactcacaatttctatttccgggactacaggaagggcagagaatactgacggttaccagtattaacccttca

SEQ ID NO: 8305 - DNA, 4317 bp, Homo sapiens
  source 1..4317: mol_type = unassigned DNA
atggcccagccggtccacagcctctgctccgcctttggcctccagtgctgcctcctcttccttctagcttcttggggggcaggtgctactacattccaagaatatcagaaaactggggaactctcaacatccgatcacatatttcccctcactccaggccttgtttatagtatcccttttgatcacattgttctgcattcaggacaaagacctccagagctccctaaatctacagaaatccatgagcaaaaacgccactgcaacaccacacgccattctaagccaactgacaagcctacaggcaactccaaaactatagaccacaaaagctctacagataatcatgaggctcctcccacttctgaagaaaactccagcaaccaagggaaagacccaatgatccggaaccagcgctctgttgatcctgctgactccactaccacacataaagaatccgctggaaaaaaacatataacgccagcacccaagagcaaaataaactgtcgtaagtccacaacaggcaaatcaacggtaacaagaaaatcagataaaactggaagacctttggaaaagtccatgagtactttggataagacaagtaccagctcacataagactacaacttccttccacaactcaggcaattcacagaccaagcaaaaaagcacatcttttccagaaaaaatcacagcagcctcaaaaacaacatacaagaccacaggaaccccagaagagtcagaaaaaactgaagattccagaacaacagttgcctcagacaagctcctgacaaaaactacaaaaaacatacaagagaccatatcagccaatgagctcacacaatctctagcagagcctacagaacatggaggaaggacagccaatgagaacaacacaccatccccagcagagcctacagaaaatagagaaaggacagccaatgagaacaccacactatccccagcagagcctacagaaaatagagaaaggacagccaatgagaacaccgcaccattcccagcagggcctacagaaaatagagaaatgacagccaatgagaataccacactattcccagcagagcctacagaacatggagaaaggacagccaatgagaacaccacaccatccccagcagagcctacagaacatggagaaaggacagccaatgagaacactacaccatccccagcagagcctacagaacatggagaaaggaccccatttgccaatgacaaaaccacatcatcctcagcagagtctacagaacatggagaaaggaccccactggccaacgagaacaccacaccatccccagcagagcctacagaaaatagagaaaggacagccaatgagaacaccacaccatccccagcagggcctacagaaaacagagaaacgacagccaacgagaagaccacactatccccagtagagcctacagaaaatagagaaacaacagccaatgagaagaccacaccatccccagcagagcctacagaaaatggacaaaggaccccatttgccaatgagaaaaccacatcatcctcagcagagcctacagaacacggagaaaggaccccactggccaatgagaacaccacaccatccccagcagagcctacagaaaatagagaaaggacagccaatgagaagaccacaccatccccagcagagcctacagaaaatggagacaggactcctttggccaatgagaagaccacgccatctctagcagagcctacagaaaatggacaaaggaccccatttgccaatgagaagaccacatcatcctcagcagagcctacagaacacgaagaaaggactccactggccaatgagaacaccacaccatccccggcagagcctacagaaaatagagaaaggacagccaatgagaacaccacaccatccccagcagggcctacagaaaatagagaaatgacagccaacgagaagaccacactattcccagcagagcctacagaaaatagagaaaggacagccaatgagaagaccacatcatccccagcagagcctacagaaaatggacaaaggaccccatttgccaatgagaaaaccacatcatcctcagcagagcctacagaacacggagaaaggaccccactggccaatgagaacaccacactatccccagcagagcctacagaaaatagagaaaggacagccaatgagaagaccacaccattcccagcagagcctacagaaaatagagaaaggacagccaatgagaacaccacaccatccccagcacagcctacagaaaatggagacaggactccattggccaatgagaagaccacaccatctctagcagagcctacagaaaatggaaaaaggaccccatttgccaatgagaagaccacatcatcctcagcagagcctacagaacacgcagaaaggactccactggccaatgagaacaccacatcatccccagcagagcctacagaaaatagagaaaggacagccaatgagaagaccacacaattcccagcagagcctacagaaaatagagaaagcacagccaatgagaagaccacaccattcccagcagagcctacagaaaatagagaatggacagccaatgagaacaccacactatccccagcagagcctacagaacatgaagaaatgaccccattggccaatgagaagaccacactatccccagcagagcctacagaaaatggagaaaggaccccatttaccaatgagaagaccacaccatcctcagcagagcctacagaacatggagaaaggaccccactggccaatgagatcaccacaccatcccgagcagagcctacagaacatggagaaaggatagccaatgagaaggccacaccatccccagcaaagcctacagaacatggagaaacgacagtcaatgaggacaccacaccatcctcagcagagcctacagaaaatggagaaaggaccccactggccaatgagaacaccacaacatccccaacagagtctacagaacatggagaaaggacagccaatgagaagaccacaccatccccagcagagcctacagaacatggagaaaggacaccatcagccaatgagaagaccataccatctccagcaaagcctacagaacacgaagaaatgaccccatcggccaatgagaacaccacaccatccccagtaaagcctacagaacatggagaaaagactacattggccaatgagaagatcacactatccccagaagggcctacagaacatggagcaaaaactacgtcggccaatgagaagatcacaccatccctagcaaagcctacagaacatggagaaaggaccacatcacccaatgacaagatcacctcatctgcagcagagtctacagaacatagagatagggctacatcagccaatgtgatcacaccagccccagcagagcctataaaacatgcaaaaaggaccacattggcccatgagaagatgacacaagtcacagaaaagtccacagaacacccagaaaagaccacgtcaaccacagagaaaaccacaagaaccccagaaaagcctacgctatactcagagaagaccatatgcaccaaagggaaaaacacaccagtcccagaaaagcctacagaaaacctggggaacaccacactgaccactgagaccataaaagccccagtaaagtccacagaaaacccagaaaaaacagcagcagtcacaaagactataaaaccttcagtcaaggtcacaggagacaaatctctcactactacctcttctcatctaaataaaactgaagttactcatcaggtgcccactggttctttcaccctcattacatctagaacgaagctgagttctatcacatcagaagccacaggaaacgagagccatccatacctcaataaagatggctcacagaaaggtatccacgctggacagatgggagagaatgattcattccctgcatgggccatagttattgtggtcctggtggctgtgattctcctcctggtgttccttggcctgatcttcttggtctcctatatgatgcggacacgccgcacactaacccagaacacccagtacaatgatgcagaggatgagggtggccccaattcctacccggtctacctgatggagcagcagaatcttggcatgggccagatcccttccccacggtgatcttggagtaggcgcccagccctggctcttccatgctctgcccctttcctggatgaggaaccagactcacaatttctatttccgggactacaggaagggcagagaatactgacggttaccagtattaacccttca

SEQ ID NO: 8306 - DNA, 2695 bp, Homo sapiens
  source 1..2695: mol_type = unassigned DNA
ggtccccaagcagccacccagctccgacatggcccagccggtccacagcctctgctccgcctttggcctccagtgctgcctcctcttccttctagcttcttggggggcaggtgctactacattccaagaatatcagaaaactggggaactctcaacatccgatcacatatttcccctcactccaggccttgtttatagtatcccttttgatcacattgttctgcattcaggacaaagacctccagagctccctaaatctacagaaatccatgagcaaaaacgccactgcaacaccacacgccattctaagccaactgacaagcctacaggcaactccaaaactatagaccacaaaagctctacagataatcatgaggctcctcccacttctgaagaaaactccagcaaccaagggaaagacccaatgatccggaaccagcgctctgttgatcctgctgactccactaccacacataaagaatccgctggaaaaaaacatataacgccagcacccaagagcaaaataaactgtcgtaagtccacaacaggcaaatcaacggtaacaagaaaatcagataaaactggaagacctttggaaaagtccatgagtactttggataagacaagtaccagctcacataagactacaacttccttccacaactcaggcaattcacagaccaagcaaaaaagcacatcttttccagaaaaaatcacagcagcctcaaaaacaacatacaagaccacaggaaccccagaagagtcagaaaaaactgaagattccagaacaacagttgcctcagacaagctcctgacaaaaactacaaaaaacatacaagagaccatatcagccaatgagctcacacaatctctagcagagcctacagaacatggaggaaggacagccaatgagaacaacacaccatccccagcagagcctacagaaaatagagaaaggacagccaatgagaacaccacactatccccagcagagcctacagaaaatagagaaaggacagccaatgagaacaccgcaccattcccagcagggcctacagaaaatagagaaatgacagccaatgagaataccacactattcccagcagagcctacagaacatggagaaaggacagccaatgagaacaccacaccatccccagcagagcctacagaacatggagaaaggacagccaatgagaacactacaccatccccagcagagcctacagaacatggagaaaggaccccatttgccaatgacaaaaccacatcatcctcagcagagtctacagaacatggagaaaggaccccactggccaacgagaacaccacaccatccccagcagagcctacagaaaatagagaaaggacagccaatgagaacaccacaccatccccagcagggcctacagaaaacagagaaacgacagccaacgagaagaccacactatccccagtagagcctacagaaaatagagaaacaacagccaatgagaagaccacaccatccccagcagagcctacagaaaatggacaaaggaccccatttgccaatgagaaaaccacatcatcctcagcagagcctacagaacacggagaaaggaccccactggccaatgagaacaccacaccatccccagcagagcctacagaaaatagagaaaggacagccaatgagaagaccacaccatccccagcagagcctacagaaaatggagacaggactcctttggccaatgagaagaccacgccatctctagcagagcctacagaaaatggacaaaggaccccatttgccaatgagaagaccacatcatcctcagcagagcctacagaacacgaagaaaggactccactggccaatgagaacaccacaccatccccggcagagcctacagaaaatagagaaaggacagccaatgagaacaccacaccatccccagcagggcctacagaaaatagagaaatgacagccaacgagaagaccacactattcccagcagagcctacagaaaatagagaaaggacagccaatgagaagaccacatcatccccagcagagcctacagaaaatggacaaaggaccccatttgccaatgagaaaaccacatcatcctcagcagagcctacagaacacggagaaaggaccccactggccaatgagaacaccacactatccccagcagggcctacagaaaatagagaaaggacagccaatgagaagaccacaccattcccagcagagcctacagaaaatagagaaaggacagccaatgagaacaccacaccatccccagcacagcctacagaaaatggagacaggactccattggccaatgagaagaccacaccatctctagcagagcctacagaaaatggaaaaaggaccccatttgccaatgagaagaccacatcatcctcagcagagcctacagaacacgcagaaaggactccactggccaatgagaacaccacatcatccccagcagagcctacagaaaatagagaaaggacagccaatgagaagaccacacaattcccagcagagcctacagaaaatagagaaagcacagccaatgagaagaccacaccattcccagcagagcctacagaaaatagagaatggacagccaatgagaacaccacactatccccagcagagcctacagaacatgaagaaatgaccccattggcc

SEQ ID NO: 8307 - DNA, 4480 bp, Homo sapiens
  source 1..4480: mol_type = unassigned DNA
ggggcggggcggcgcggcgcggagccgagcaggacggccgccatcttgcgcgcagctggagtcggtgcctgaggttgcagccgagagtgtgcgccagcccgcggcccagccgaagctctttcccgccgcctctccgcgcctcgcccaggttcagctccgcctgaccctccgcttggcacggtcccctgaccctcagtccggcctggtccggccttccagccgccccggggacgatgaacggaggataaatggtgcccaaggcagacagcggcgccttcctgctgctcttcctgctcgtgctcactgtcaccgagccgctgcggccagagctgcggtgcaaccctgggcagtttgcgtgtcgcagcggcaccatccagtgcatccccctcccctggcagtgtgacggctgggcgacttgcgaggatgagagcgacgaagccaactgtccagaagtgaccggggaggtgcgtcctcatcatgggaaggaggctgtggatccgcggcaggggcgggccagaggaggcgacccttcgcacttccacgcggtgaacgtggcgcagcccgttcgcttcagcagtttcctagggaagtgcccgacagggtggcaccactacgaaggcacggccagctgctaccgggtctacctgagcggggagaactactgggatgccgcgcagacctgccagcgcctgaatggctctctcgccaccttctccactgaccaggagctgcgctttgtcctggcccaggaatgggaccagcccgagcggagctttggttggaaggaccagcgcaagttgtgggttggctatcagtatgttatcactggccggaaccgctccttggaaggtcgctgggaggtggcattcaaaggctcttcagaggtgttcctgcccccagaccccatctttgcctcggccatgtctgagaacgacaacgtgttctgtgcccagcttcagtgcttccatttccccaccctgcggcaccacgacctccacagctggcacgccgagagctgctacgagaagtcttcatttctgtgtaaaagaagtcaaacatgtgttgacatcaaggacaacgtggtggatgaagggttctacttcacccctaagggggacgacccatgcctgagctgcacctgccatggaggggagcctgagatgtgtgtggctgctctctgtgagaggccccagggctgccaacagtaccgcaaggaccccaaagagtgctgcaagttcatgtgtctggacccagatggcaacagtctgtttgactccatggccagcgggatgcgcctggtcgtcagctgcatctcctccttcctcatcctgtcactgctgctcttcatggtccaccggctgcgccagcggcgccgggagcgcatcgagtccctgattggagcaaacttgcaccacttcaacctcggccgcaggatccctggctttgattacggcccagacgggtttggcacgggcctcacgccgctgcatctttctgacgacggagagggtgggactttccatttccacgaccctccacctccctacacggcatacaagtacccggacatcggccagcccgacgaccctccgccgccctacgaggcctccatccacccggacagtgtgttctatgaccctgcagacgatgatgcttttgagcctgtggaggtcagcctgccagcccctggggatggtgggagtgaaggtgcattactccggcgcctggagcagcctctgcccactgcgggggcctctctggcagacctggaagactctgccgacagcagcagcgccctgctcgtgccccctgaccctgcccagagcgggagcaccccagctgcagaggcactgccagggggtggccgccacagccgcagctccctcaatactgtggtgtagacggcctggcctgtaccccaacggtctgggagcacctgtctgttgtagaaaacaccggtccctggggagacttgaaaggcccctgtcccagcctggacgccacgcactgccgcacgtcactggcgggctcgcgtgtgtacatagagaccacagcccgccttctgccaaaagaagtgatggcctgcaccgagcttccttgagggcttcagaaacatgcatagctttggatcactgtcttctcctttataaatggcagaagagtgacaaaattcattcagaccgcacatgttagaggcagggaatgaagaaggtactgtgggccatggccacacctgatgcgtttttggtgggcttacttggtgcagtgtgctgtccagagagacctgctgacccagtctgggacaggcacagtgggagctgccacagtgccccttgctggccgccctcaggagggggcctctggaccgtcagtgtggcgtaggcagtgggtctgcttcagggaggcagcctcttgactttgtcacaacggttgcactgaagatggcccccacaagcccagttgtgaatatcaaggtgaccctgcccctggctgggagctcccctggggctctggaacctgaagccctgagaaggagagcttggaaggaggttgagctcttcactgtgtctttccatctgggctctgcagcccagctctgtggcaggaggcctgaccccaccccatcagtccctctcccagcattgctgtgcatggctccctcaggaagaagctctggagtggggccgaggccccagatgctctgctggggtctggggactgagctgcctcctgtctctccactctggagccctgggctcttgcctcctgttgaattgcccctgggcctgcccccggccccatttgtgccataaagggttgcttcattgcaggaggggtggctgaaaccaccatcctgggctgcatctatctccttaaagtccactccttacatcaccgccactactgcagctcagtgcccagcggccgcatgcacacctcccggcccctcctcagcagcgcaggggctgggggcccttcctggcacccttttgcctgacggaccctgttgcctgctcctgggcagtggttttgttgcctgacacagggcctttaacatttctgaggtttggagattaagcgggttctgtgcgatttttagcacatccatatcttttctacgttgaatgtctggatctttcctttgtatgtttgtgtctctgtgtgtgtatgtggccaagcgtctgcaggtgagggtggcacatggaacttcacgggtcactgggggcccactcttccagggtcatcgatgcatcctgggctgtgctgaggcagtgctgtctcgctcagtctttccagaccagcggggcagcacctgggaggcctgtctgaagcatgcagttctgtggtgctgctcggggatggactccatgcacagtccacttcttgacacattctcacactgtggctggagacccattttttccatcccatgtggaatgagaatcttgagttgcccacagacagacttgacctttgtgccagaactgtccagagctgtgagttttgttactgaattgcctgtccctgagcttggcctgctggagcatgatgctggaggctgtgtgcgggcaggcttgtgctccccttggagaagggctgctacttaacaaggaagtcctggccacaggagtcccctactggctgcagaggacgaagcaggaagcatgccgtggatcccacatgcactggggcagggcagccaggttccagagcagcaggcatgtgcattatgggtgccaggtggccagtgagggcccgaggaccacgcagcagagtcccccacgggcctgagcctgagagctcagaggattcctgccaggcctcagaactgtgtgtgcgggacagggtggctggcacgagatgtgtgggactgggacgcttcctttggggaccagaggaacattaggggccggtcagacacgtagggggcagtgaggaaacggggtaaagtggaccatgcaggctgcagagggtgggccttgggctggccggggttgctgggtggccccttccccatgggcctccacaagcactcaggccactggcacgttgggccaggcagaaggtccacatggcagggctgcctggaacaccgctgccactgtggctccaggaggcccttgggagcatgaggagagctggactcgctcatctgttcttgcaccaccatccagaatgccccctttgcaaggcctgctgcagtccccagtctgaccagcaagtcccggggtcacccttgctgaaccttgtgctccaggggtcctcctcctctaggaccagcttgccacggtttctcagagcccaggtgccctctgacctgccatgcggaggtgggatttgatactgtacattgtcttgatgcctgtttttttatgttttcattaagggtttttagtttttggttgggttgacactaacttttcttaagatgctgtgagaatcatttcatccaaatgccaaataaacttgtgttccggaa

SEQ ID NO: 8308 - DNA, 1135 bp, Homo sapiens
  source 1..1135: mol_type = unassigned DNA
atggtgcccaaggcagacagcggcgccttcctgctgctcttcctgctcgtgctcactgtcaccgagccgctgcggccagagctgcggtgcaaccctgggcagtttgcgtgtcgcagcggcaccatccagtgcatccccctcccctggcagtgtgacggctgggcgacttgcgaggatgagagcgacgaagccaactgtccagaagtgaccggggaggtgcgtcctcatcatgggaaggaggctgtggatccgcggcaggggcgggccagaggaggcgacccttcgcacttccacgcggtgaacgtggcgcagcccgttcgcttcagcagtttcctagggaagtgcccgacagggtggcaccactacgaaggcacggccagctgctaccgggtctacctgagcggggagaactactgggatgccgcgcagacctgccagcgcctgaatggctctctcgccaccttctccactgaccaggagctgcgctttgtcctggcccaggaatgggaccagcccgagcggagctttggttggaaggaccagcgcaagttgtgggttggctatcagtatgttatcactggccggaaccgctccttggaaggtcgctgggaggtggcattcaaaggctcttcagaggtgttcctgcccccagaccccatctttgcctcggccatgtctgagaacgacaacgtgttctgtgcccagcttcagtgcttccatttccccaccctgcggcaccacgacctccacagctggcacgccgagagctgctacgagaagtcttcatttctgtgtaaaagaagtcaaacatgtgttgacatcaaggacaacgtggtggatgaagggttctacttcacccctaagggggacgacccatgcctgagctgcacctgccatggaggggagcctgagatgtgtgtggctgctctctgtgagaggccccagggctgcagccctctctcctgcacggccagagcgacttagctgggccctgctctgcctgccctgtggccatgcttccatgggctcctgactctcctagggccttcttctggaaagtgctcaagaaccgagacactatcaccaaaactggagactctgggaataggatgtcatgtgttaagcatcagaatgt

SEQ ID NO: 8309 - DNA, 4361 bp, Homo sapiens
  source 1..4361: mol_type = unassigned DNA
ggggcggggcggcgcggcgcggagccgagcaggacggccgccatcttgcgcgcagctggagtcggtgcctgaggttgcagccgagagtgtgcgccagcccgcggcccagccgaagctctttcccgccgcctctccgcgcctcgcccaggttcagctccgcctgaccctccgcttggcacggtcccctgaccctcagtccggcctggtccggccttccagccgccccggggacgatgaacggaggataaatggtgcccaaggcagacagcggcgccttcctgctgctcttcctgctcgtgctcactgtcaccgagccgctgcggccagaagtgaccggggaggtgcgtcctcatcatgggaaggaggctgtggatccgcggcaggggcgggccagaggaggcgacccttcgcacttccacgcggtgaacgtggcgcagcccgttcgcttcagcagtttcctagggaagtgcccgacagggtggcaccactacgaaggcacggccagctgctaccgggtctacctgagcggggagaactactgggatgccgcgcagacctgccagcgcctgaatggctctctcgccaccttctccactgaccaggagctgcgctttgtcctggcccaggaatgggaccagcccgagcggagctttggttggaaggaccagcgcaagttgtgggttggctatcagtatgttatcactggccggaaccgctccttggaaggtcgctgggaggtggcattcaaaggctcttcagaggtgttcctgcccccagaccccatctttgcctcggccatgtctgagaacgacaacgtgttctgtgcccagcttcagtgcttccatttccccaccctgcggcaccacgacctccacagctggcacgccgagagctgctacgagaagtcttcatttctgtgtaaaagaagtcaaacatgtgttgacatcaaggacaacgtggtggatgaagggttctacttcacccctaagggggacgacccatgcctgagctgcacctgccatggaggggagcctgagatgtgtgtggctgctctctgtgagaggccccagggctgccaacagtaccgcaaggaccccaaagagtgctgcaagttcatgtgtctggacccagatggcaacagtctgtttgactccatggccagcgggatgcgcctggtcgtcagctgcatctcctccttcctcatcctgtcactgctgctcttcatggtccaccggctgcgccagcggcgccgggagcgcatcgagtccctgattggagcaaacttgcaccacttcaacctcggccgcaggatccctggctttgattacggcccagacgggtttggcacgggcctcacgccgctgcatctttctgacgacggagagggtgggactttccatttccacgaccctccacctccctacacggcatacaagtacccggacatcggccagcccgacgaccctccgccgccctacgaggcctccatccacccggacagtgtgttctatgaccctgcagacgatgatgcttttgagcctgtggaggtcagcctgccagcccctggggatggtgggagtgaaggtgcattactccggcgcctggagcagcctctgcccactgcgggggcctctctggcagacctggaagactctgccgacagcagcagcgccctgctcgtgccccctgaccctgcccagagcgggagcaccccagctgcagaggcactgccagggggtggccgccacagccgcagctccctcaatactgtggtgtagacggcctggcctgtaccccaacggtctgggagcacctgtctgttgtagaaaacaccggtccctggggagacttgaaaggcccctgtcccagcctggacgccacgcactgccgcacgtcactggcgggctcgcgtgtgtacatagagaccacagcccgccttctgccaaaagaagtgatggcctgcaccgagcttccttgagggcttcagaaacatgcatagctttggatcactgtcttctcctttataaatggcagaagagtgacaaaattcattcagaccgcacatgttagaggcagggaatgaagaaggtactgtgggccatggccacacctgatgcgtttttggtgggcttacttggtgcagtgtgctgtccagagagacctgctgacccagtctgggacaggcacagtgggagctgccacagtgccccttgctggccgccctcaggagggggcctctggaccgtcagtgtggcgtaggcagtgggtctgcttcagggaggcagcctcttgactttgtcacaacggttgcactgaagatggcccccacaagcccagttgtgaatatcaaggtgaccctgcccctggctgggagctcccctggggctctggaacctgaagccctgagaaggagagcttggaaggaggttgagctcttcactgtgtctttccatctgggctctgcagcccagctctgtggcaggaggcctgaccccaccccatcagtccctctcccagcattgctgtgcatggctccctcaggaagaagctctggagtggggccgaggccccagatgctctgctggggtctggggactgagctgcctcctgtctctccactctggagccctgggctcttgcctcctgttgaattgcccctgggcctgcccccggccccatttgtgccataaagggttgcttcattgcaggaggggtggctgaaaccaccatcctgggctgcatctatctccttaaagtccactccttacatcaccgccactactgcagctcagtgcccagcggccgcatgcacacctcccggcccctcctcagcagcgcaggggctgggggcccttcctggcacccttttgcctgacggaccctgttgcctgctcctgggcagtggttttgttgcctgacacagggcctttaacatttctgaggtttggagattaagcgggttctgtgcgatttttagcacatccatatcttttctacgttgaatgtctggatctttcctttgtatgtttgtgtctctgtgtgtgtatgtggccaagcgtctgcaggtgagggtggcacatggaacttcacgggtcactgggggcccactcttccagggtcatcgatgcatcctgggctgtgctgaggcagtgctgtctcgctcagtctttccagaccagcggggcagcacctgggaggcctgtctgaagcatgcagttctgtggtgctgctcggggatggactccatgcacagtccacttcttgacacattctcacactgtggctggagacccattttttccatcccatgtggaatgagaatcttgagttgcccacagacagacttgacctttgtgccagaactgtccagagctgtgagttttgttactgaattgcctgtccctgagcttggcctgctggagcatgatgctggaggctgtgtgcgggcaggcttgtgctccccttggagaagggctgctacttaacaaggaagtcctggccacaggagtcccctactggctgcagaggacgaagcaggaagcatgccgtggatcccacatgcactggggcagggcagccaggttccagagcagcaggcatgtgcattatgggtgccaggtggccagtgagggcccgaggaccacgcagcagagtcccccacgggcctgagcctgagagctcagaggattcctgccaggcctcagaactgtgtgtgcgggacagggtggctggcacgagatgtgtgggactgggacgcttcctttggggaccagaggaacattaggggccggtcagacacgtagggggcagtgaggaaacggggtaaagtggaccatgcaggctgcagagggtgggccttgggctggccggggttgctgggtggccccttccccatgggcctccacaagcactcaggccactggcacgttgggccaggcagaaggtccacatggcagggctgcctggaacaccgctgccactgtggctccaggaggcccttgggagcatgaggagagctggactcgctcatctgttcttgcaccaccatccagaatgccccctttgcaaggcctgctgcagtccccagtctgaccagcaagtcccggggtcacccttgctgaaccttgtgctccaggggtcctcctcctctaggaccagcttgccacggtttctcagagcccaggtgccctctgacctgccatgcggaggtgggatttgatactgtacattgtcttgatgcctgtttttttatgttttcattaagggtttttagtttttggttgggttgacactaacttttcttaagatgctgtgagaatcatttcatccaaatgccaaataaacttgtgttccggaagagg

SEQ ID NO: 8310 - DNA, 4812 bp, Homo sapiens
  source 1..4812: mol_type = unassigned DNA
gcgcgcagctggagtcggtgcctgaggttgcagccgagagtgtgcgccagcccgcggcccagccgaagctctttcccgccgcctctccgcgcctcgcccaggttcagctccgcctgaccctccgcttggcacggtcccctgaccctcagtccggcctggtccggccttccagccgccccggggacgatgaacggaggataaatggtgcccaaggcagacagcggcgccttcctgctgctcttcctgctcgtgctcactgtcaccgagccgctgcggccagagctgcggtgcaaccctgggcagtttgcgtgtcgcagcggcaccatccagtgcatccccctcccctggcagtgtgacggctgggcgacttgcgaggatgagagcgacgaagccaactgtccagaagtgaccggggaggtgcgtcctcatcatgggaaggaggctgtggatccgcggcaggggcgggccagaggaggcgacccttcgcacttccacgcggtgaacgtggcgcagcccgttcgcttcagcaggaagtgcccgacagggtggcaccactacgaaggcacggccagctgctaccgggtctacctgagcggggagaactactgggatgccgcgcagacctgccagcgcctgaatggctctctcgccaccttctccactgaccaggagctgcgctttgtcctggcccaggaatgggaccagcccgagcggagctttggttggaaggaccagcgcaagttgtgggttggctatcagtatgttatcactggccggaaccgctccttggaaggtcgctgggaggtggcattcaaagattggggtgtgagtgataccatggtacatagacgcttactatgcccatgtgtcggtaccctgcacacacatttgaagttgggagctcgtttccgcagggttcctgtgcgccttggtggagcgctctccaggcgctcccccaggcccacaccagcctgtgagccccgcctgggggccaagaccctgcaggtttgacagcaccaggtcatgatgtgccctggagacagaactgccgctgctgctgccagaagacatgaggccaggatttctgtaacatttgtgcagaaaggttgaaaaagtacagatccttgtgtagggagaatcatccacaccgccccacgtgctgctcccagggccttcccgtcagcaccagcagtgtagcttctgtctggctcttcagaggtgttcctgcccccagaccccatctttgcctcggccatgtctgagaacgacaacgtgttctgtgcccagcttcagtgcttccatttccccaccctgcggcaccacgacctccacagctggcacgccgagagctgctacgagaagtcttcatttctgtgtaaaagaagtcaaacatgtgttgacatcaaggacaacgtggtggatgaagggttctacttcacccctaagggggacgacccatgcctgagctgcacctgccatggaggggagcctgagatgtgtgtggctgctctctgtgagaggccccagggctgccaacagtaccgcaaggaccccaaagagtgctgcaagttcatgtgtctggacccagatggcaacagtctgtttgactccatggccagcgggatgcgcctggtcgtcagctgcatctcctccttcctcatcctgtcactgctgctcttcatggtccaccggctgcgccagcggcgccgggagcgcatcgagtccctgattggagcaaacttgcaccacttcaacctcggccgcaggatccctggctttgattacggcccagacgggtttggcacgggcctcacgccgctgcatctttctgacgacggagagggtgggactttccatttccacgaccctccacctccctacacggcatacaagtacccggacatcggccagcccgacgaccctccgccgccctacgaggcctccatccacccggacagtgtgttctatgaccctgcagacgatgatgcttttgagcctgtggaggtcagcctgccagcccctggggatggtgggagtgaaggtgcattactccggcgcctggagcagcctctgcccactgcgggggcctctctggcagacctggaagactctgccgacagcagcagcgccctgctcgtgccccctgaccctgcccagagcgggagcaccccagctgcagaggcactgccagggggtggccgccacagccgcagctccctcaatactgtggtgtagacggcctggcctgtaccccaacggtctgggagcacctgtctgttgtagaaaacaccggtccctggggagacttgaaaggcccctgtcccagcctggacgccacgcactgccgcacgtcactggcgggctcgcgtgtgtacatagagaccacagcccgccttctgccaaaagaagtgatggcctgcaccgagcttccttgagggcttcagaaacatgcatagctttggatcactgtcttctcctttataaatggcagaagagtgacaaaattcattcagaccgcacatgttagaggcagggaatgaagaaggtactgtgggccatggccacacctgatgcgtttttggtgggcttacttggtgcagtgtgctgtccagagagacctgctgacccagtctgggacaggcacagtgggagctgccacagtgccccttgctggccgccctcaggagggggcctctggaccgtcagtgtggcgtaggcagtgggtctgcttcagggaggcagcctcttgactttgtcacaacggttgcactgaagatggcccccacaagcccagttgtgaatatcaaggtgaccctgcccctggctgggagctcccctggggctctggaacctgaagccctgagaaggagagcttggaaggaggttgagctcttcactgtgtctttccatctgggctctgcagcccagctctgtggcaggaggcctgaccccaccccatcagtccctctcccagcattgctgtgcatggctccctcaggaagaagctctggagtggggccgaggccccagatgctctgctggggtctggggactgagctgcctcctgtctctccactctggagccctgggctcttgcctcctgttgaattgcccctgggcctgcccccggccccatttgtgccataaagggttgcttcattgcaggaggggtggctgaaaccaccatcctgggctgcatctatctccttaaagtccactccttacatcaccgccactactgcagctcagtgcccagcggccgcatgcacacctcccggcccctcctcagcagcgcaggggctgggggcccttcctggcacccttttgcctgacggaccctgttgcctgctcctgggcagtggttttgttgcctgacacagggcctttaacatttctgaggtttggagattaagcgggttctgtgcgatttttagcacatccatatcttttctacgttgaatgtctggatctttcctttgtatgtttgtgtctctgtgtgtgtatgtggccaagcgtctgcaggtgagggtggcacatggaacttcacgggtcactgggggcccactcttccagggtcatcgatgcatcctgggctgtgctgaggcagtgctgtctcgctcagtctttccagaccagcggggcagcacctgggaggcctgtctgaagcatgcagttctgtggtgctgctcggggatggactccatgcacagtccacttcttgacacattctcacactgtggctggagacccattttttccatcccatgtggaatgagaatcttgagttgcccacagacagacttgacctttgtgccagaactgtccagagctgtgagttttgttactgaattgcctgtccctgagcttggcctgctggagcatgatgctggaggctgtgtgcgggcaggcttgtgctccccttggagaagggctgctacttaacaaggaagtcctggccacaggagtcccctactggctgcagaggacgaagcaggaagcatgccgtggatcccacatgcactggggcagggcagccaggttccagagcagcaggcatgtgcattatgggtgccaggtggccagtgagggcccgaggaccacgcagcagagtcccccacgggcctgagcctgagagctcagaggattcctgccaggcctcagaactgtgtgtgcgggacagggtggctggcacgagatgtgtgggactgggacgcttcctttggggaccagaggaacattaggggccggtcagacacgtagggggcagtgaggaaacggggtaaagtggaccatgcaggctgcagagggtgggccttgggctggccggggttgctgggtggccccttccccatgggcctccacaagcactcaggccactggcacgttgggccaggcagaaggtccacatggcagggctgcctggaacaccgctgccactgtggctccaggaggcccttgggagcatgaggagagctggactcgctcatctgttcttgcaccaccatccagaatgccccctttgcaaggcctgctgcagtccccagtctgaccagcaagtcccggggtcacccttgctgaaccttgtgctccaggggtcctcctcctctaggaccagcttgccacggtttctcagagcccaggtgccctctgacctgccatgcggaggtgggatttgatactgtacattgtcttgatgcctgtttttttatgttttcattaagggtttttagtttttggttgggttgacactaacttttcttaagatgctgtgagaatcatttcatccaaatgccaaataaacttgtgttccgg

SEQ ID NO: 8311 - DNA, 1214 bp, Homo sapiens
  source 1..1214: mol_type = unassigned DNA
cgcgaggcgcgccgcgatcggggactgtcctaagacgggcggggcgcgctgcgctagggactgtcataaaaggggcgggacgcgccgcggtcgggatgacgtgagctgggggcgctcgtcgctgcagccggcggctagcgggcgtccgcgccatggagcgctacgcgggcgccttggaggaggtggcggacggtgcccggcagcaggagcgacactaccagctgctgtcggcgttacagagcctggtgaaggagttgcccagctcattccagcagcgcttgtcctacaccacgctgagcgacctggccctggcgcttctcgacggcaccgtgttcgaaatcgtgcaggggctactggagatccagcacctcaccgaaaagagcctgtacaaccagcgcctgcgcctacagaacgagcatcgagtgctcaggcaggcgctgcggcagaagcaccaggaagcccagcaggcctgccggccccataacctgcctgtgcttcaggcggctcagcagcgagaactagaggcggtggagcaccggatccgtgaggagcagcgggcgatggaccagaagatcgtcctggagctggaccggaaggtggctgaccagcagagcacactggagaaggcgggggtggctggcttctacgtgaccaccaacccacaggagctgatgctgcagatgaacctgctggaactcatccggaagctgcagcagaggggctgctgggcagggaaggcagccctggggctaggaggtccctggcagttgcctgctgcccagtgtgaccagaaaggcagccctgtcccaccatagccacaggcagcagaagtctgggcagagttcatcttcttgacctttggccactgccttcccagctgcccgcagggggttccccctgctgaggagagaccaggtggaccccagctgcctgtcacccttcatctgggacttgctgtcaaaccctaggatagtctcataaaggggaggctgggccagcctgctgctgtctgcttcagggccaggcagagagtgaggctgggggttctcacaccttactccaccgggcacatcccaacctgcactggggcccactcgagcgcttgttctggtctcagccgctcccttggcagctgcagcccccatgcagaagaggctcccaggcccaagctctgtgtgacccagagaaataaagatgcctcagtgtggcccgca

SEQ ID NO: 8312 - DNA, 1154 bp, Homo sapiens
  source 1..1154: mol_type = unassigned DNA
aatcgtaaaaggggcgggacgcgccgcgctcgggatgtcgtgaagctgggggagctcgtcgccgccgccggcggctagcgggcgtccgcgccatggagcgctacgcggccgccttggaggaggtggcggacggtgcccggcagcaggagcgacactaccagttgctgtcggcgctacagagcctggtgaaggagttgcccagctctttccagcagcgcctgtcctacaccacgctcagcgacctggccctggcgcttctcgacggcaccgtgttcgaaatcgtgcaggggctactggagatccagcacctcaccgaaaagagcctgtacaaccagcgcctgcgcctacagaacgagcaccgagtgctcaggcaggcgctgcggcagaagcaccaggaagcccagcaggcctgccggccccacaacctgcctgtggttcaggcggctcagcagcgagaactagaggccgtggaacaccggatccgtgaggagcagcgggcgatggaccagaagatcatcctggagctggaccggaaggtggctgaccagcagagcacactggagaaggcgggggtggctggcttctacgtgaccaccaacccacaggagctgatgctgcagatgaacctgctggaactcatccgaaagctgcagcagaggggctgccgggcagggaatgcagccctgggactgggaggtccctggcagtcgcctgctgcccagtgtgaccagaaaggcagccctgtcccaccatagccacaggcagcagaagtctgggcagagttcatcttcttgacctttggccactgccttcccagctgcccgcagggggttccccctgctgaggagagaccaggtggaccccagctgcctgtcacccttcatctgggacttgctgtcaaaccctaggatagtctcataaaggggaggctgggccagcctgctgctgtctgcttcaggaccaggcagagagtgaggctgggggttctcacaccttactccaccgggcacatcccaacctgcactggggcccacccgagcgcttgttctggtctcagccgctcccttggcagctgcagcccccatgcagaagaggctcccaggcccaagctctgtgtgacccagagaaataaagatgcctcagtgtggcccaaa

SEQ ID NO: 8313 - DNA, 4514 bp, Homo sapiens
  source 1..4514: mol_type = unassigned DNA
aggcccgccctccgctcgcccggcgcggcaggcgggtgccggcgaccggagagcctggacaggctttccagatggctgcggcggtcggtcggtgaggctttcccggctgtggtttggctgcgggcggcttgggcagcccgcgggcgcctcaggtagaagaagaaaggtgccactccggcatgaagacagactcgcttagtcgccagtcacttaagctgagtgcattgtgatttccaataattgaggcagtggttctaaaagctgtctacattaatgaaaagagcaatgtggccagcttgactaagccgccagcgcacagcgcggcaggacgcgcccgggtctcagcggacttgtgcatgttagctgtgtagatttatgtgagggcttgtaaaactctggtcttgtaaactagtcttaagcgcttttaatatggagacagatgagagcccctctccgctcccgtgtgggcccgcaggagaagcggtgatggagagccgagctcgccccttccaagcgctgccccgtgagcagtctccaccacctcccctgcaaacgtccagtggtgcagaggtaatggacgttggctctggtggtgatggacagtccgaactccctgctgaggaccccttcaacttctacggagcttctcttctctccaaaggatccttctctaagggccgcctcctcatagacccgaactgtagtggccacagcccgcgcaccgcccggcacgcacctgcggtccggaagttctcccctgaccttaagttgcttaaggatgtaaagattagcgtgagctttaccgagagctgcaggagtaaggacaggaaggtgctgtacacaggagcagagcgcgacgtgcgggcggagtgcggtctgctccttagccctgtcagtggggacgtgcatgcttgtccctttggcgggagtgttggtgacggggtaggcatagggggtgagagtgctgataagaaggatgaggagaatgagctggatcaggaaaagagagtggagtatgcagtgctcgatgagttagaagattttactgacaatttggagctagatgaagaaggagcaggcgggttcacggctaaagcaatcgttcagagagacagagtggatgaagaggccttgaatttcccctacgaggatgactttgacaacgatgtggatgctctgctggaagaaggcctttgtgcccccaaaaagaggcgaacagaggaaaaatatggcggagacagcgaccatccgtccgatggagagacaagtgtgcagccgatgatgaccaagattaaaacagtgctcaaaagtcgtggccgcccacctacagagccgctgcccgacgggtggatcatgacattccataactctggagtcccggtgtacctacacagagagtctcgggtggtcacctggtccaggccatacttcttgggaacgggaagcatacggaaacacgaccctcctctgagtagcatcccttgtctgcattataagaaaatgaaggacaacgaggaacgggagcaaagcagtgacctcacccctagtggggatgtgtcccccgtcaagcccctgagccgatctgcagagctggagtttcccctggatgagcctgactctatgggtgctgacccggggcccccggacgagaaagacccactaggggctgaggcagcccctggggccctggggcaggtgaaggccaaagtcgaggtgtgcaaagatgaatccgttgatctcgaggaatttcgaagctacctggagaagcgttttgactttgagcaagttactgtgaaaaaattcaggacttgggctgagcggcggcaattcaatcgggaaatgaagcggaagcaggcggagtccgagaggcccatcttgccagccaatcagaagctcattactttatcagtgcaagatgcacccacaaagaaagagtttgttattaaccccaacgggaaatccgaggtctgcatcctgcacgagtacatgcagcgtgtcctcaaggtccgccctgtctataatttctttgaatgtgagaacccaagtgagccttttggtgcctcggtgaccattgatggtgtgacttacggatctggaactgcaagcagcaaaaaacttgcgaagaataaagctgcccgagctacactggaaatcctcatccctgactttgttaaacagacctctgaagagaagcccaaagacagtgaagaactcgagtattttaaccacatcagcatcgaggactcgcgggtctacgagctgaccagcaaggctgggctgttgtctccatatcagatcctccacgagtgccttaaaagaaaccatgggatgggtgacacgtctatcaagtttgaagtggttcctgggaaaaaccagaagagtgaatacgtcatggcgtgtggcaagcacacagtgcgcgggtggtgtaagaacaagagagttggaaagcagttagcctcacagaagatccttcagctgctgcacccacatgtcaagaactgggggtctttactgcgcatgtatggccgtgagagcagcaagatggtcaagcaggagacatcggacaagagtgtgattgagctgcagcagtatgccaagaagaacaagcccaacctgcacatcctcagcaagctccaagaggagatgaagaggctagctgaggaaagggaggagactcgaaagaagcccaagatgtccattgtggcgtccgcccagcctggcggtgagcccctgtgcaccgtggacgtgtgagggaggtggcacgggccagggcgcgggggccgccagccgcacttctgaggagaccagcagtcatgcatcgtgcaccacagtgtcaggcctccaacccacgctccttccctgtggccaacctgtgggcccggccttagggtggaggctttagtgtacagggacagccatggccacacagcacacatgtggagcagcggctctccctggaaagctccaggcctgaatggatggactcagcgactgcaccagtggcagctggtgactgtggacagtggtggaccctgcttctgtgcacctgctgcaggctctttttatgaaggctttcatgaattttagtatgtaatacgcactgacgacacatgatgcttggatgacagatgagaggggatggctgagtcctgtggctggcccgtgatgccaggtggcccatgtgcccagggcgcctgcagggctgctacagggacctggtcaggaggtgcacatggtgccctgccctcacccaccctctgtgtttccccttctttgaaaaggtagaagagaaaggaatattttaaacctttttggcttaaacagaattttagcatcagaactagctttctgggattggaggcaaaccatcaaggtggtccctctccagtctggacacgatgccagcaaggatgacgtcctgccacctcctggagttaccctggcctcctagggtccctttttctgatgaagtcttaattccctaaaagcgcctctttggacactgaggccctctctgcctttcctggcctccggcaacagttttttacaaagattttttgcagtcgagtccatatgtccacccattgatttttaaagcttttgtgatattttagcattttgaaagactttcacagtgagagtagaaggtagatttggaatcatgcattttagcaagtggacttgttgaaacaggaagcaagggccttcagtgtagcccattcttgatccagagctgttgcctgtgacagcggtttctctggatgtcaaaggcagctgcctggtgcccagcttgcttctcgactggtggcccctatgggtgggtgtgcgatggaaatgtgttcctgccggagtctgaggcaccagggtgtgctcaaaggctggccctggtggtggactggcacctgtgcagagtgccgtgtgcttgtggtgcgccatctgaagcaagagtccagcgttctgccgtgtctgtcccccaccatgccccctacaggcggtactgatggcgcttttttttttttttctgtcaggaaaacaatgttggcctgtgggccgcccacaacatatccttccctcactacctgtgtgaccaaggttggcttctgttgacctttaaaaaagaaaccctcaactcaaattgctataattagacacttgcttctgtcttgcctcctgtctgcagctgtgaatagtcatttgactgtgactgttgcccttagccagccagatgcgcctgtgaaccaaagcttcgtgcacatgtgttcccctaaaggttggggagcctcgctgtgtcttgctgttcccaggcaccaccacagcaggtgctgccatactcttgtggtctctgtgcgccccccccccccccccacccgtctgccaagcatgggtatgaatcgtgcacacagccatgcttcaaggccggggcaggggagcctgtgctgatgccatccagggcactgggctgtgcctggaaggcgagccttgattgtctgaacacataaagcaaactgtccaga

SEQ ID NO: 8314 - DNA, 4419 bp, Homo sapiens
  source 1..4419: mol_type = unassigned DNA
aggcccgccctccgctcgcccggcgcggcaggcgggtgccggcgaccggagagcctggacaggctttccagatggctgcggcggtcggtcggtgaggctttcccggctgtggtttggctgcgggcggcttgggcagcccgcgggcgcctcaggtagaagaagaaaggtgccactccggcatgaagacagactcgcttagtcgccagtcacttaagctgagtgcattgtgatttccaataattgaggcagtggttctaaaagctgtctacattaatgaaaagagcaatgtggccagcttgactaagccgccagcgcacagcgcggcaggacgcgcccgggtctcagcggacttgtgcatgttagctgtgtagatttatgtgagggcttgtaaaactctggtcttgtaaactagtcttaagcgcttttaatatggagacagatgagagcccctctccgctcccgtgtgggcccgcaggagaagcggtgatggagagccgagctcgccccttccaagcgctgccccgtgagcagtctccaccacctcccctgcaaacgtccagtggtgcagaggtaatggacgttggctctggtggtgatggacagtccgaactccctgctgaggaccccttcaacttctacggagcttctcttctctccaaaggatccttctctaagggccgcctcctcatagacccgaactgtagtggccacagcccgcgcaccgcccggcacgcacctgcggtccggaagttctcccctgaccttaagttgcttaaggatgtaaagattagcgtgagctttaccgagagctgcaggagtaaggacaggaaggtgctgtacacaggagcagagcgcgacgtgcgggcggagtgcggtctgctccttagccctgtcagtggggacgtgcatgcttgtccctttggcgggagtgttggtgacggggtaggcatagggggtgagagtgctgataagaaggatgaggagaatgagctggatcaggaaaagagagtggagtatgcagtgctcgatgagttagaagattttactgacaatttggagctagatgaagaaggagcaggcgggttcacggctaaagcaatcgttcagagagacagagtggatgaagaggccttgaatttcccctacgaggatgactttgacaacgatgtggatgctctgctggaagaaggcctttgtgcccccaaaaagaggcgaacagaggaaaaatatggcggagacagcgaccatccgtccgatggagagacaagtgtgcagccgatgatgaccaagattaaaacagtgctcaaaagtcgtggccgcccacctacagagccgctgcccgacgggtggatcatgacattccataactctggagtcccggtgtacctacacagagagtctcgggtggtcacctggtccaggccatacttcttgggaacgggaagcatacggaaacacgaccctcctctgagtagcatcccttgtctgcattataagaaaatgaaggacaacgaggaacgggagcaaagcagtgacctcacccctagtggggatgtgtcccccgtcaagcccctgagccgatctgcagagctggagtttcccctggatgagcctgactctatgggtgctgacccggggcccccggacgagaaagacccactaggggctgaggcagcccctggggccctggggcaggtgaaggccaaagtcgaggtgtgcaaagatgaatccgttgatctcgaggaatttcgaagctacctggagaagcgttttgactttgagcaagttactgtgaaaaaattcaggacttgggctgagcggcggcaattcaatcgggaaatgaagcggaagcaggcggagtccgagaggcccatcttgccagccaatcagaagctcattactttatcagtgcaagatgcacccacaaagaaagagtttgttattaaccccaacgggaaatccgaggtctgcatcctgcacgagtacatgcagcgtgtcctcaaggtccgccctgtctataatttctttgaatgtgcccgagctacactggaaatcctcatccctgactttgttaaacagacctctgaagagaagcccaaagacagtgaagaactcgagtattttaaccacatcagcatcgaggactcgcgggtctacgagctgaccagcaaggctgggctgttgtctccatatcagatcctccacgagtgccttaaaagaaaccatgggatgggtgacacgtctatcaagtttgaagtggttcctgggaaaaaccagaagagtgaatacgtcatggcgtgtggcaagcacacagtgcgcgggtggtgtaagaacaagagagttggaaagcagttagcctcacagaagatccttcagctgctgcacccacatgtcaagaactgggggtctttactgcgcatgtatggccgtgagagcagcaagatggtcaagcaggagacatcggacaagagtgtgattgagctgcagcagtatgccaagaagaacaagcccaacctgcacatcctcagcaagctccaagaggagatgaagaggctagctgaggaaagggaggagactcgaaagaagcccaagatgtccattgtggcgtccgcccagcctggcggtgagcccctgtgcaccgtggacgtgtgagggaggtggcacgggccagggcgcgggggccgccagccgcacttctgaggagaccagcagtcatgcatcgtgcaccacagtgtcaggcctccaacccacgctccttccctgtggccaacctgtgggcccggccttagggtggaggctttagtgtacagggacagccatggccacacagcacacatgtggagcagcggctctccctggaaagctccaggcctgaatggatggactcagcgactgcaccagtggcagctggtgactgtggacagtggtggaccctgcttctgtgcacctgctgcaggctctttttatgaaggctttcatgaattttagtatgtaatacgcactgacgacacatgatgcttggatgacagatgagaggggatggctgagtcctgtggctggcccgtgatgccaggtggcccatgtgcccagggcgcctgcagggctgctacagggacctggtcaggaggtgcacatggtgccctgccctcacccaccctctgtgtttccccttctttgaaaaggtagaagagaaaggaatattttaaacctttttggcttaaacagaattttagcatcagaactagctttctgggattggaggcaaaccatcaaggtggtccctctccagtctggacacgatgccagcaaggatgacgtcctgccacctcctggagttaccctggcctcctagggtccctttttctgatgaagtcttaattccctaaaagcgcctctttggacactgaggccctctctgcctttcctggcctccggcaacagttttttacaaagattttttgcagtcgagtccatatgtccacccattgatttttaaagcttttgtgatattttagcattttgaaagactttcacagtgagagtagaaggtagatttggaatcatgcattttagcaagtggacttgttgaaacaggaagcaagggccttcagtgtagcccattcttgatccagagctgttgcctgtgacagcggtttctctggatgtcaaaggcagctgcctggtgcccagcttgcttctcgactggtggcccctatgggtgggtgtgcgatggaaatgtgttcctgccggagtctgaggcaccagggtgtgctcaaaggctggccctggtggtggactggcacctgtgcagagtgccgtgtgcttgtggtgcgccatctgaagcaagagtccagcgttctgccgtgtctgtcccccaccatgccccctacaggcggtactgatggcgcttttttttttttttctgtcaggaaaacaatgttggcctgtgggccgcccacaacatatccttccctcactacctgtgtgaccaaggttggcttctgttgacctttaaaaaagaaaccctcaactcaaattgctataattagacacttgcttctgtcttgcctcctgtctgcagctgtgaatagtcatttgactgtgactgttgcccttagccagccagatgcgcctgtgaaccaaagcttcgtgcacatgtgttcccctaaaggttggggagcctcgctgtgtcttgctgttcccaggcaccaccacagcaggtgctgccatactcttgtggtctctgtgcgccccccccccccccccacccgtctgccaagcatgggtatgaatcgtgcacacagccatgcttcaaggccggggcaggggagcctgtgctgatgccatccagggcactgggctgtgcctggaaggcgagccttgattgtctgaacacataaagcaaactgtccagaaggg

SEQ ID NO: 8315 - DNA, 4129 bp, Homo sapiens
  source 1..4129: mol_type = unassigned DNA
gtggccagcttgactaagccgccagcgcacagcgcggcaggacgcgcccgggtctcagcggacttgtgcatgttagctgtgtagatttatgtgagggcttgtaaaactctggtcttgtaaactagtcttaagcgcttttaatatggagacagatgagagcccctctccgctcccgtgtgggcccgcaggagaagcggtgatggagagccgagctcgccccttccaagcgctgccccgtgagcagtctccaccacctcccctgcaaacgtccagtggtgcagaggtaatggacgttggctctggtggtgatggacagtccgaactccctgctgaggaccccttcaacttctacggagcttctcttctctccaaaggatccttctctaagggccgcctcctcatagacccgaactgtagtggccacagcccgcgcaccgcccggcacgcacctgcggtccggaagttctcccctgaccttaagttgcttaaggatgtaaagattagcgtgagctttaccgagagctgcaggagtaaggacaggaaggtgctgtacacaggagcagagcgcgacgtgcgggcggagtgcggtctgctccttagccctgtcagtggggacgtgcatgcttgtccctttggcgggagtgttggtgacggggtaggcatagggggtgagagtgctgataagaaggatgaggagaatgagctggatcaggaaaagagagtggagtatgcagtgctcgatgagttagaagattttactgacaatttggagctagatgaagaaggagcaggcgggttcacggctaaagcaatcgttcagagagacagagtggatgaagaggccttgaatttcccctacgaggatgactttgacaacgatgtggatgctctgctggaagaaggcctttgtgcccccaaaaagaggcgaacagaggaaaaatatggcggagacagcgaccatccgtccgatggagagacaagtgtgcagccgatgatgaccaagattaaaacagtgctcaaaagtcgtggccgcccacctacagagccgctgcccgacgggtggatcatgacattccataactctggagtcccggtgtacctacacagagagtctcgggtggtcacctggtccaggccatacttcttgggaacgggaagcatacggaaacacgaccctcctctgagtagcatcccttgtctgcattataagaaaatgaaggacaacgaggaacgggagcaaagcagtgacctcacccctagtggggatgtgtcccccgtcaagcccctgagccgatctgcagagctggagtttcccctggatgagcctgactctatgggtgctgacccggggcccccggacgagaaagacccactaggggctgaggcagcccctggggccctggggcaggtgaaggccaaagtcgaggtgtgcaaagatgaatccgttgatctcgaggaatttcgaagctacctggagaagcgttttgactttgagcaagttactgtgaaaaaattcaggacttgggctgagcggcggcaattcaatcgggaaatgaagcggaagcaggcggagtccgagaggcccatcttgccagccaatcagaagctcattactttatcagtgcaagatgcacccacaaagaaagagtttgttattaaccccaacgggaaatccgaggtctgcatcctgcacgagtacatgcagcgtgtcctcaaggtccgccctgtctataatttctttgaatgtgcccgagctacactggaaatcctcatccctgactttgttaaacagacctctgaagagaagcccaaagacagtgaagaactcgagtattttaaccacatcagcatcgaggactcgcgggtctacgagctgaccagcaaggctgggctgttgtctccatatcagatcctccacgagtgccttaaaagaaaccatgggatgggtgacacgtctatcaagtttgaagtggttcctgggaaaaaccagaagagtgaatacgtcatggcgtgtggcaagcacacagtgcgcgggtggtgtaagaacaagagagttggaaagcagttagcctcacagaagatccttcagctgctgcacccacatgtcaagaactgggggtctttactgcgcatgtatggccgtgagagcagcaagatggtcaagcaggagacatcggacaagagtgtgattgagctgcagcagtatgccaagaagaacaagcccaacctgcacatcctcagcaagctccaagaggagatgaagaggctagctgaggaaagggaggagactcgaaagaagcccaagatgtccattgtggcgtccgcccagcctggcggtgagcccctgtgcaccgtggacgtgtgagggaggtggcacgggccagggcgcgggggccgccagccgcacttctgaggagaccagcagtcatgcatcgtgcaccacagtgtcaggcctccaacccacgctccttccctgtggccaacctgtgggcccggccttagggtggaggctttagtgtacagggacagccatggccacacagcacacatgtggagcagcggctctccctggaaagctccaggcctgaatggatggactcagcgactgcaccagtggcagctggtgactgtggacagtggtggaccctgcttctgtgcacctgctgcaggctctttttatgaaggctttcatgaattttagtatgtaatacgcactgacgacacatgatgcttggatgacagatgagaggggatggctgagtcctgtggctggcccgtgatgccaggtggcccatgtgcccagggcgcctgcagggctgctacagggacctggtcaggaggtgcacatggtgccctgccctcacccaccctctgtgtttccccttctttgaaaaggtagaagagaaaggaatattttaaacctttttggcttaaacagaattttagcatcagaactagctttctgggattggaggcaaaccatcaaggtggtccctctccagtctggacacgatgccagcaaggatgacgtcctgccacctcctggagttaccctggcctcctagggtccctttttctgatgaagtcttaattccctaaaagcgcctctttggacactgaggccctctctgcctttcctggcctccggcaacagttttttacaaagattttttgcagtcgagtccatatgtccacccattgatttttaaagcttttgtgatattttagcattttgaaagactttcacagtgagagtagaaggtagatttggaatcatgcattttagcaagtggacttgttgaaacaggaagcaagggccttcagtgtagcccattcttgatccagagctgttgcctgtgacagcggtttctctggatgtcaaaggcagctgcctggtgcccagcttgcttctcgactggtggcccctatgggtgggtgtgcgatggaaatgtgttcctgccggagtctgaggcaccagggtgtgctcaaaggctggccctggtggtggactggcacctgtgcagagtgccgtgtgcttgtggtgcgccatctgaagcaagagtccagcgttctgccgtgtctgtcccccaccatgccccctacaggcggtactgatggcgcttttttttttttttctgtcaggaaaacaatgttggcctgtgggccgcccacaacatatccttccctcactacctgtgtgaccaaggttggcttctgttgacctttaaaaaagaaaccctcaactcaaattgctataattagacacttgcttctgtcttgcctcctgtctgcagctgtgaatagtcatttgactgtgactgttgcccttagccagccagatgcgcctgtgaaccaaagcttcgtgcacatgtgttcccctaaaggttggggagcctcgctgtgtcttgctgttcccaggcaccaccacagcaggtgctgccatactcttgtggtctctgtgcgccccccccccccccccacccgtctgccaagcatgggtatgaatcgtgcacacagccatgcttcaaggccggggcaggggagcctgtgctgatgccatccagggcactgggctgtgcctggaaggcgagccttgattgtctgaacacataaagcaaactgtccagaa

SEQ ID NO: 8316 - DNA, 770 bp, Homo sapiens
  source 1..770: mol_type = unassigned DNA
ggggctggggggcgggccccgggcccaggcgttgccgactctcgtcgctgtccgcccgggtaaagaggctcctctcccggagggcccgaagcctagcatcgccttcaggcgggaaaggtagaagaagaaaggtgccactccggcatgaagacagactcgcttagtcgccagtcacttaagctgagtgcattgtgatttccaataattgaggcagtggttctaaaagctgtctacattaatgaaaagagcaatgtggccagcttgactaagccgccagcgcacagcgcggcaggacgcgcccgggtctcagcggacttgtgcatgttagctgtgtagatttatgtgagggcttgtaaaactctggtcttgtaaactagtcttaagcgcttttaatatggagacagatgagagcccctctccgctcccgtgtgggcccgcaggagaagcggtgatggagagccgagctcgccccttccaagcgctgccccgtgagcagtctccaccacctcccctgcaaacgtccagtggtgcagaggtaatggacgttggctctggtggtgatggacagtccgaactccctgctgaggaccccttcaacttctacggagcttctcttctctccaaaggatccttctctaagggccgcctcctcatagacccgaactgtagtggccacagcccgcgcaccgcccggcacgcacctgcggtccggaagttctcccctgaccttaagttgcttaaggatgtaaagattagcgtgagctttaccg

SEQ ID NO: 8317 - DNA, 3917 bp, Homo sapiens
  source 1..3917: mol_type = unassigned DNA
agtcccagacagaacctactatgtgcggcggcagctggggcgggaaggcgggagctgggggcgctgggggcgctgcggccgctgcggccgctgcagccgctgcagcgccagggtccacctggtcggctgcacctgtggaggaggaggtggatttcaggcttcccgtagactggaagaatcggctcaaaaccgcttgcctcgcaggggctgagctggaggcagcgaggccgcccgacgcaggcttccggcgagacatggcagggcaaggatggcagcccggcggcagggcctggcgaggagcgcgagcccgcggccgcagttcccaggcgtctgcgggcgcgagcacgccgcgaccctgcgtgcgccggggcgggggggcggggcctcgcctgcacaaatggggacgaggggggcggggcggccacaatttcgcgccaaacttgaccgcgcgttctgctgtaacgagcgggctcggaggtcctcccgctgctgtcatggttggttcgctaaactgcatcgtcgctgtgtcccagaacatgggcatcggcaagaacggggacctgccctggccaccgctcaggaatgaattcagatatttccagagaatgaccacaacctcttcagtagaaggtaaacagaatctggtgattatgggtaagaagacctggttctccattcctgagaagaatcgacctttaaagggtagaattaatttagttctcagcagagaactcaaggaacctccacaaggagctcattttctttccagaagtctagatgatgccttaaaacttactgaacaaccagaattagcaaataaagtagacatggtctggatagttggtggcagttctgtttataaggaagccatgaatcacccaggccatcttaaactatttgtgacaaggatcatgcaagactttgaaagtgacacgttttttccagaaattgatttggagaaatataaacttctgccagaatacccaggtgttctctctgatgtccaggaggagaaaggcattaagtacaaatttgaagtatatgagaagaatgattaatatgaaggtgttttctagtttaagttgttccccctccctctgaaaaaagtatgtatttttacattagaaaaggttttttgttgactttagatctataattatttctaagcaactagtttttattccccactactcttgtctctatcagataccatttatgagacattcttgctataactaagtgcttctccaagaccccaactgagtccccagcacctgctacagtgagctgccattccacacccatcacatgtggcactcttgccagtccttgacattgtcgggcttttcacatgttggtaatatttattaaagatgaagatccacatacccttcaactgagcagtttcactagtggaaataccaaaagcttcctacgtgtatatccagaggtttgtagataaatgttgccaccttgtttgtaacagtgaaaaattgaaaacaacctggaagtccagtgatgggaaaatgagtatgtttctgtcttagattggggaacccaaagcagattgcaagactgaaatttcagtgaaagcagtgtatttgctaggtcataccagaaatcatcaattgaggtacggagaaactgaactgagaaggtaagaaaagcaatttaaagtcagcgagcaggttctcattgataacaagctccatactgctgagatacagggaaatggaggggggaaagctggagtattgatcccgcccccctccttggttgtcagctccctgtcctgtgtgtgggcggaacatagtccagctgctctatagcaagtctcaggtgtttgcagtaagaagctgctggcatgcacgggaacagtgaatgccaaacacttaaagcaattcgatgtttaagtatgtaagttcttttttttttagacagcgtttcgctcttgttgcccaggctagcatgcaatggtgtgacctcggcttactgcaacctccgccttcccagattcaagcgattctcctgcctcaggctcccaagtagctaggaccaggtgcgcgccaccacgcccggctaatttttgtattttgtatttttagtagagatggggtttcaccatgttggtcaggctagtctcgaactcgtgaccgcaagcgattcacccacctcagcctcccaaagtgctgggattaccggcttgagccaccacacccggcacatcttcattctttttatgtagtaaaaagtataaggccacacatggtttatttgaagtattttataatttaaaaaaatacagaagcaggaaaaccaattataagttcaagtgagggatgatggttgcttgaaccaaagggttgcatgtagtaagaaattgtgatttaagatatattttaaagttataagtagcaggatattctgatggagtttgactttggttttgggcccagggagtttcagatgcctttgagaaatgaatgaagtagagagaaaataaaagaaaaaccagccaggcacagtggctcacacctgtaatcccagcgctttgggaggctaaggcaggcagatcacttgagaccagcttgggcaacatggcaaagccccatctctacaaaaaacacaaaaattagctgggcattgtggcgcacacctgtattcccatctagtcaggaagctgagatggaagaattaattgagcccacgagttcaaggctgcagtgagtcgtgattgtgccactgcactccagccggggtgacagaagagaccttgtctcgaaaaggaatctgaaaacaatggaaccatgccttcataattctagaaagttattttcaactgataaatctatattcacccaaataatcaagggtgaaggtaaaataatacatttttagacaagcaaagactcaggggttacctccatgtgccctttttagggaagctgttggagaaaatactccagcaaaatgaaggagtacacaaaccagagaatgacatgaatccagcaaataggatccaacacaggcaatattccagctatggagctagctttaaaaaggaacagtaaaaatattaatcggttagctgggtggaatggcccatgcctgtagtcccagctactcaggaggctcagcagcaggacgacttgagcccaagagttccagaccagcctggccaccttagtgagatcccttctcttaaaaataataacttattgccagatttggggcatttggaaagaagttcattgaagataaagcaaaagtaaaaaaaaaaaaaaaaaaaacaaggggaaagggttggttaggcaatcattctagggcagaaagaagtacaggataggaagagcataatacactgtttttctcaacaaggagcagtatgtacacagtcataatgatgtgactgcttagcccctaaatatggtaactactctgggacaatatgggaggaaaagtgaagattgtgatggtgtaagagctaaatcctcatctgtcatatccagaaatcactatataatatataataatgaaatgactaagttatgtgaggaaaaaaacagaagacattgctaaaagagttaaaagtcattgctctggagaattaggagggatggggcaggggactgttaggatgcattataaactgaaaagcctttttaaaattttatgtattaatatatgcattcacttgaaaaactaaaaaaaaacaataatttggaaaaacccatgaaggtaactaacggaaggaaaaactaagagaatgaaaagtatttgcctctggaaagaacaactggcaggactgttgttttcattgtaagacttttggagccatttaattgtacttaaccattttcatctatttctttaataagaacaattccatcttaataaagagttacacttgttaataa

SEQ ID NO: 8318 - DNA, 1719 bp, Homo sapiens
  source 1..1719: mol_type = unassigned DNA
gcggccgcagttcccaggcgtctgcgggcgcgagcacgccgcgaccctgcgtgcgccggggcgggggggcggggcctcgcctgcacaaatggggacgaggggggcggggcggccacaatttcgcgccaaacttgaccgcgcgttctgctgtaacgagcgggctcggaggtcctcccgctgctgtcatggttggttcgctaaactgcatcgtcgctgtgtcccagaacatgggcatcggcaagaacggggacctgccctggccaccgctcaggaatgaattcagatatttccagagaatgaccacaacctcttcagtagaaggtaaacagaatctggtgattatgggtaagaagacctggttctccattcctgagaagaatcgacctttaaagggtagaattaatttagttctcagcagagaactcaaggaacctccacaaggagctcattttctttccagaagtctagatgatgccttaaaacttactgaacaaccagaattagcaaataaagtagacatggtctggatagttggtggcagttctgtttataaggaagccatgaatcacccaggccatcttaaactatttgtgacaaggatcatgcaagactttgaaagtgacacgttttttccagaaattgatttggagaaatataaacttctgccagaatacccaggtgttctctctgatgtccaggaggagaaaggcattaagtacaaatttgaagtatatgagaagaatgattaatatgaaggtgttttctagtttaagttgttccccctccctctgaaaaaaataccatttatgagacattcttgctataactaagtgcttctccaagaccccaactgagtccccagcacctgctacagtgagctgccattccacacccatcacatgtggcactcttgccagtccttgacattgtcgggcttttcacatgttggtaatatttattaaagatgaagatccacatacccttcaactgagcagtttcactagtggaaataccaaaagcttcctacgtgtatatccagaggtttgtagataaatgttgccaccttgtttgtaacagtgaaaaattgaaaacaacctggaagtccagtgatgggaaaatgagtatgtttctgtcttagattggggaacccaaagcagattgcaagactgaaatttcagtgaaagcagtgtatttgctaggtcataccagaaatcatcaattgaggtacggagaaactgaactgagaaggtaagaaaagcaatttaaagtcagcgagcaggttctcattgataacaagctccatactgctgagatacagggaaatggaggggggaaagctggagtattgatcccgcccccctccttggttgtcagctccctgtcctgtgtgtgggcggaacatagtccagctgctctatagcaagtctcaggtgtttgcagtaagaagctgctggcatgcacgggaacagtgaatgccaaacacttaaagcaattcgatgtttaagtatgtaagttcttttttttttagacagcgtttcgctcttgttgcccaggctagcatgcaatggtgtgacctcggcttactgcaacctccgccttcccagattcaagcgattctcctgcctcaggctcccaagtagctaggaccaggtgcgcgccaccacgcccggctaatttttgtattttgtatttttagtagagatggggtttcaccatgtt

SEQ ID NO: 8319 - DNA, 1521 bp, Homo sapiens
  source 1..1521: mol_type = unassigned DNA
atggctgcagtccgtatgctgagaacctggagcaggaatgcggggaagctgatttgtgttcgctattttcaaacatgtggtaatgttcatgttttgaagccaaattatgtgtgtttctttggttatccttcattcaagtatagtcatccacatcacttcctgaaaacaactgctgctctccgtggacaggttgttcagttcaagctctcagacattggagaagggattagagaagtaactgttaaagaatggtatgtaaaagaaggagatacagtgtctcagtttgatagcatctgtgaagttcaaagtgataaagcttctgttaccatcactagtcgttatgatggagtcattaaaaaactctattataatctagacgatattgcctatgtggggaagccattagtagacatagaaacggaagctttaaaagattcagaagaagatgttgttgaaactcctgcagtgtctcatgatgaacatacacaccaagagataaagggccgaaaaacactggcaactcctgcagttcgccgtctggcaatggaaaacaatattaagctgagtgaagttgttggctcaggaaaagatggcagaatacttaaagaagatatcctcaactatttggaaaagcagacaggagctatattgcctccttcacccaaagttgaaattatgccacctccaccaaagccaaaagacatgactgttcctatactagtatcaaaacctccggtattcacaggcaaagacaaaacagaacccataaaaggctttcaaaaagcaatggtcaagactatgtctgcagccctgaagatacctcattttggttattgtgatgagattgaccttactgaactggttaagctccgagaagaattaaaacccattgcatttgctcgtggaattaaactctcctttatgcctttcttcttaaagtattacttctcatggaaatcttaagatcaacatgtcagtgaggaaatcacctagaatttagacattttctttggaactttggctggtctgtatcattattttgaaaatctccttgatgtttacaagctacctgactactttatcttttattctttaatgattagggtgacctagttccacatggcctgaaggtaacattggcagtaatgtgactaggtacatgtagacttgaaattaaactcagcataaataagagttctctctctccctccttttatacctcttattgtttcaaattctctatcctttctaagttaaaagtactaaaattgcattctttttctgttaaacaggctgcttccttgggattactacagtttcctatccttaacgcttctgtggatgaaaactgccagaatataacatataaggttggctatgcagagtaaaaatgttcttattattaatagaagatggggcaaatgtgcttgtagattagagacttctattgtacctcaaatagtgatcttttttagactagaattaaaggtatggggtaaaacattaaacttaagtctaatt

SEQ ID NO: 8320 - DNA, 3538 bp, Homo sapiens
  source 1..3538: mol_type = unassigned DNA
atttccggggtaagatggctgcagtccgtatgctgagaacctggagcaggaatgcggggaagctgatttgtgttcgctattttcaaacatgtggtaatgttcatgttttgaagccaaattatgtgtgtttctttggttatccttcattcaagtatagtcatccacatcacttcctgaaaacaactgctgctctccgtggacaggttgttcagttcaagctctcagacattggagaagggattagagaagtaactgttaaagaatggtatgtaaaagaaggagatacagtgtctcagtttgatagcatctgtgaagttcaaagtgataaagcttctgttaccatcactagtcgttatgatggagtcattaaaaaactctattataatctagacgatattgcctatgtggggaagccattagtagacatagaaacggaagctttaaaagattcagaagaagatgttgttgaaactcctgcagtgtctcatgatgaacatacacaccaagagataaagggccgaaaaacactggcaactcctgcagttcgccgtctggcaatggaaaacaatattaagctgagtgaagttgttggctcaggaaaagatggcagaatacttaaagaagatatcctcaactatttggaaaagcagacaggagctatattgcctccttcacccaaagttgaaattatgccacctccaccaaagccaaaagacatgactgttcctatactagtatcaaaacctccggtattcacaggcaaagacaaaacagaacccataaaaggctttcaaaaagcaatggtcaagactatgtctgcagccctgaagatacctcattttggttattgtgatgagattgaccttactgaactggttaagctccgagaagaattaaaacccattgcatttgctcgtggaattaaactctcctttatgcctttcttcttaaaggctgcttccttgggattactacagtttcctatccttaacgcttctgtggatgaaaactgccagaatataacatataaggcttctcataacattgggatagcaatggatactgagcagggtttgattgtccctaatgtgaaaaatgttcagatctgctctatatttgacatcgccactgaactgaaccgcctccagaaattgggctctgtgagtcagctcagcaccactgatcttacaggaggaacatttactctttccaacattggatcaattggtggtacctttgccaaaccagtgataatgccacctgaagtagccattggggcccttggatcaattaaggccattccccgatttaaccagaaaggagaagtatataaggcacagataatgaatgtgagctggtcagctgatcacagagttattgatggtgctacaatgtcacgcttctccaatttgtggaaatcctatttagaaaacccagcttttatgctactagatctgaaatgaagactgataagacattcttgaactttttgagcttccaaagagtatgtaaaccctagctgtgccagcacatgttcatctttacaatttatattgtaaatgatttgtatcgtatgattaaggatctaaggcacaatatttgtcactgttctattagactttttactgaaaatgaataatggtgtaatggttctcctggggctgtcacattttataggtcagagtgtgacttcttaatatggtgctgatgtttttgtgtcaatggcttgaaactggcaagattaacaaaattaggccgggcatggtggctcacgcctgtaatcccagcactttgggaggcccaggtgggcggatcacctgaggttagaagtttgagaccagcctggccaacatggtgaaacctggcctctactaaaaatacaaaaattagccgggtgtggtggtgggtacctataatcccagctacttgggaggctgaggcaggagaatcgcttgaacctgggaggtggaggttgcagtgagctgagatcgtgctattgcactccagcctgggcgacagagcaagacgccatctcaaaaacaaaaaaacaaaattcatgttactaaaagacaggtagccatatacagacagtatatgccctattttttttaactgactcttaatgaaactttaattttacttaattaagaaatggaatttatatacaaaaatattttccatttccgttattatgctaattgttgtatgaaataagtgcaattatacttctcttttgagatatccaagagtatattcttgctctgtatagagaatatcatctgatagtgtcttatttatattaattaatgtctttgaaaagggaaaagtataaactggccttaaaattgtccaattatagttttataaccagtctattaaaggtgtttgtttaaaatggatatagttttagatttgtggtaatgctttggtattttcttggggaagaccttcacctttgcaaacttccctcatgtaaggaaggtactttaaatgtagcagccactgacatttctttttttaaaaaaaatttgagaagtctacttccttttaacttttttggtcttcagctaaaaaataggataagaaattaaggtctattccattctccatatcctgggtaagaatgtaaataagaggagaaggaagagtctaatagtaattatggatataaaaaataagaaattttgtatagaaatgaaggtttcataatgatcattttgttaaaggtctactttaatcagaaatagcaacgagatgaatgtatccaacatttcaatttgcattcggaaatccatgttgtttctaatattgtccagttgaaaactgtatgccaaaattagttgtttaagtgaagttttgtgacagaaaaaaggttgttttaatatctacttggtttttctcaaaatggaaataattttaaaatcaggaaagaataaatcagccaggtgtgatgacttgtaactgtaatcccagttataggggaggctgaagcaggaggatcacttgaggccaggagtttgagaccagcctgggcaacatagtgagatcccatctcaaaaaacattatttttaaaattagcctggtggctcacgcctgtaatcccagcactttgggaggccgaggtggccagatcacctgaggtcaggagttcgagaccaccctggccaacatggtgaaaccccatctctacagttttgtaaaaatacaaaaaattacctgggcctggtggcacacgcctgtagtcccagctacttgggaggctgaggcaggagaattgcttgagcccaagaggtggaggttacagtgagcagagatcacaccactgcactccagcctgggtggcagagcaacactttgtctcagaaaaaaaaaaaaaaaccaaaaagccaagtgtggtggtgtgcacctatagtcccagctactcaggaagctgagacaagaggatcaattgagcccaggagttcaaagctgtagtgagctgtcattgtgccactatcctccagtatgggtgacagagtgagacctggtctctaaaaa

SEQ ID NO: 8321 - DNA, 2216 bp, Homo sapiens
  source 1..2216: mol_type = unassigned DNA
ccggggtaagatggctgcagtccgtatgctgagaacctggagcaggaatgcggggaagctgatgctcctgccttggtgaccccgatcttacaaaaactttcaagagcctgctatgtaccagtgctgtgttaggcactggagatacaaatatgaaatagacatcatatcttccttctcaagagattacaaccttgtggtggaggacaaaggagagggagacagatagaaattacaacccagcatgagagatttgtgttcgctattttcaaacatgtggtaatgttcatgttttgaagccaaattatgtgtgtttctttggttatccttcattcaagtatagtcatccacatcacttcctgaaaacaactgctgctctccgtggacaggttgttcagttcaagctctcagacattggagaagggattagagaagtaactgttaaagaatggtatgtaaaagaaggagatacagtgtctcagtttgatagcatctgtgaagttcaaagtgataaagcttctgttaccatcactagtcgttatgatggagtcattaaaaaactctattataatctagacgatattgcctatgtggggaagccattagtagacatagaaacggaagctttaaaagattcagaagaagatgttgttgaaactcctgcagtgtctcatgatgaacatacacaccaagagataaagggccgaaaaacactggcaactcctgcagttcgccgtctggcaatggaaaacaatattaagctgagtgaagttgttggctcaggaaaagatggcagaatacttaaagaagatatcctcaactatttggaaaagcagacaggagctatattgcctccttcacccaaagttgaaattatgccacctccaccaaagccaaaagacatgactgttcctatactagtatcaaaacctccggtattcacaggcaaagacaaaacagaacccataaaaggctttcaaaaagcaatggtcaagactatgtctgcagccctgaagatacctcattttggttattgtgatgagattgaccttactgaactggttaagctccgagaagaattaaaacccattgcatttgctcgtggaattaaactctcctttatgcctttcttcttaaaggctgcttccttgggattactacagtttcctatccttaacgcttctgtggatgaaaactgccagaatataacatataaggcttctcataacattgggatagcaatggatactgagcagggtttgattgtccctaatgtgaaaaatgttcagatctgctctatatttgacatcgccactgaactgaaccgcctccagaaattgggctctgtgagtcagctcagcaccactgatcttacaggaggaacatttactctttccaacattggatcaattggtggtacctttgccaaaccagtgataatgccacctgaagtagccattggggcccttggatcaattaaggccattccccgatttaaccagaaaggagaagtatataaggcacagataatgaatgtgagctggtcagctgatcacagagttattgatggtgctacaatgtcacgcttctccaatttgtggaaatcctatttagaaaacccagcttttatgctactagatctgaaatgaagactgataagacattcttgaactttttgagcttccaaagagtatgtaaaccctagctgtgccagcacatgttcatctttacaatttatattgtaaatgatttgtatcgtatgattaaggatctaaggcacaatatttgtcactgttctattagactttttactgaaaatgaataatggtgtaatggttctcctggggctgtcacattttataggtcagagtgtgacttcttaatatggtgctgatgtttttgtgtcaatggcttgaaactggcagagcaacactttgtctcagaaaaaaaaaaaaaaaccaaaaagccaagtgtggtggtgtgcacctatagtcccagctactcaggaagctgagacaagaggatcaattgagcccaggagttcaaagctgtagtgagctgtcattgtgccactatcctccagtatgggtgacagagtgagacctggtctctaaaaaataaaataaaataaaaaaaacaggtcaaataaatgctgttgttgtaaaatttcagataatacaaagagttaaccaataaaagaaaaagtcattcataatctt

SEQ ID NO: 8322 - DNA, 2467 bp, Homo sapiens
  source 1..2467: mol_type = unassigned DNA
agtataagaatacattgtagctcgacattttggcaccagcccctaaagcattcccaccaccacccccgctgcgacaaagccctgcgctccttacgacagcgtacgacgccgagcctgacaggaacgcctcgtgcggtagaaccgcgcgggccaatcgcgctgctcccgggtgatgacgtaggctgcgcctgtgcatgcgcagggaggggagaccttggcggagcggcggaggcgcccagcggaggtgaaagtattggcggaaaggaaaatacagcggaaaaatgcagagctggagtcgtgtgtactgctccttggccaagagaggccatttcaatcgaatatctcatggcctacagggactttctgcagtgcctctgagaacttacgcagatcagccgattgatgctgatgtaacagttataggttctggtcctggaggatatgttgctgctattaaagctgcccagttaggcttcaagacagtctgcattgagaaaaatgaaacacttggtggaacatgcttgaatgttggttgtattccttctaaggctttattgaacaactctcattattaccatatggcccatggaaaagattttgcatctagaggaattgaaatgtccgaagttcgcttgaatttagacaagatgatggagcagaagagtactgcagtaaaagctttaacaggtggaattgcccacttattcaaacagaataaggttgttcatgtcaatggatatggaaagataactggcaaaaatcaagtcactgctacgaaagctgatggcggcactcaggttattgatacaaagaacattcttatagccacgggttcagaagttactccttttcctggaatcacgatagatgaagatacaatagtgtcatctacaggtgctttatctttaaaaaaagttccagaaaagatggttgttattggtgcaggagtaataggtgtagaattgggttcagtttggcaaagacttggtgcagatgtgacagcagttgaatttttaggtcatgtaggtggagttggaattgatatggagatatctaaaaactttcaacgcatccttcaaaaacaggggtttaaatttaaattgaatacaaaggttactggtgctaccaagaagtcagatggaaaaattgatgtttctattgaagctgcttctggtggtaaagctgaagttatcacttgtgatgtactcttggtttgcattggccgacgaccctttactaagaatttgggactagaagagctgggaattgaactagatcccagaggtagaattccagtcaataccagatttcaaactaaaattccaaatatctatgccattggtgatgtagttgctggtccaatgctggctcacaaagcagaggatgaaggcattatctgtgttgaaggaatggctggtggtgctgtgcacattgactacaattgtgtgccatcagtgatttacacacaccctgaagttgcttgggttggcaaatcagaagagcagttgaaagaagagggtattgagtacaaagttgggaaattcccatttgctgctaacagcagagctaagacaaatgctgacacagatggcatggtgaagatccttgggcagaaatcgacagacagagtactgggagcacatattcttggaccaggtgctggagaaatggtaaatgaagctgctcttgctttggaatatggagcatcctgtgaagatatagctagagtctgtcatgcacatccgaccttatcagaagcttttagagaagcaaatcttgctgcgtcatttggcaaatcaatcaacttttgaattagaagattatatatatttttttctgaaatttcctgggagcttttgtagaagtcacattcctgaacaggatattctcacagctccaagaatttctaggactgaattatgaaacttttggaaggtatttaataggtttggacaaaatggaatactcttatatctatattttacataaatttagtattttgtttcagtgcactaatgtgtaagacaaaaagctacttattgtagcatcctggaatatctccgtcaactcatattttcatgctgttcatgaaagattcaatgcccctgaatttaaatagcttttttctctgatacagaaaagttgaattttacatggctggagctagaatttgatatgtgaacagttgtgtttgaagcacagtgatcaagttatttttaatttggttttcacattggaaacaagtcagtcattcagatatgattcaaatgtctataaaccgaactgatgtaagtaaacggtctctcacttgttttatttaacctctaaattctttcattttaggggtagcatttgtgttgaagaggttttaaagcttccattgttgtctgcaactctgaagggtaattatatagttacccaaattaagagagtctatttacggaactcaaatacgtgggcattcaaa

SEQ ID NO: 8323 - DNA, 2041 bp, Homo sapiens
  source 1..2041: mol_type = unassigned DNA
atgcgcagggaggggagaccttggcggagcggcggaggcgcccagcggaggtgaaagtattggcggaaaggaaaatacagcggaaaaatgcagagctggagtcgtgtgtactgctccttggccaagagaggccatttcaatcgaatatctcatggcctacagggactttctgcagtgcctctgagaacttacgcagatcagccgattgatgctgatgtaacagttataggttctggtcctggaggatatgttgctgctattaaagctgcccagttaggcttcaagacagtctgcattgagaaaaatgaaacacttggtggaacatgcttgaatgttggttgtattccttctaaggctttattgaacaactctcattattaccatatggcccatggaaaagattttgcatctagaggaattgaaatgtccgaagttcgcttgaatttagacaagatgatggagcagaagagtactgcagtaaaagctttaacaggtggaattgcccacttattcaaacagaataaggttgttcatgtcaatggatatggaaagataactggcaaaaatcaagtcactgctacgaaagctgatggcggcactcaggttattgatacaaagaacattcttatagccacgggttcagaagttactccttttcctggaatcacgatagatgaagatacaatagtgtcatctacaggtgctttatctttaaaaaaagttccagaaaagatggttgttattggtgcaggagtaataggtgtagaattgggttcagtttggcaaagacttggtgcagatgtgacagcagttgaatttttaggtcatgtaggtggagttggaattgatatggagatatctaaaaactttcaacgcatccttcaaaaacaggggtttaaatttaaattgaatacaaaggttactggtgctaccaagaagtcagatggaaaaattgatgtttctattgaagctgcttctggtggtaaagctgaagttatcacttgtgatgtactcttggtttgcattggccgacgaccctttactaagaatttgggactagaagagctgggaattgaactagatcccagaggtagaattccagtcaataccagatttcaaactaaaattccaaatatctatgccattggtgatgtagttgctggtccaatgctggctcacaaagcagaggatgaaggcattatctgtgttgaaggaatggctggtggtgctgtgcacattgactacaattgtgtgccatcagtgatttacacacaccctgaagttgcttgggttggcaaatcagaagagcagttgaaagaagagggtattgagtacaaagttgggaaattcccatttgctgctaacagcagagctaagacaaatgctgacacagatggcatggtgaagatccttgggcagaaatcgacagacagagtactgggagcacatattcttggaccaggtgctggagaaatggtaaatgaagctgctcttgctttggaatatggagcatcctgtgaagatatagctagagtctgtcatgcacatccgaccttatcagaagcttttagagaagcaaatcttgctgcgtcatttggcaaatcaatcaacttttgaattagaagattatatatatttttttctgaaatttcctgggagcttttgtagaagtcacattcctgaacaggatattctcacagctccaagaatttctaggactgaattatgaaacttttggaagcatttgtcttcaacagaatgtcttcagcactttgttttgcctcatctgccctcagttttgcttcagagacctaaatatgaagaataaattacccagggaagactttcattctttctaaaggagaccagaatattggaaatggctcaaaaatgatgttgaaaaactatgtacttggaatcatatgtctgggaaacaactttctcccattcaacaaagtattgtatcttacagactgcaagtattcagtatagagattcctaaacagtattctgatataaatagaactagcatttaaaattt

SEQ ID NO: 8324 - DNA, 1859 bp, Homo sapiens
  source 1..1859: mol_type = unassigned DNA
aggggagaccttggcggagcggcggaggcgcccagcggaggtgaaagtattggcggaaaggaaaatacagcggaaaaatgcagagctggagtcgtgtgtactgctccttggccaagagaggccatttcaatcgaatatctcatggcctacagggactttctgcagtgcctctgagaacttacgcagatcagccgattgatgctgatgtaacagttataggttctggtcctggaggatatgttgctgctattaaagctgcccagttaggcttcaagacagtctgcattgagaaaaatgaaacacttggtggaacatgcttgaatgttggttgtattccttctaaggctttattgaacaactctcattattaccatatggcccatggaaaagattttgcatctagaggaattgaaatgtccgaagttcgcttgaatttagacaagatgatggagcagaagagtactgcagtaaaagctttaacaggtggaattgcccacttattcaaacagaataagatagatgaagatacaatagtgtcatctacaggtgctttatctttaaaaaaagttccagaaaagatggttgttattggtgcaggagtaataggtgtagaattgggttcagtttggcaaagacttggtgcagatgtgacagcagttgaatttttaggtcatgtaggtggagttggaattgatatggagatatctaaaaactttcaacgcatccttcaaaaacaggggtttaaatttaaattgaatacaaaggttactggtgctaccaagaagtcagatggaaaaattgatgtttctattgaagctgcttctggtggtaaagctgaagttatcacttgtgatgtactcttggtttgcattggccgacgaccctttactaagaatttgggactagaagagctgggaattgaactagatcccagaggtagaattccagtcaataccagatttcaaactaaaattccaaatatctatgccattggtgatgtagttgctggtccaatgctggctcacaaagcagaggatgaaggcattatctgtgttgaaggaatggctggtggtgctgtgcacattgactacaattgtgtgccatcagtgatttacacacaccctgaagttgcttgggttggcaaatcagaagagcagttgaaagaagagggtattgagtacaaagttgggaaattcccatttgctgctaacagcagagctaagacaaatgctgacacagatggcatggtgaagatccttgggcagaaatcgacagacagagtactgggagcacatattcttggaccaggtgctggagaaatggtaaatgaagctgctcttgctttggaatatggagcatcctgtgaagatatagctagagtctgtcatgcacatccgaccttatcagaagcttttagagaagcaaatcttgctgcgtcatttggcaaatcaatcaacttttgaattagaagattatatatatttttttctgaaatttcctgggagcttttgtagaagtcacattcctgaacaggatattctcacagctccaagaatttctaggactgaattatgaaacttttggaaggtatttaataggtttggacaaaatggaatactcttatatctatattttacataaatttagtattttgtttcagtgcactaatgtgtaagacaaaaagctacttattgtagcatcctggaatatctccgtcaactcatattttcatgctgttcatgaaagattcaatgcccctgaatttaaatagcttttttctctgatacagaaaagttgaattttacatggctggagctagaatttgatatgtgaacagttgtgtttgaagcacagtgatc

SEQ ID NO: 8325 - DNA, 1993 bp, Homo sapiens
  source 1..1993: mol_type = unassigned DNA
gaggggagaccttggcggagcggcggaggcgcccagcggaggtgaaagtattggcggaaaggaaaatacagcggaaaaatgcagagctggagtcgtgtgtactgctccttggccaagagaggccatttcaatcgaatatctcatggcctacagggactttctgcagtgcctctgagaacttacgcagatcagccgattgatgctgatgtaacagttataggttctggtcctggaggatatgttgctgctattaaagctgcccagttaggcttcaaggctttattgaacaactctcattattaccatatggcccatggaaaagattttgcatctagaggaattgaaatgtccgaagttcgcttgaatttagacaagatgatggagcagaagagtactgcagtaaaagctttaacaggtggaattgcccacttattcaaacagaataaggttgttcatgtcaatggatatggaaagataactggcaaaaatcaagtcactgctacgaaagctgatggcggcactcaggttattgatacaaagaacattcttatagccacgggttcagaagttactccttttcctggaatcacgatagatgaagatacaatagtgtcatctacaggtgctttatctttaaaaaaagttccagaaaagatggttgttattggtgcaggagtaataggtgtagaattgggttcagtttggcaaagacttggtgcagatgtgacagcagttgaatttttaggtcatgtaggtggagttggaattgatatggagatatctaaaaactttcaacgcatccttcaaaaacaggggtttaaatttaaattgaatacaaaggttactggtgctaccaagaagtcagatggaaaaattgatgtttctattgaagctgcttctggtggtaaagctgaagttatcacttgtgatgtactcttggtttgcattggccgacgaccctttactaagaatttgggactagaagagctgggaattgaactagatcccagaggtagaattccagtcaataccagatttcaaactaaaattccaaatatctatgccattggtgatgtagttgctggtccaatgctggctcacaaagcagaggatgaaggcattatctgtgttgaaggaatggctggtggtgctgtgcacattgactacaattgtgtgccatcagtgatttacacacaccctgaagttgcttgggttggcaaatcagaagagcagttgaaagaagagggtattgagtacaaagttgggaaattcccatttgctgctaacagcagagctaagacaaatgctgacacagatggcatggtgaagatccttgggcagaaatcgacagacagagtactgggagcacatattcttggaccaggtgctggagaaatggtaaatgaagctgctcttgctttggaatatggagcatcctgtgaagatatagctagagtctgtcatgcacatccgaccttatcagaagcttttagagaagcaaatcttgctgcgtcatttggcaaatcaatcaacttttgaattagaagattatatatatttttttctgaaatttcctgggagcttttgtagaagtcacattcctgaacaggatattctcacagctccaagaatttctaggactgaattatgaaacttttggaaggtatttaataggtttggacaaaatggaatactcttatatctatattttacataaatttagtattttgtttcagtgcactaatgtgtaagacaaaaagctacttattgtagcatcctggaatatctccgtcaactcatattttcatgctgttcatgaaagattcaatgcccctgaatttaaatagcttttttctctgatacagaaaagttgaattttacatggctggagctagaatttgatatgtgaacagttgtgtttgaagcacagtgatcaagttatttttaatttggttttcacattggaaacaagtcagtcattcagatatgattc

SEQ ID NO: 8326 - DNA, 1802 bp, Homo sapiens
  source 1..1802: mol_type = unassigned DNA
atgcgcagggaggggagaccttggcggagcggcggaggcgcccagcggaggtgaaagtattggcggaaaggaaaatacagcggaaaaatgcagagctggagtcgtgtgtactgctccttggccaagagaggccatttcaatcgaatatctcatggcctacagggactttctgcagtgcctctgagaacttacgcagatcagccgagctttattgaacaactctcattattaccatatggcccatggaaaagattttgcatctagaggaattgaaatgtccgaagttcgcttgaatttagacaagatgatggagcagaagagtactgcagtaaaagctttaacaggtggaattgcccacttattcaaacagaataaggttgttcatgtcaatggatatggaaagataactggcaaaaatcaagtcactgctacgaaagctgatggcggcactcaggttattgatacaaagaacattcttatagccacgggttcagaagttactccttttcctggaatcacgatagatgaagatacaatagtgtcatctacaggtgctttatctttaaaaaaagttccagaaaagatggttgttattggtgcaggagtaataggtgtagaattgggttcagtttggcaaagacttggtgcagatgtgacagcagttgaatttttaggtcatgtaggtggagttggaattgatatggagatatctaaaaactttcaacgcatccttcaaaaacaggggtttaaatttaaattgaatacaaaggttactggtgctaccaagaagtcagatggaaaaattgatgtttctattgaagctgcttctggtggtaaagctgaagttatcacttgtgatgtactcttggtttgcattggccgacgaccctttactaagaatttgggactagaagagctgggaattgaactagatcccagaggtagaattccagtcaataccagatttcaaactaaaattccaaatatctatgccattggtgatgtagttgctggtccaatgctggctcacaaagcagaggatgaaggcattatctgtgttgaaggaatggctggtggtgctgtgcacattgactacaattgtgtgccatcagtgatttacacacaccctgaagttgcttgggttggcaaatcagaagagcagttgaaagaagagggtattgagtacaaagttgggaaattcccatttgctgctaacagcagagctaagacaaatgctgacacagatggcatggtgaagatccttgggcagaaatcgacagacagagtactgggagcacatattcttggaccaggtgctggagaaatggtaaatgaagctgctcttgctttggaatatggagcatcctgtgaagatatagctagagtctgtcatgcacatccgaccttatcagaagcttttagagaagcaaatcttgctgcgtcatttggcaaatcaatcaacttttgaattagaagattatatatatttttttctgaaatttcctgggagcttttgtagaagtcacattcctgaacaggatattctcacagctccaagaatttctaggactgaattatgaaacttttggaaggtatttaataggtttggacaaaatggaatactcttatatctatattttacataaatttagtattttgtttcagtgcactaatgtgtaagacaaaaagctacttattgtagcatcctggaatatctccgtcaactcatattttcatgctgttcatgaaagattcaatgcccctgaatttaaatagcttttttctctgatacagaaaagttg

SEQ ID NO: 8327 - DNA, 1863 bp, Homo sapiens
  source 1..1863: mol_type = unassigned DNA
atgctgatatatgttgctgctattaaagctgcccagttaggcttcaagacagtctgcattgagaaaaatgaaacacttggtggaacatgcttgaatgttggttgtattccttctaaggctttattgaacaactctcattattaccatatggcccatggaaaagattttgcatctagaggaattgaaatgtccgaagttcgcttgaatttagacaagatgatggagcagaagagtactgcagtaaaagctttaacaggtggaattgcccacttattcaaacagaataaggttgttcatgtcaatggatatggaaagataactggcaaaaatcaagtcactgctacgaaagctgatggcggcactcaggttattgatacaaagaacattcttatagccacgggttcagaagttactccttttcctggaatcacgatagatgaagatacaatagtgtcatctacaggtgctttatctttaaaaaaagttccagaaaagatggttgttattggtgcaggagtaataggtgtagaattgggttcagtttggcaaagacttggtgcagatgtgacagcagttgaatttttaggtcatgtaggtggagttggaattgatatggagatatctaaaaactttcaacgcatccttcaaaaacaggggtttaaatttaaattgaatacaaaggttactggtgctaccaagaagtcagatggaaaaattgatgtttctattgaagctgcttctggtggtaaagctgaagttatcacttgtgatgtactcttggtttgcattggccgacgaccctttactaagaatttgggactagaagagctgggaattgaactagatcccagaggtagaattccagtcaataccagatttcaaactaaaattccaaatatctatgccattggtgatgtagttgctggtccaatgctggctcacaaagcagaggatgaaggcattatctgtgttgaaggaatggctggtggtgctgtgcacattgactacaattgtgtgccatcagtgatttacacacaccctgaagttgcttgggttggcaaatcagaagagcagttgaaagaagagggtattgagtacaaagttgggaaattcccatttgctgctaacagcagagctaagacaaatgctgacacagatggcatggtgaagatccttgggcagaaatcgacagacagagtactgggagcacatattcttggaccaggtgctggagaaatggtaaatgaagctgctcttgctttggaatatggagcatcctgtgaagatatagctagagtctgtcatgcacatccgaccttatcagaagcttttagagaagcaaatcttgctgcgtcatttggcaaatcaatcaacttttgaattagaagattatatatatttttttctgaaatttcctgggagcttttgtagaagtcacattcctgaacaggatattctcacagctccaagaatttctaggactgaattatgaaacttttggaaggtatttaataggtttggacaaaatggaatactcttatatctatattttacataaatttagtattttgtttcagtgcactaatgtgtaagacaaaaagctacttattgtagcatcctggaatatctccgtcaactcatattttcatgctgttcatgaaagattcaatgcccctgaatttaaatagcttttttctctgatacagaaaagttgaattttacatggctggagctagaatttgatatgtgaacagttgtgtttgaagcacagtgatcaagttatttttaatttggttttcacattggaaacaagtcagtcattcagatatgattcaaatgtctataaaccgaactgatgtaagt

SEQ ID NO: 8328 - DNA, 4458 bp, Homo sapiens
  source 1..4458: mol_type = unassigned DNA
acaaacctgaaacgaaatctttgcaaccagtacagcctgcgcggggcgcggcccagtccatcccccttcggatgcgcagaagcagaggtcaccacgccggacccctcgattccctcgcgggcgattcctggctccttcaccaccccagcactccaagacccccgccctttggcctgaggctcccactgccctagccagttcccgggctcacttccagcttttccagaaagcttggccacgcccctcggcccagactctcaggccactcggccgcaattaacccgcgtctctgcgcctttttaggcccctccccctcggtcgtgcccttgtcatctcttaggccccgtctcaccctttcggatgcctcccctagaaccctaccactttccacccctttccgtctgttatttctcccaaacttgcgcccgcacaggcccctctggaacactcctgccccgtagtgcccctcgtccccgctccgtagagaaagagcgtgcgtgccgcgcatttctggcctggggagcgggtggagtaaacctgcgggaaccattttacgacaacgtgcggctgtgcggtgtggctgacggcaacgccgctgctcttggagaggtcactccggagacggcgttggttttggggtgtggggggttggtggcactatgtggcgcgtctgtgcgcgacgggctcagaatgtagccccatgggcgggactcgaggctcggtggacggccttgcaggaggtacccggaactccacgagtgacctcgcgatctggcccggctcccgctcgtcgcaacagcgtgactacagggtatggcggggtccgggcactgtgcggctggacccccagttctggggccacgccgcggaaccgcttactgctgcagcttttggggtcgcccggccgccgctattacagtcttcccccgcatcagaaggttccattgccttctctttcccccacaatgcaggcaggcaccatagcccgttgggaaaaaaaagagggggacaaaatcaatgaaggtgacctaattgcagaggttgaaactgataaagccactgttggatttgagagcctggaggagtgttatatggcaaagatacttgttgctgaaggtaccagggatgttcccatcggagcgatcatctgtatcacagttggcaagcctgaggatattgaggcctttaaaaattatacactggattcctcagcagcacctaccccacaagcggccccagcaccaacccctgctgccactgcttcgccacctacaccttctgctcaggctcctggtagctcatatccccctcacatgcaggtacttcttcctgccctctctcccaccatgaccatgggcacagttcagagatgggaaaaaaaagtgggtgagaagctaagtgaaggagacttactggcagagatagaaactgacaaagccactataggttttgaagtacaggaagaaggttatctggcaaaaatcctggtccctgaaggcacaagagatgtccctctaggaaccccactctgtatcattgtagaaaaagaggcagatatatcagcatttgctgactataggccaaccgaagtaacagatttaaaaccacaagtgccaccacctaccccacccccggtggccgctgttcctccaactccccagcctttagctcctacaccttcagcaccctgcccagctactcctgctggaccaaagggaagggtgtttgttagccctcttgcaaagaagttggcagtagagaaagggattgatcttacacaagtaaaagggacaggaccagatggtagaatcaccaagaaggatatcgactcttttgtgcctagtaaagttgctcctgctccggcagctgttgtgcctcccacaggtcctggaatggcaccagttcctacaggtgtcttcacagatatcccaatcagcaacattcgtcgggttattgcacagcgattaatgcaatcaaagcaaaccatacctcattattacctttctatcgatgtaaatatgggagaagttttgttggtacggaaagaacttaataagatattagaagggagaagcaaaatttctgtcaatgacttcatcataaaagcttcagctttggcatgtttaaaagttcccgaagcaaattcttcttggatggacacagttataagacaaaatcatgttgttgatgtcagtgttgcggtcagtactcctgcaggactcatcacacctattgtgtttaatgcacatataaaaggagtggaaaccattgctaatgatgttgtttctttagcaaccaaagcaagagagggtaaactacagccacatgaattccagggtggcacttttacgatctccaatttaggaatgtttggaattaagaatttctctgctattattaacccacctcaagcatgtattttggcaattggtgcttcagaggataaactggtccctgcagataatgaaaaagggtttgatgtggctagcatgatgtctgttacactcagttgtgatcaccgggtggtggatggagcagttggagcccagtggcttgctgagtttagaaagtaccttgaaaaacctatcactatgttgttgtaactaactcaagaatttctaaactctcccaggtcacactgattcattcttaacaagatatttatatgttattaaacaggtggttctttttattttaaccagttatttttattattgagtctgtccagataagttatttataatgggcattactgaatttttaaaatgccgattacacccaaatattgtgcacatttaataatcagacaccagatttttagctctgtactcctaattaagggacatgtatgtggccttgcctagccctttggtgataagtacttcctctaggaaatgtacgataggtagaattgtggttccctaaagacaagtacataaaggtgaccctgatgaaaccttgaagttctgaaatttaactgcctaaaatgttctccttagatgtgagagaaagagaaatcagaaaaattaattctcttgggggaagggcttgaattgaagctttactttagaatttagccctggtttgaaattttccattacatgatcttggtttatcatcgatgggaagggtagaaaacttcaaggaaaataagtgaaattttaaaagtcagcattttcttagacctcttcagctgattgtttatttttctatgaattcctacacatggttattcccccctacttgagataatctaaatataaaccagctacttgatgtaactgagaatttgtgtggatatttatttaaacaaatgtgtaattttgagtacagaattcaacagttacctccaaaaaagaaacattgttaatataatttaacagaagttgtgaaactaaaattttctaagattaactggtagttcattgtaaatgaacataatgaacagaatttatgactccactgtggaaaatgctatcaaataactaaggaatatatatggaataagtgtacatatgtaaaatattgttactagagttagatatgtgccaaagtccatttatcccaaatcctgtctgaaaaggaggggtacattggtaaacattttggagtgcttaaaaatgccaaaaacaaaatggtaatttctactttgataaagtaaaaaagttaaatgtgtgtaaaaaagtgttctgtgtccttctactccagcatcgtctcatgtaaaataagaaagccctaaaatactattggagagaaaaaattaactaggttgctactttatttgcctaaatacttttttctattttgttagattttgcctttcttttggaaggaaggaggcgatattctggattataaaaatgaattgggaacattatcacaattccagactttctattaatatttatgtgttttaataaacgtttgaaattatttatgactacttaaaatgaatctgaccagtgcttcctggtatatgtaatatgtggagttagcccctgaaatttgctttaagtgtttcagtgttgaatctgtttctaaatattcattattacatggtacacaagtgacactccatatattccacacagacttttaccttgctgtattattatgaaaacaatacattaatttgatttttcagtaattagtaattttaggttgaagattatccaaaagaaacaagcttatcacaagggaccatcatcaatatgatccaaatctggttcaaacattcaaaacttcaaagataattcatctttcgctaatgcttgtggttctgttgttcccttgaaaaaaaataaaaacagttgccttctaataaacattgttgagttaaaaattaatctgagctataatctaaatcgattcagtctcttaccagaactgaaagaaaaaagttagaaatagtgtttttggttcatatgattatttaaaaattaaagtataaatcttcaa

SEQ ID NO: 8329 - DNA, 1352 bp, Homo sapiens
  source 1..1352: mol_type = unassigned DNA
gctgctcttggagaggtcactccggagacggcgttggttttggggtgtggggggttggtggcactatgtggcgcgtctgtgcgcgacgggctcagaatgtagccccatgggcgggactcgaggctcggtggacggccttgcaggaggtacccggaactccacgagtgacctcgcgatctggcccggctcccgctcgtcgcaacagcgtgactacagggtatggcggggtccgggcactgtgcggctggacccccagttctggggccacgccgcggaaccgcttactgctgcagcttttggggtcgcccggccgccgctattacagtcttcccccgcatcagaaggttccattgccttctctttcccccacaatgcaggcaggcaccatagcccgttgggaaaaaaaagagggggacaaaatcaatgaaggtgacctaattgcagaggttgaaactgataaagccacagttggcaagcctgaggatattgaggcctttaaaaattatacactggattcctcagcagcacctaccccacaagcggccccagcaccaacccctgctgccactgcttcgccacctacaccttctgctcaggctcctggtagctcatatccccctcacatgcaggtacttcttcctgccctctctcccaccatgaccatgggcacagttcagagatgggaaaaaaaagtgggtgagaagctaagtgaaggagacttactggcagagatgtccctctaggaaccccactctgtatcattgtagaaaaagaggcagatatatcagcatttgctgactataggccaaccgaagtaacagatttaaaaccacaagtgccaccacctaccccacccccggtggccgctgttcctccaactccccagcctttagctcctacaccttcagcaccctgcccagctactcctgctggaccaaagggaagggtgtttgttagccctcttgcaaagaagttggcagtagagaaagggattgatcttacacaagtaaaagggacaggaccagatggtagaatcaccaagaaggatatcgactcttttgtgcctagtaaagttgctcctgctccggcagctgttgtgcctcccacaggtcctggaatggcaccagttcctacaggtgtcttcacagatatcccaatcagcaacattcgtcgggttattgcacagcgattaatgcaatcaaagcaaaccatacctcattattacctttctatcgatgtaaatatgggagaagttttgttggtacggaaagaacttaataagatattagaagggagaagcaaaatttctgtcaatgacttcatcataaaagcttcagctttggcatgtttaa

SEQ ID NO: 8330 - DNA, 1766 bp, Homo sapiens
  source 1..1766: mol_type = unassigned DNA
cccgctcgtcgcaacagcgtgactacagggtatggcggggtccgggcactgtgcggctggacccccagttctggggccacgccgcggaaccgcttactgctgcagcttttggggtcgcccggccgccgctattacagtcttcccccgcatcagaaggttccattgccttctctttcccccacaatgcaggcaggcaccatagcccgttgggaaaaaaaagagggggacaaaatcaatgaaggagacttactggcagagatagaaactgacaaagccactataggttttgaagtacaggaagaaggttatctggcaaaaatcctggtccctgaaggcacaagagatgtccctctaggaaccccactctgtatcattgtagaaaaagaggcagatatatcagcatttgctgactataggccaaccgaagtaacagatttaaaaccacaagtgccaccacctaccccacccccggtggccgctgttcctccaactccccagcctttagctcctacaccttcagcaccctgcccagctactcctgctggaccaaagggaagggtgtttgttagccctcttgcaaagaagttggcagtagagaaagggattgatcttacacaagtaaaagggacaggaccagatggtagaatcaccaagaaggatatcgactcttttgtgcctagtaaagttgctcctgctccggcagctgttgtgcctcccacaggtcctggaatggcaccagttcctacaggtgtcttcacagatatcccaatcagcaacattcgtcgggttattgcacagcgattaatgcaatcaaagcaaaccatacctcattattacctttctatcgatgtaaatatgggagaagttttgttggtacggaaagaacttaataagatattagaagggagaagcaaaatttctgtcaatgacttcatcataaaagcttcagctttggcatgtttaaaagttcccgaagcaaattcttcttggatggacacagttataagacaaaatcatgttgttgatgtcagtgttgcggtcagtactcctgcaggactcatcacacctattgtgtttaatgcacatataaaaggagtggaaaccattgctaatgatgttgtttctttagcaaccaaagcaagagagggtaaactacagccacatgaattccagggtggcacttttacgatctccaatttaggaatgtttggaattaagaatttctctgctattattaacccacctcaagcatgtattttggcaattggtgcttcagaggataaactggtccctgcagataatgaaaaagggtttgatgtggctagcatgatgtctgttacactcagttgtgatcaccgggtggtggatggagcagttggagcccagtggcttgctgagtttagaaagtaccttgaaaaacctatcactatgttgttgtaactaactcaagaatttctaaactctcccaggtcacactgattcattcttaacaagatatttatatgttattaaacaggtggttctttttattttaaccagttatttttattattgagtctgtccagataagttatttataatgggcattactgaatttttaaaatgccgattacacccaaatattgtgcacatttaataatcagacaccagatttttagctctgtactcctaattaagggacatgtatgtggccttgcctagccctttggtgataagtacttcctctaggaaatgtacgataggtagaattgtggttccctaaagac

SEQ ID NO: 8331 - DNA, 1479 bp, Homo sapiens
  source 1..1479: mol_type = unassigned DNA
tatatccggtgtccgcccgccctcggctcctccgccgtgatgctgtcccgatcccgctgtgtgtctcgggcgttcagccgctcgctctccgccttccagaaggggtctccttatgccagggaccaggttaccctaacagcaggaaggttgtaggatgacttggttacagtcaaaaccccagcgtttgcagaatctgtcacagagggagatgtcaggtgggagaaagacatctgtgcaggttccatcaccagcaaatggcgtgattgaagctcttttggtacctgatgggggaaaagtcgaaggaggcactccacttttcacactcaggaaaactggtgctgctcctgctaaggccaagccggctgaagctcctgctgctgcagccccaaaagcagaacctacagcagcggcagttcctccccctgcagcacccatacccactcagatgccaccggtgccctcgccctcacagcctccttctggcaaacctgtgtctgcagtaaaacccactgttgccccaccactagctgagccaggagctggcaaaggtctgcgttcagaacatcgggagaaaatgaacaggatgcggcagcgcattgctcagcgtctgaaggaggcccagaatacatgtgcaatgctgacaacttttaatgagattgacatgagtaacatccaggagatgagggctcggcacaaagaggcttttttgaagaaacataacctcaaactaggcttcatgtcggcatttgtgaaggcctcagcctttgccttgcaggaacagcctgttgtaaatgcagtgattgacgacacaaccaaagaggtggtgtatagggattatattgacatcagtgttgcagtggccaccccacggggtctggtggttccagtcatcaggaatgtggaagctatgaattttgcagatattgaacggaccatcactgaactgggagagaaggcccgaaagaatgaacttgccattgaagatatggatggcggtaccttcaccattagcaatggaggcgtttttggctcgctctttggaacacccattatcaacccccctcagtctgccatcctggggatgcatggcatctttgacaggccagtggctataggaggcaaggtagaggtgcggcccatgatgtacgtggcactgacctatgatcaccggctgattgatggcagagaggctgtgactttcctccgcaaaatcaaggcagcggtagaggatcccagagtcctcctcctggatctttaggaggaacccacacaccctacaagttgatcatgcaggaactgaaaaccagtcttctccctgtcccctcatgggtcccgggttagcctggtgacaggcagacacatgctgttggcctcaagcaaggaagcagagcactgtgtaaccagcagtcacaggtcttttcttggcgttcctgccaggctctccctctctgcacctgtctcatagcctcgaatatctta

SEQ ID NO: 8332 - DNA, 2838 bp, Homo sapiens
  source 1..2838: mol_type = unassigned DNA
acttccggttgttgtccggccctatatccggtgtccgcccgccctcggctcctccgccgtgatgctgtcccgatcccgctgtgtgtctcgggcgttcagccgctcgctctccgccttccagaaggggaactgccctctagggagacgttccctgcctggggtctccttatgccagggaccaggttaccctaacagcaggaaggttgtcattaacaacagtgtcttcagtgttcgctttttcagaactacagctgtatgcaaggatgacttggttacagtcaaaaccccagcgtttgcagaatctgtcacagagggagatgtcaggtgggagaaagctgttggagacacagttgcagaagatgaagtggtttgtgagattgaaactgacaagacatctgtgcaggttccatcaccagcaaatggcgtgattgaagctcttttggtacctgatgggggaaaagtcgaaggaggcactccacttttcacactcaggaaaactggtgctgctcctgctaaggccaagccggctgaagctcctgctgctgcagccccaaaagcagaacctacagcagcggcagttcctccccctgcagcacccatacccactcagatgccaccggtgccctcgccctcacagcctccttctggcaaacctgtgtctgcagtaaaacccactgttgccccaccactagctgagccaggagctggcaaaggtctgcgttcagaacatcgggagaaaatgaacaggatgcggcagcgcattgctcagcgtctgaaggaggcccagaatacatgtgcaatgctgacaacttttaatgagattgacatgagtaacatccaggagatgagggctcggcacaaagaggcttttttgaagaaacataacctcaaactaggcttcatgtcggcatttgtgaaggcctcagcctttgccttgcaggaacagcctgttgtaaatgcagtgattgacgacacaaccaaagaggtggtgtatagggattatattgacatcagtgttgcagtggccaccccacggggtctggtggttccagtcatcaggaatgtggaagctatgaattttgcagatattgaacggaccatcactgaactgggagagaaggcccgaaagaatgaacttgccattgaagatatggatggcggtaccttcaccattagcaatggaggcgtttttggctcgctctttggaacacccattatcaacccccctcagtctgccatcctggggatgcatggcatctttgacaggccagtggctataggaggcaaggtagaggtgcggcccatgatgtacgtggcactgacctatgatcaccggctgattgatggcagagaggctgtgactttcctccgcaaaatcaaggcagcggtagaggatcccagagtcctcctcctggatctttaggaggaacccacacaccctacaagttgatcatgcaggaactgaaaaccagtcttctccctgtcccctcatgggtcccgggttagcctggtgacaggcagacacatgctgttggcctcaagcaaggaagcagagcactgtgtaaccagcagtcacaggtcttttcttggcgttcctgccaggctctccctctctgcacctgtctcatagcctcgaatatcttaattccttaggcttaagagagagagccttaatggatgctcattcatattcctgcctttcttccatcagctctctgcaaagatgattttgcttttccctagtgctggtatactatagagaaacccctggggaccatgtgattaagttcctatcttttgaaagtttgttctgcagagacttctaggaggatgctgtgcctcccaagctcagagcagcctctgtcctggctgtgcacattctcccttgattccacttgtgtggagggattgaacacaggcaaagaggtgctgctttgcttcttcaatggcaccttcattctccgttgtcattgacttcaagatgcctcttctacctcttccaggaagcacaggccaggggatctgggtgtgtgagtgggaggagagggcagaggtcccctgaggtcatgcattgtaatcatcatagaaggagagcccaggcctgccctcacgctctccatcataggctgacaccaagaagactcgtcttggcacaatctcacacagctggggctgtagcaaccctttccaacccctttgctggttgctgggcctcattctagcaccttgttcttagagcagattctagcacatcatggcagtgggaccaagcgtggtcccgaggaagggccagagcctggtagagactagggaagggaggtctcctctagactgactcacattgccttgagcttttcagttaagttgctgtaagcacctgggctgaggaggcagtttttgttccttcctgcgttatagcggggccttgtctcttcctctgcaggacacagatctggaggacgtggactggggtaggaaaccaccctgagggtgttagtacctagtggtgaaacggatgaggtcatttctaaggtgtgttgcccgtggatctgggcacaatcattggaattccttggagccactgggattcatggctttgtatccaactgcatccaggcctgaggctgctgacgtttgacaccagggccagtagagagtgcccttttgtatcttaagccaagaagtgaggcctgggggtgggggaggggggaaggggtgggagccaatactgagtgcctgcagcatctactactctgtcttcactattcagaacttgtaactaaagtatttaaagaaactgattttaaatgcaaattaaagggcagatattctcaaaca

SEQ ID NO: 8333 - DNA, 2065 bp, Homo sapiens
  source 1..2065: mol_type = unassigned DNA
gggcttaatgacggaaggagcatggcgtggagacacctgaaaaagcgggcccaggatgctgtgatcatcctggggggaggaggacttctcttcgcctcctacctgatggccacgggagatgagcgtttctatgctgaacacctgatgccgactctgcaggggctgctggacccggagtcagcccacagactggctgttcgcttcacctccctggggctccttccacgggccagatttcaagactctgacatgctggaagtgagagttctgggccataaattccgaaatccagtaggaattgctgcaggatttgacaagcatggggaagccgtggacggactttataagatgggctttggttttgttgagataggaagtgtgactccaaaacctcaggaaggaaaccctagacccagagtcttccgcctccctgaggaccaagctgtcattaacaggtatggatttaacagtcacgggctttcagtggtggaacacaggttacgggccagacagcagaagcaggccaagctcacagaagatggactgcctctgggggtcaacttggggaagaacaagacctcagtggacgccgcggaggactacgcagaaggggtgcgcgtactgggccccctggccgactacctggtggtgaatgtgtccagccccaacactgccgggctgcggagccttcagggaaaggccgagctgcgccgcctgctgaccaaggtgctgcaggagagggatggcttgcggagagtgcacaggccggcagtcctggtgaagatcgctcctgacctcaccagccaggataaggaggacattgccagtgtggtcaaagagttgggcatcgatgggctgattgttacgaacaccaccgtgagtcgccctgcgggcctccagggtgccctgcgctctgaaacaggagggctgagtgggaagcccctccgggatttatcaactcaaaccattcgggagatgtatgcactcacccaaggccgagttcccataattggggttggtggtgtgagcagcgggcaggacgcgctggagaagatccgggcaggggcctccctggtgcagctgtacacggccctcaccttctgggggccacccgttgtgggcaaagtcaagcgggaactggaggcccttctgaaagagcagggctttggcggagtcacagatgccattggagcagatcatcggaggtgaggacagcgtctgacgggaagcctgatctggaaccttcccaaggactcaggcaagcctttgtggctggatcatgagaggagggactccatcttgagccatgtcccccagccatggcatggctgcactgtaaacgccaatcggggggtcaccaggatcaaccgcaggctttcttcagtcccttggtcagaccataaactgcatttttgattctttgtggattcaaaccctaggatccatcagtcttgcaaggacattgaatattaggaggaaaaagtcatggaaaaaataaagccatttagaacctgggtttcaacgctagccctttctggtttgccataggccctgccaagatactgcaggtccatccaggcctctgctatctgcatctgcagtgggcttcccaggaacttgactgtctttcatttgatctttatttttgtttatttaatattttaaactttattttaaaaatatttcaaacataagggcggggtgtggtggctcatgcctgtaatcccagcactttgggaggccgaggcgggcggatcacctgaggccaggagttggagaccagccaggccaccatggtgaaaccctgtctctaccaaaaatacaaaaaattagccagatattgtggcaggcacttttaatcccagctactcgggaggctgaggcaggagaattgcttgaacctgggaggcggaggttgcagtgagccaagattgcaccagtgcactccagcttgggcgacagatcaagactctgtcacacacaaaacaaacaaacaaattttcccgtttctctctgtccctttctctataacatggataaaatattcacgtcttatgtatttatt

SEQ ID NO: 8334 - DNA, 2127 bp, Homo sapiens
  source 1..2127: mol_type = unassigned DNA
atttgcagcctgaggcagagctcgggggctgtcggtggggaccttgcaggagggcaccccaagcccgcccggcccgcccaacccagcccctgcgcgcagcccgggccgagtaggaccccgcgcgcccctcgctatggcggcgccctcgcggctcctgatccgcgggggtcgcgtggtcaacgatgacttctcggaggtggccgacgtgctggtggaggacggcgtggtgcgggcactcgggcacgacctgctgcctcccgggggcgctcctgcggggctgcgggtcctcgacgccgccggcaagctcgtcctgcccggaggcatcgacacacacacgcacatgcagttccccttcatgggctcgcggtccatcgacgacttccaccagggcaccaaggctgctctctcaggaggcaccaccatgattattgatttcgccattcctcagaaaggtggctccctcattgaggccttcgagacctggcgaagctgggctgatcccaaagtttgctgcgactacagccttcatgtggcagtgacgtggtggagtgaccaggttaaagaagaaatgaaaatccttgtgcaagataaaggtgttaactctttcaagatgtttatggcctataaagatctgtacatggtgacagacctggagctgtacgaagccttctctcggtgcaaggaaattggagcaattgcccaggtccatgcggaaaatggagacttaattgcagagggagcaaagaagatgttggctctggggataacaggccctgagggccacgagctgtgccgcccagaggcagtggaggcagaggccacgctgagagccatcaccatagccagcgctgtgaactgtcctctctacattgtgcatgtgatgagcaagtctgcagctaaggtgatagcggatgcaaggagagatgggaaggtggtctatggtgaacccatagcagccagtcttggcacagatggcactcactactggaataaagaatggcaccatgcagcccaccatgtcatgggtccacctttgcgaccagacccctcaacacccgacttcctcatgaatctgttggctaatgatgatctaaccacaacagggactgataactgcactttcaacacctgccagaaagctcttgggaaggatgattttaccaagatccccaatggggtgaatggtgttgaagatcggatgtccgtaatatgggaaaaaggcgtgcatagtggtaaaatggatgaaaacagatttgtggcagttaccagcacaaatgcagccaaaatttttaatctctatccaagaaaaggaagaatagctgtaggatcagatgctgacattgttatttgggacccaaaaggcacaaggactatctcagcaaaaactcatcatcaggctgttaacttcaacattttcgagggcatggtttgccacggggtgccccttgtgactatttcaagaggcaaagtggtatatgaagccggagtgttcagtgtcacggcaggagatgggaagtttattcctcgaaaaccatttgctgaatatatttacaaacgaataaagcagcgagaccggacttgcacacctacccctgtggagcgtgcaccctataagggagaagtcgccacactgaaatccagagtgacaaaagaagatgccacagcagggaccaggaaacaggcccacccctgaagtgtgtgccatcggtaaaaaaatcagaggaaaggaggctgccattcccttcacagccaaacattgtcaacccatggagaagcaggccttattcaactccctaggatcctttagaaaaaattcaccactataggcttctttgattttctttcagaagcaattgctgtctttctcactgtgtttttgttgctgcataagattgaaggtataaatttatattattgtgatggaaaggctgtgtggaaattcattgatgatactttaaaatgtcatctttgcttgtactagatttcttacttagaatttttaaaaatcattttcttgtttaaatagtttctttttttaaaaaaatggttacattagttttaaaatagctctgtgattttactttttattgtaattaataaacattgagatcttcattttatacctta

SEQ ID NO: 8335 - DNA, 4603 bp, Homo sapiens
  source 1..4603: mol_type = unassigned DNA
aatcgctgctcgtctctctcgaagcggatggcttttgcctgagaggaaagggagtggctggcggcgcatgcgccacggtggccgacttgaaccgaggcttttattgctgtagtttatttccacccccttccctcctgtttctctctctccttctctctctctctctctctctctcttttttttccgccctagctggggctgtgttggaggagaggaagaaagagagacagaggattgcattcatccgttacgttcttgaaatttcctaatagcaagaccagcgaagcggttgcacccttttcaatcttgcaaaggaaaaaaacaaaacaaaacaaaaaaaacccaagtccccttcccggcagtttttgccttaaagctgccctcttgaaattaattttttcccaggagagagatgtcttatcaggggaagaaaaatattccacgcatcacgagcgatcgtcttctgatcaaaggaggtaaaattgttaatgatgaccagtcgttctatgcagacatatacatggaagatgggttgatcaagcaaataggagaaaatctgattgtgccaggaggagtgaagaccatcgaggcccactcccggatggtgatccccggaggaattgacgtccacactcgtttccagatgcctgatcagggaatgacgtctgctgatgatttcttccaaggaaccaaggcggccctggctgggggaaccactatgatcattgaccacgttgttcctgagcctgggacaagcctgctcgctgcctttgaccagtggagggaatgggccgacagcaagtcctgctgtgactactctctgcatgtggacatcagtgagtggcataagggcatccaggaggagatggaagcgcttgtgaaggatcacggggtaaattccttcctcgtgtacatggctttcaaagatcgcttccagctaacggattgccagatttatgaagtactgagtgtgatccgggatattggcgccatagcccaagtccacgcagaaaatggcgacatcattgcagaggagcagcagaggatcctggatctgggcatcacgggccccgagggacatgtgctgagccgacctgaggaggtcgaggccgaagccgtgaatcgtgccatcaccatcgccaaccagaccaactgcccgctgtatatcaccaaggtgatgagcaaaagctctgctgaggtcatcgcccaggcacggaagaagggaactgtggtgtatggcgagcccatcactgccagcttgggaacggacggctcccattactggagcaagaactgggccaaggctgctgcctttgtcacctccccacccttgagccctgatccaaccactccagactttctcaactccttgctgtcctgtggagacctccaggtcacgggcagtgcccattgcacgtttaacactgcccagaaggctgtaggaaaggacaacttcaccctgattccggagggcaccaatggcactgaggagcggatgtccgtcatctgggacaaggctgtggtcactgggaagatggatgagaaccagtttgtggctgtgaccagcaccaatgcagccaaagtcttcaacctttacccccggaaaggccgcattgctgtgggatccgatgccgacctggtcatctgggaccccgacagcgttaaaaccatctctgccaagacacacaacagctctctcgagtacaacatctttgaaggcatggagtgccgcggctccccactggtggtcatcagccaggggaagattgtcctggaggacggcaccctgcatgtcaccgaaggctctggacgctacattccccggaagcccttccctgattttgtttacaagcgtatcaaggcaaggagcaggctggctgagctgagaggggttcctcgtggcctgtatgacggacctgtgtgtgaagtgtctgtgacgcccaagacagtcactccagcctcctcggccaagacgtctcctgccaagcagcaggccccacctgtccggaacctgcaccagtctggattcagtttgtctggtgctcagattgatgacaacattccccgccgcaccacccagcgtatcgtggcgccccccggtggccgtgccaacatcaccagcctgggctagagctcctgggctgtgccgtccactggggactggggatgggacacctgaggacattctgagacttctttcttccttcctttttttttttttgtttttttttttaagagcctgtgatagttactgtggagcagccagttcatggggtcccccttggggccccacaccccgtctctcaccaagagttactgattttgctcatccacttccctacacatctatgggtatcacacccaagactacccaccaagctcatacagggaaccacacccaacacttagacatgcgaacaagcagcccccagcgagggtctccttcgccttcaacctcctagtgtctgttagcatcttccttttcatggggggagggaagataaagtgaattgcccagagctgcctttttcttttctttttaaaaattttaagaagttttctttgtggggctggggaggggccggggtcagggagagtcttttttttttttttttttaaatactaaattggaacatttaattccatattaatacaaggggtttgaactggacatcctaatgatgcaattacgtcatcacccagctgattccgggtggttggcaaactcatcgtgtctgtcctgagaggctccacaatgcccacccgcatcgccattctgtagtcttcagggtcagctgttgataaaggggcaggcttgcgttattggcctagattttgctgcagattaaatcctttgaggattctcttctcttttaccatttttctgcgtgctctcactctctctttctctctctagctttttaattcatgaatattttcgtgtctgtctctctctctctctgtgtttcctccagcccttgtctcggagacggtgttttcctcccttgccccattatcttttcacctcccaggtctaccatttcatggtggtcgttgggtccgcctaaaggatttgagcgtttgccattgcaagcatagtgctgtgtcatcctggtccatgtaggactggtgctaaccacctgccatcatgaggatgtgtgctagagtgtgggaccctggccaagtgcaggaatgggccatgccgtctcacccacagtatcacacgtggaaccgcagacagggcccagaagctttagaggtatgaggctgcagaaccggagagattttcctctgtgcagtgctctctggctaaagtcacggtcaaacctaaacaccgagcctcattaacccaagtgaaccaaccaaagtcaccagttcagaagtgctaagctaataggagtctgacccgagggcctgctgcttcctggttaagtatcttttgagattctagaacacatgggagctttttattttcggggaaaaaccgtatttttttcttgtccaattatttctaaagacacactacatagaaagaggccctataaactcaaaaagtcattgggaaacttaaagtctattctactttgcaagaggagaaatgtgttttatgaacgatagatcacatcagaactcctgtggggaggaaaccttataaattaaacacatggcccccttagagaccacaggtgatgtctgtctccatccttccctctccttttctgtcacctttccccctagctggctcctttggacctacccctgtccttgctgacttgtgttgcattgtattccaaacgtgtttacaggttctcttaagcaatgttgtatttgcaggcttttctgaataccaaatctgctttttgtaaagcgtaaaaacatcacaaagtaggtcattccatcaccacccttgtctctctacacattttgcctttggggatctggttggggttttgggttttttgttgttgttgtttatttgttattttaaaggtaaattgcacttttaaaaaaataattggttgacttaatatatttgctttttttctcacctgcacttagaggaaatttgaacaagttggaaaaaaacaatttttgtttcaattctaagaaacacttgcagctctagtattcacttgagtcttcctgtttttcctgtaccgggtcatggtaatttttggttgttttggttgttttcttaaaaaacaagttaaaacctgacgatttctgcaggctgtgtaagcatgtttacctgttggcttgctttgtgtgtctgttaaatgaatgtcatatgtaaatgctaaaataaatcgacagtgtctcagaactgaataactgcagtgacttgatgctctaaaacagtgtaggatttaagaatagatggtttttaatcctggaaattgtgattgtgacccatgagtggaggaactttcagttctaaagctgataaagtgtgtagccagaagagtacttttttttttgtaaccactgtcttgatggcaaaataattatggtaaaaaacaagtctcgtgtttattattccttaagaactctgtgttatattaccatggaacgcctaataaagcaaaatgtggttgtttcaggg

SEQ ID NO: 8336 - DNA, 4552 bp, Homo sapiens
  source 1..4552: mol_type = unassigned DNA
actggcagacggacggacggacggcgaggaccctacccgagcccccgagccatggccgagagaaagcaatccgggaaggcggcagaggacgaagaggtccctgctttttttaaaaacctgggctccggcagccccaagccccggcagaaattctgtggcatgttctgcccggtggaagggtcctcggagaacaagaccatcgacttcgactcgctgtcggtgggccggggctcggggcaggtggtggctcagcagcgggacgtcgcccacttgggcccggacccgcagccgccgtactcgcggcagggccggcgcgccggcggagagccatctgttgaatcgggccggaaggtggagatccggagggcctcgggcaaagaagccctgcagaacatcaacgaccagagcgatcgtcttctgatcaaaggaggtaaaattgttaatgatgaccagtcgttctatgcagacatatacatggaagatgggttgatcaagcaaataggagaaaatctgattgtgccaggaggagtgaagaccatcgaggcccactcccggatggtgatccccggaggaattgacgtccacactcgtttccagatgcctgatcagggaatgacgtctgctgatgatttcttccaaggaaccaaggcggccctggctgggggaaccactatgatcattgaccacgttgttcctgagcctgggacaagcctgctcgctgcctttgaccagtggagggaatgggccgacagcaagtcctgctgtgactactctctgcatgtggacatcagtgagtggcataagggcatccaggaggagatggaagcgcttgtgaaggatcacggggtaaattccttcctcgtgtacatggctttcaaagatcgcttccagctaacggattgccagatttatgaagtactgagtgtgatccgggatattggcgccatagcccaagtccacgcagaaaatggcgacatcattgcagaggagcagcagaggatcctggatctgggcatcacgggccccgagggacatgtgctgagccgacctgaggaggtcgaggccgaagccgtgaatcgtgccatcaccatcgccaaccagaccaactgcccgctgtatatcaccaaggtgatgagcaaaagctctgctgaggtcatcgcccaggcacggaagaagggaactgtggtgtatggcgagcccatcactgccagcttgggaacggacggctcccattactggagcaagaactgggccaaggctgctgcctttgtcacctccccacccttgagccctgatccaaccactccagactttctcaactccttgctgtcctgtggagacctccaggtcacgggcagtgcccattgcacgtttaacactgcccagaaggctgtaggaaaggacaacttcaccctgattccggagggcaccaatggcactgaggagcggatgtccgtcatctgggacaaggctgtggtcactgggaagatggatgagaaccagtttgtggctgtgaccagcaccaatgcagccaaagtcttcaacctttacccccggaaaggccgcattgctgtgggatccgatgccgacctggtcatctgggaccccgacagcgttaaaaccatctctgccaagacacacaacagctctctcgagtacaacatctttgaaggcatggagtgccgcggctccccactggtggtcatcagccaggggaagattgtcctggaggacggcaccctgcatgtcaccgaaggctctggacgctacattccccggaagcccttccctgattttgtttacaagcgtatcaaggcaaggagcaggctggctgagctgagaggggttcctcgtggcctgtatgacggacctgtgtgtgaagtgtctgtgacgcccaagacagtcactccagcctcctcggccaagacgtctcctgccaagcagcaggccccacctgtccggaacctgcaccagtctggattcagtttgtctggtgctcagattgatgacaacattccccgccgcaccacccagcgtatcgtggcgccccccggtggccgtgccaacatcaccagcctgggctagagctcctgggctgtgccgtccactggggactggggatgggacacctgaggacattctgagacttctttcttccttcctttttttttttttgtttttttttttaagagcctgtgatagttactgtggagcagccagttcatggggtcccccttggggccccacaccccgtctctcaccaagagttactgattttgctcatccacttccctacacatctatgggtatcacacccaagactacccaccaagctcatacagggaaccacacccaacacttagacatgcgaacaagcagcccccagcgagggtctccttcgccttcaacctcctagtgtctgttagcatcttccttttcatggggggagggaagataaagtgaattgcccagagctgcctttttcttttctttttaaaaattttaagaagttttctttgtggggctggggaggggccggggtcagggagagtcttttttttttttttttttaaatactaaattggaacatttaattccatattaatacaaggggtttgaactggacatcctaatgatgcaattacgtcatcacccagctgattccgggtggttggcaaactcatcgtgtctgtcctgagaggctccacaatgcccacccgcatcgccattctgtagtcttcagggtcagctgttgataaaggggcaggcttgcgttattggcctagattttgctgcagattaaatcctttgaggattctcttctcttttaccatttttctgcgtgctctcactctctctttctctctctagctttttaattcatgaatattttcgtgtctgtctctctctctctctgtgtttcctccagcccttgtctcggagacggtgttttcctcccttgccccattatcttttcacctcccaggtctaccatttcatggtggtcgttgggtccgcctaaaggatttgagcgtttgccattgcaagcatagtgctgtgtcatcctggtccatgtaggactggtgctaaccacctgccatcatgaggatgtgtgctagagtgtgggaccctggccaagtgcaggaatgggccatgccgtctcacccacagtatcacacgtggaaccgcagacagggcccagaagctttagaggtatgaggctgcagaaccggagagattttcctctgtgcagtgctctctggctaaagtcacggtcaaacctaaacaccgagcctcattaacccaagtgaaccaaccaaagtcaccagttcagaagtgctaagctaataggagtctgacccgagggcctgctgcttcctggttaagtatcttttgagattctagaacacatgggagctttttattttcggggaaaaaccgtatttttttcttgtccaattatttctaaagacacactacatagaaagaggccctataaactcaaaaagtcattgggaaacttaaagtctattctactttgcaagaggagaaatgtgttttatgaacgatagatcacatcagaactcctgtggggaggaaaccttataaattaaacacatggcccccttagagaccacaggtgatgtctgtctccatccttccctctccttttctgtcacctttccccctagctggctcctttggacctacccctgtccttgctgacttgtgttgcattgtattccaaacgtgtttacaggttctcttaagcaatgttgtatttgcaggcttttctgaataccaaatctgctttttgtaaagcgtaaaaacatcacaaagtaggtcattccatcaccacccttgtctctctacacattttgcctttggggatctggttggggttttgggttttttgttgttgttgtttatttgttattttaaaggtaaattgcacttttaaaaaaataattggttgacttaatatatttgctttttttctcacctgcacttagaggaaatttgaacaagttggaaaaaaacaatttttgtttcaattctaagaaacacttgcagctctagtattcacttgagtcttcctgtttttcctgtaccgggtcatggtaatttttggttgttttggttgttttcttaaaaaacaagttaaaacctgacgatttctgcaggctgtgtaagcatgtttacctgttggcttgctttgtgtgtctgttaaatgaatgtcatatgtaaatgctaaaataaatcgacagtgtctcagaactgaataactgcagtgacttgatgctctaaaacagtgtaggatttaagaatagatggtttttaatcctggaaattgtgattgtgacccatgagtggaggaactttcagttctaaagctgataaagtgtgtagccagaagagtacttttttttttgtaaccactgtcttgatggcaaaataattatggtaaaaaacaagtctcgtgtttattattccttaagaactctgtgttatattaccatggaacgcctaataaagcaaaatgtggttgttt

SEQ ID NO: 8337 - DNA, 4395 bp, Homo sapiens
  source 1..4395: mol_type = unassigned DNA
cttttattgctgtagtttatttccacccccttccctcctgtttctctctctccttctctctctctctctctctctctcttttttttccgccctagctggggctgtgttggaggagaggaagaaagagagacagaggattgcattcatccgttacgttcttgaaatttcctaatagcaagaccagcgaagcggttgcacccttttcaatcttgcaaaggaaaaaaacaaaacaaaacaaaaaaaacccaagtccccttcccggcagtttttgccttaaagctgccctcttgaaattaattttttcccaggagagagatgtcttatcaggggaagaaaaatattccacgcatcacgagcgatcgtcttctgatcaaaggaggtaaaattgttaatgatgaccagtcgttctatgcagacatatacatggaagatgggttgatcaagcaaataggagaaaatctgattgtgccaggaggagtgaagaccatcgaggcccactcccggatggtgatccccggaggaattgacgtccacactcgtttccagatgcctgatcagggaatgacgtctgctgatgatttcttccaaggaaccaaggcggccctggctgggggaaccactatgatcattgaccacgttgttcctgagcctgggacaagcctgctcgctgcctttgaccagtggagggaatgggccgacagcaagtcctgctgtgactactctctgcatgtggacatcagtgagtggcataagggcatccaggaggagatggaagcgcttgtgaaggatcacggggtaaattccttcctcgtgtacatggctttcaaagatcgcttccagctaacggattgccagatttatgaagtactgagtgtgatccgggatattggcgccatagcccaagtccacgcagaaaatggcgacatcattgcagaggagcagcagaggatcctggatctgggcatcacgggccccgagggacatgtgctgagccgacctgaggaggtcgaggccgaagccgtgaatcgtgccatcaccatcgccaaccagaccaactgcccgctgtatatcaccaaggtgatgagcaaaagctctgctgaggtcatcgcccaggcacggaagaagggaactgtggtgtatggcgagcccatcactgccagcttgggaacggacggctcccattactggagcaagaactgggccaaggctgctgcctttgtcacctccccacccttgagccctgatccaaccactccagactttctcaactccttgctgtcctgtggagacctccaggtcacgggcagtgcccattgcacgtttaacactgcccagaaggctgtaggaaaggacaacttcaccctgattccggagggcaccaatggcactgaggagcggatgtccgtcatctgggacaaggctgtggtcactgggaagatggatgagaaccagtttgtggctgtgaccagcaccaatgcagccaaagtcttcaacctttacccccggaaaggccgcattgctgtgggatccgatgccgacctggtcatctgggaccccgacagcgttaaaaccatctctgccaagacacacaacagctctctcgagtacaacatctttgaaggcatggagtgccgcggctccccactggtggtcatcagccaggggaagattgtcctggaggacggcaccctgcatgtcaccgaaggctctggacgctacattccccggaagcccttccctgattttgtttacaagcgtatcaaggcaaggagcaggctggctgagctgagaggggttcctcgtggcctgtatgacggacctgtgtgtgaagtgtctgtgacgcccaagacagtcactccagcctcctcggccaagacgtctcctgccaagcagcaggccccacctgtccggaacctgcaccagtctggattcagtttgtctggtgctcagattgatgacaacattccccgccgcaccacccagcgtatcgtggcgccccccggtggccgtgccaacatcaccagcctgggctagagctcctgggctgtgccgtccactggggactggggatgggacacctgaggacattctgagacttctttcttccttcctttttttttttttgtttttttttttaagagcctgtgatagttactgtggagcagccagttcatggggtcccccttggggccccacaccccgtctctcaccaagagttactgattttgctcatccacttccctacacatctatgggtatcacacccaagactacccaccaagctcatacagggaaccacacccaacacttagacatgcgaacaagcagcccccagcgagggtctccttcgccttcaacctcctagtgtctgttagcatcttccttttcatggggggagggaagataaagtgaattgcccagagctgcctttttcttttctttttaaaaattttaagaagttttctttgtggggctggggaggggccggggtcagggagagtcttttttttttttttttttaaatactaaattggaacatttaattccatattaatacaaggggtttgaactggacatcctaatgatgcaattacgtcatcacccagctgattccgggtggttggcaaactcatcgtgtctgtcctgagaggctccacaatgcccacccgcatcgccattctgtagtcttcagggtcagctgttgataaaggggcaggcttgcgttattggcctagattttgctgcagattaaatcctttgaggattctcttctcttttaccatttttctgcgtgctctcactctctctttctctctctagctttttaattcatgaatattttcgtgtctgtctctctctctctctgtgtttcctccagcccttgtctcggagacggtgttttcctcccttgccccattatcttttcacctcccaggtctaccatttcatggtggtcgttgggtccgcctaaaggatttgagcgtttgccattgcaagcatagtgctgtgtcatcctggtccatgtaggactggtgctaaccacctgccatcatgaggatgtgtgctagagtgtgggaccctggccaagtgcaggaatgggccatgccgtctcacccacagtatcacacgtggaaccgcagacagggcccagaagctttagaggtatgaggctgcagaaccggagagattttcctctgtgcagtgctctctggctaaagtcacggtcaaacctaaacaccgagcctcattaacccaagtgaaccaaccaaagtcaccagttcagaagtgctaagctaataggagtctgacccgagggcctgctgcttcctggttaagtatcttttgagattctagaacacatgggagctttttattttcggggaaaaaccgtatttttttcttgtccaattatttctaaagacacactacatagaaagaggccctataaactcaaaaagtcattgggaaacttaaagtctattctactttgcaagaggagaaatgtgttttatgaacgatagatcacatcagaactcctgtggggaggaaaccttataaattaaacacatggcccccttagagaccacaggtgatgtctgtctccatccttccctctccttttctgtcacctttccccctagctggctcctttggacctacccctgtccttgctgacttgtgttgcattgtattccaaacgtgtttacaggttctcttaagcaatgttgtatttgcaggcttttctgaataccaaatctgctttttgtaaagcgtaaaaacatcacaaagtaggtcattccatcaccacccttgtctctctacacattttgcctttggggatctggttggggttttgggttttttgttgttgttgtttatttgttattttaaaggtaaattgcacttttaaaaaaataattggttgacttaatatatttgctttttttctcacctgcacttagaggaaatttgaacaagttggaaaaaaacaatttttgtttcaattctaagaaacacttgcagctctagtattcacttgagtcttcctgtttttcctgtaccgggtcatggtaatttttggttgttttggttgttttcttaaaaaacaagttaaaacctgacgatttctgcagtgacttgatgctctaaaacagtgtaggatttaagaatagatggtttttaatcctggaaattgtgattgtgacccatgagtggaggaactttcagttctaaagctgataaagtgtgtagccagaagagtacttttttttttgtaaccactgtcttgatggcaaaataattatggtaaaaaacaagtctcgtgtttattattccttaagaactctgtgttatattaccatggaacgcctaataaagcaaaatgtggttgtttca

SEQ ID NO: 8338 - DNA, 2130 bp, Homo sapiens
  source 1..2130: mol_type = unassigned DNA
cctttctgttgctaacggaggcgatggtgatggtggtggtggttgtgggagatgcagtgatccaggattagaagtcgcatcgtttgcaaggcattaaacaggagcgcgagtgcacgaaggtagccttagagcgatcgtcttctgatcaaaggaggtaaaattgttaatgatgaccagtcgttctatgcagacatatacatggaagatgggttgatcaagcaaataggagaaaatctgattgtgccaggaggagtgaagaccatcgaggcccactcccggatggtgatccccggaggaattgacgtccacactcgtttccagatgcctgatcagggaatgacgtctgctgatgatttcttccaaggaaccaaggcggccctggctgggggaaccactatgatcattgaccacgttgttcctgagcctgggacaagcctgctcgctgcctttgaccagtggagggaatgggccgacagcaagtcctgctgtgactactctctgcatgtggacatcagtgagtggcataagggcatccaggaggagatggaagcgcttgtgaaggatcacggggtaaattccttcctcgtgtacatggctttcaaagatcgcttccagctaacggattgccagatttatgaagtactgagtgtgatccgggatattggcgccatagcccaagtccacgcagaaaatggcgacatcattgcagaggagcagcagaggatcctggatctgggcatcacgggccccgagggacatgtgctgagccgacctgaggaggtcgaggccgaagccgtgaatcgtgccatcaccatcgccaaccagaccaactgcccgctgtatatcaccaaggtgatgagcaaaagctctgctgaggtcatcgcccaggcacggaagaagggaactgtggtgtatggcgagcccatcactgccagcttgggaacggacggctcccattactggagcaagaactgggccaaggctgctgcctttgtcacctccccacccttgagccctgatccaaccactccagactttctcaactccttgctgtcctgtggagacctccaggtcacgggcagtgcccattgcacgtttaacactgcccagaaggctgtaggaaaggacaacttcaccctgattccggagggcaccaatggcactgaggagcggatgtccgtcatctgggacaaggctgtggtcactgggaagatggatgagaaccagtttgtggctgtgaccagcaccaatgcagccaaagtcttcaacctttacccccggaaaggccgcattgctgtgggatccgatgccgacctggtcatctgggaccccgacagcgttaaaaccatctctgccaagacacacaacagctctctcgagtacaacatctttgaaggcatggagtgccgcggctccccactggtggtcatcagccaggggaagattgtcctggaggacggcaccctgcatgtcaccgaaggctctggacgctacattccccggaagcccttccctgattttgtttacaagcgtatcaaggcaaggagcaggctggctgagctgagaggggttcctcgtggcctgtatgacggacctgtgtgtgaagtgtctgtgacgcccaagacagtcactccagcctcctcggccaagacgtctcctgccaagcagcaggccccacctgtccggaacctgcaccagtctggattcagtttgtctggtgctcagattgatgacaacattccccgccgcaccacccagcgtatcgtggcgccccccggtggccgtgccaacatcaccagcctgggctagagctcctgggctgtgccgtccactggggactggggatgggacacctgaggacattctgagacttctttcttccttcctttttttttttttgtttttttttttaagagcctgtgatagttactgtggagcagccagttcatggggtcccccttggggccccacaccccgtctctcaccaagagttactgattttgctcatccacttccctacacatctatgggtatcacacccaagactacccaccaagctcatacagggaaccacacccaacacttagacatgcgaacaagcagcccccagcgagggtctccttcgccttc

SEQ ID NO: 8339 - DNA, 3091 bp, Homo sapiens
  source 1..3091: mol_type = unassigned DNA
ctttcggctcccgcagccgcagcggacgccctcccagatccaactttgccgcttccccgagctcgcgctgtagccgcggggggcgtgggcagggaggggagaagcggggtcagggggagggaccgggagggtgggtcgccggctcgccagccctccttcctttctgtgcaccttgcggtgggcggcgaacggcagccgcggcagcagctagggggcttgtgcacgtttaacactgcccagaaggctgtaggaaaggacaacttcaccctgattccggagggcaccaatggcactgaggagcggatgtccgtcatctgggacaaggctgtggtcactgggaagatggatgagaaccagtttgtggctgtgaccagcaccaatgcagccaaagtcttcaacctttacccccggaaaggccgcattgctgtgggatccgatgccgacctggtcatctgggaccccgacagcgttaaaaccatctttgaaggcatggagtgccgcggctccccactggtggtcatcagccaggggaagattgtcctggaggacggcaccctgcatgtcaccgaaggctctggacgctacattccccggaagcccttccctgattttgtttacaagcgtatcaaggcaaggagcaggctggctgagctgagaggggttcctcgtggcctgtatgacggacctgtgtgtgaagtgtctgtgacgcccaagacagtcactccagcctcctcggccaagacgtctcctgccaagcagcaggccccacctgtccggaacctgcaccagtctggattcagtttgtctggtgctcagattgatgacaacattccccgccgcaccacccagcgtatcgtggcgccccccggtggccgtgccaacatcaccagcctgggctagagctcctgggctgtgccgtccactggggactggggatgggacacctgaggacattctgagacttctttcttccttcctttttttttttttgtttttttttttaagagcctgtgatagttactgtggagcagccagttcatggggtcccccttggggccccacaccccgtctctcaccaagagttactgattttgctcatccacttccctacacatctatgggtatcacacccaagactacccaccaagctcatacagggaaccacacccaacacttagacatgcgaacaagcagcccccagcgagggtctccttcgccttcaacctcctagtgtctgttagcatcttccttttcatggggggagggaagataaagtgaattgcccagagctgcctttttcttttctttttaaaaattttaagaagttttctttgtggggctggggaggggccggggtcagggagagtcttttttttttttttttttaaatactaaattggaacatttaattccatattaatacaaggggtttgaactggacatcctaatgatgcaattacgtcatcacccagctgattccgggtggttggcaaactcatcgtgtctgtcctgagaggctccacaatgcccacccgcatcgccattctgtagtcttcagggtcagctgttgataaaggggcaggcttgcgttattggcctagattttgctgcagattaaatcctttgaggattctcttctcttttaccatttttctgcgtgctctcactctctctttctctctctagctttttaattcatgaatattttcgtgtctgtctctctctctctctgtgtttcctccagcccttgtctcggagacggtgttttcctcccttgccccattatcttttcacctcccaggtctaccatttcatggtggtcgttgggtccgcctaaaggatttgagcgtttgccattgcaagcatagtgctgtgtcatcctggtccatgtaggactggtgctaaccacctgccatcatgaggatgtgtgctagagtgtgggaccctggccaagtgcaggaatgggccatgccgtctcacccacagtatcacacgtggaaccgcagacagggcccagaagctttagaggtatgaggctgcagaaccggagagattttcctctgtgcagtgctctctggctaaagtcacggtcaaacctaaacaccgagcctcattaacccaagtgaaccaaccaaagtcaccagttcagaagtgctaagctaataggagtctgacccgagggcctgctgcttcctggttaagtatcttttgagattctagaacacatgggagctttttattttcggggaaaaaccgtatttttttcttgtccaattatttctaaagacacactacatagaaagaggccctataaactcaaaaagtcattgggaaacttaaagtctattctactttgcaagaggagaaatgtgttttatgaacgatagatcacatcagaactcctgtggggaggaaaccttataaattaaacacatggcccccttagagaccacaggtgatgtctgtctccatccttccctctccttttctgtcacctttccccctagctggctcctttggacctacccctgtccttgctgacttgtgttgcattgtattccaaacgtgtttacaggttctcttaagcaatgttgtatttgcaggcttttctgaataccaaatctgctttttgtaaagcgtaaaaacatcacaaagtaggtcattccatcaccacccttgtctctctacacattttgcctttggggatctggttggggttttgggttttttgttgttgttgtttatttgttattttaaaggtaaattgcacttttaaaaaaataattggttgacttaatatatttgctttttttctcacctgcacttagaggaaatttgaacaagttggaaaaaaacaatttttgtttcaattctaagaaacacttgcagctctagtattcacttgagtcttcctgtttttcctgtaccgggtcatggtaatttttggttgttttggttgttttcttaaaaaacaagttaaaacctgacgatttctgcaggctgtgtaagcatgtttacctgttggcttgctttgtgtgtctgttaaatgaatgtcatatgtaaatgctaaaataaatcgacagtgtctcag

SEQ ID NO: 8340 - DNA, 5476 bp, Homo sapiens
  source 1..5476: mol_type = unassigned DNA
tgctccgcgcgctagctggctgtgtggctcgctggctcgctagggacaagcaggaatcggagcagcactgccgcctctggcgcgaaggctcaggcgcctcctcccgccacagtcactgtggctcggcgcacgctgccggcggctgccctttccgcctctggggaagaaaaacccgcgggccgctttcgtgcttgaaccatggcctcgggccggaggggctgggacagctcccacgaagacgatctgcccgtgtacctggccaggccgggcaccacggaccaggtcccgcggcagaaatacggcggcatgttctgcaacgtggagggcgccttcgagagcaagacgctggatttcgatgccctcagcgtggggcagcggggcgcgaagactcctcggagcggccagggcagcgaccgaggatcggggagtcggcccgggatcgagggggacaccccgcgcaggggccaaggccgggaagagagcagggagcccgcgcccgcctcccccgcccccgccggggtagagatccggagcgccaccggcaaagaggtgttgcagaacctcggccccaaggacaagagtgaccgtctccttatcaagggaggcagaatcgtcaatgatgatcagtccttttatgctgatatttacatggaagatggcttaataaaacaaattggagacaatctgattgttcctggaggagtgaagaccattgaagccaatgggaagatggtgatccctggaggcatcgatgtccatactcacttccagatgccatataagggaatgaccacagtagatgacttcttccaagggacaaaggcggccttagcaggtggcaccaccatgatcattgaccatgtggtgcctgagcctgagtccagcctgactgaggcctatgagaaatggagagagtgggctgatgggaagagttgctgtgactatgccctgcatgtggacatcacccactggaatgacagcgtcaagcaggaagtgcagaacctcatcaaggacaaaggggttaactccttcatggtttatatggcttataaggatttgtatcaagtatctaacacagagctctatgagatcttcacctgcctgggagagctgggggccattgctcaagttcatgctgagaatggggatatcattgcccaggagcaaacccgcatgttggaaatggggataactggcccagaaggccatgtactgagcaggccagaagagctggaagctgaggctgtgttccgtgccatcaccattgccagccaaaccaattgccctctctacgtcacaaaggtcatgagcaagagtgcagctgacctcatctcacaagccaggaaaaaaggaaatgtagtctttggtgagcccatcactgccagcctcggcatagatggaacccattattggagcaagaactgggccaaggcggctgcatttgtgacatccccacccctgagccctgacccaactactccggactacatcaactccttgctggccagcggggatctgcagctatctgggagtgcccactgcaccttcagcactgcccagaaagcaattgggaaggacaacttcacagccattcctgagggcaccaatggtgtggaggagcggatgtctgtcatctgggacaaggctgtggccacagggaaaatggacgaaaaccagttcgtggctgtgacaagcacaaacgctgccaagatcttcaacctgtatccccgcaagggaagaatatctgtgggttctgacagcgacctcgtcatctgggatccagatgctgtgaagatcgtctctgccaagaaccaccagtctgcggcagagtacaacatctttgaagggatggagctgcgcggggctcctctggttgtcatctgccagggcaagatcatgctggaagatggcaacctgcacgtgacccagggggctggccgcttcataccctgcagcccgttctccgactatgtctacaagcgcattaaagcacggaggaagatggcagacctgcatgccgtcccaaggggcatgtacgatgggcctgtgtttgacctgaccaccacccccaaaggtggcacccccgcaggctctgctcggggctctcctactcggccgaacccacctgtgaggaatcttcatcagtcgggatttagcctgtcaggcacccaagtggatgagggggttcgctcagccagcaagcgcatcgtggcgcccccaggcggccgttctaatatcacatctctgagttaagcaagccttcctcaaagagaggggcagaagcaagaagagattgttttgaagccaaaatggtacaccgatatttaagaaggaaagcgaatccaaacggttgtgatctaaagaatcaataagcctcaagccttatgtttctccaatgttacgctcgcttgcctagctttacgaatattgctttgttttctgtttatgcatagccttgatttgtttgactcccctccccccatttacatgcatgcaatcagacaggccactaaggtaaaagagtctgctctatcatagtgttgagagcgtgtgtagtgctgcatcttatgacaaggggacagacaagctgggacgtcagggaaatgaacaaaagggacgcaggttatttggggtgagtgggtggtgggagcctggagcaaggtggagggtgcagaggggctggggtagggcatgtaggagggaggtgggtgggtcaggtgagtggaaggggtgttgtatattgtgttgatgacgtacgttatttccatggaagatagccgctgtggcagctgtcacatcaccacagctccctagggtctgccgagaaggcaggcagtctttgggttctgttctttgtcacgtcccctacaagtaaattttgtttctttgaacgtttattaaaatgccaagacccaaccatttcttccacctgcttgattgtgccagtgtttgctcaggcctctttcttagtgttgctttcaaatccttctctttcctgggttgggaaggccaggcagggacagagcaaatgacacttctcttcctcttgccctccctgcctctttggtgctcttaaaagccagcagctgagaacatagcacaggcccacgtggtgagggcacccacagcttaaagacgcttccttctaaacacggcgaggtcacctctcactcttctgtctttgcaaaccgagaagagtggcatgcttctggcatcccaagtcaggattttagctcagatgaggcagaatgaagggcctctcttacaggcagtttgtgtttgattctctcgatcctggcacatccatgataaataggagtttttgaaagttggttttattaggtgttccctaatttttaccgtaataggtcatctcagcttatatgaaagtcaagtggggaactgggaaagccaaagtcagtcttgagcagagggagcacattttgtggacctggttccacctttccattccaaaccacctgtttccccttccattagcagaaactctgggggaactttgtgtctcagtcctagaatctccccaagtgagtggaagtgacatgatgcagtcttcctcatggggcacctgaaagaaattagtgtgggtgcttcgatctaccttgtctgtcagagttgaatatctctttccctatcatgctgcttctgaaaattcagttttggagcaagtcctgtgagcaagataagaatctatagaaccaagatgctcattttcagaagaaatatgttcaacctgggatcagacttccatgctctggggaatccaagtggtagcacctgtaaccctgtgtactaagtgctttgaagagaagagcaggcctcagacaccttttaattgcttaggagaaaccattgtctctgactgcaggtttgaataagttgaagaccagagaaaagtacacactgggctacaaaggaatttggagatagccaaggaacaggatttcccctagcaagctaccttctgttcaaatcatgaaaaaagactatttccccttagaatagggaagcttgctattttaaagctcttgtagtgcttttcttttaagggagatgtagtaaaagggaaaatgtagctcttagtttacacttcaaagatgtgggggtctttcagagaactaagaataacagttttatgtgcagagagagtttgccagatctgaagcatatacctcattgactaggctgttactttgggataggttgcagtaccagccacagccagcagatagaggaaaagacacacataaactcgcttctgagcgtccacttctgcactctctgctctgctgttactcagcccctgagtctgactcatctctgcacaacctctctgtgccatgaagataagtcttccatggccaaatcggtcatccgcactgcccttgggacttccgaagtgaaccattccaccagaacctttgattctgcacaagatttccttgctctgggaacaacccccaaatgcccttgggaggaacaacatgagctcaggaagcctctctttcttcacttaccattactaactctccaagcatagaaatccctgggaattgcgagaataactcccactattttaaaatttatattcagatttgtttcgtttcataagacacatcaaacaggcctatacaaaaggtttaggaaaagaaaacaatggtgagtcccggccctcttcgaattcactggcacctcatgcaagtgtaggaaggcacgctggatcgtctatctgattccaaagctgtcctttgccatctcatcccttggcctgccccccaaccctgaggatgcccctgccatccccccaacctcctcatattgcctctgaacccagatggcaatccatcccggttctctctgagggccacgggcttgggtagtggaaagggtgtttgggaaattgttaaatcagttacccgtagtagagctatttcttgtacttctaagttttctagaagtggaaggattgtagtcatcctgaaaatgggtttacttcaaaatccctcagccttgttcttcacgactgtctatactgagagtgtcatgtttccacaaagggctgacacctgagcctggattttcactcatccctgagaagccctttccagtagggtgggcaattcccaacttccttgccacaagcttcccaggctttctcccctggaaaactccagcttgagtcccagatacactcatgggctgccctgggcagccagcattcattgtaagttccctctttgaaaactggtgtgtgggtgttcagttctgtgtctggtgggtatggacagacagtaatctcctgtgatctgtgctagctgtgaggcagctctggaacgtgaagagctgtttggtttgaaccgtgaacaaaactgtgttttgagtttagctgacattaaagaaaaaagttcatcacgtgactgttaatgtaaacctggttattaaaataactatgaaatta

SEQ ID NO: 8341 - DNA, 5309 bp, Homo sapiens
  source 1..5309: mol_type = unassigned DNA
ggcagatgcaaagaggaaaatcaatagggataagagagaagagggaggagtcgcagatcagccattcttgtcttatggggtcccagctggcgcagcaaaagaaaaaaaaaaacaaaacccgggcgtgaacgcgggtggaggagggtgtgcgtgggggggcgggggtgaaagggggaccggggagatttactattgtctctggcagccgccgcgggagcccgggaggggggcggaggcgggcggaggcggcggcgcggccagcgcaccattcactccacctgatctcggggcgctgtgcgctgaggaaggcgcgggcgagccggagcagaagaaggagggagggagccagccgctgcagccaccaccgccaccatgtcctaccaaggcaagaagaacatcccgcggatcacgagtgaccgtctccttatcaagggaggcagaatcgtcaatgatgatcagtccttttatgctgatatttacatggaagatggcttaataaaacaaattggagacaatctgattgttcctggaggagtgaagaccattgaagccaatgggaagatggtgatccctggaggcatcgatgtccatactcacttccagatgccatataagggaatgaccacagtagatgacttcttccaagggacaaaggcggccttagcaggtggcaccaccatgatcattgaccatgtggtgcctgagcctgagtccagcctgactgaggcctatgagaaatggagagagtgggctgatgggaagagttgctgtgactatgccctgcatgtggacatcacccactggaatgacagcgtcaagcaggaagtgcagaacctcatcaaggacaaaggggttaactccttcatggtttatatggcttataaggatttgtatcaagtatctaacacagagctctatgagatcttcacctgcctgggagagctgggggccattgctcaagttcatgctgagaatggggatatcattgcccaggagcaaacccgcatgttggaaatggggataactggcccagaaggccatgtactgagcaggccagaagagctggaagctgaggctgtgttccgtgccatcaccattgccagccaaaccaattgccctctctacgtcacaaaggtcatgagcaagagtgcagctgacctcatctcacaagccaggaaaaaaggaaatgtagtctttggtgagcccatcactgccagcctcggcatagatggaacccattattggagcaagaactgggccaaggcggctgcatttgtgacatccccacccctgagccctgacccaactactccggactacatcaactccttgctggccagcggggatctgcagctatctgggagtgcccactgcaccttcagcactgcccagaaagcaattgggaaggacaacttcacagccattcctgagggcaccaatggtgtggaggagcggatgtctgtcatctgggacaaggctgtggccacagggaaaatggacgaaaaccagttcgtggctgtgacaagcacaaacgctgccaagatcttcaacctgtatccccgcaagggaagaatatctgtgggttctgacagcgacctcgtcatctgggatccagatgctgtgaagatcgtctctgccaagaaccaccagtctgcggcagagtacaacatctttgaagggatggagctgcgcggggctcctctggttgtcatctgccagggcaagatcatgctggaagatggcaacctgcacgtgacccagggggctggccgcttcataccctgcagcccgttctccgactatgtctacaagcgcattaaagcacggaggaagatggcagacctgcatgccgtcccaaggggcatgtacgatgggcctgtgtttgacctgaccaccacccccaaaggtggcacccccgcaggctctgctcggggctctcctactcggccgaacccacctgtgaggaatcttcatcagtcgggatttagcctgtcaggcacccaagtggatgagggggttcgctcagccagcaagcgcatcgtggcgcccccaggcggccgttctaatatcacatctctgagttaagcaagccttcctcaaagagaggggcagaagcaagaagagattgttttgaagccaaaatggtacaccgatatttaagaaggaaagcgaatccaaacggttgtgatctaaagaatcaataagcctcaagccttatgtttctccaatgttacgctcgcttgcctagctttacgaatattgctttgttttctgtttatgcatagccttgatttgtttgactcccctccccccatttacatgcatgcaatcagacaggccactaaggtaaaagagtctgctctatcatagtgttgagagcgtgtgtagtgctgcatcttatgacaaggggacagacaagctgggacgtcagggaaatgaacaaaagggacgcaggttatttggggtgagtgggtggtgggagcctggagcaaggtggagggtgcagaggggctggggtagggcatgtaggagggaggtgggtgggtcaggtgagtggaaggggtgttgtatattgtgttgatgacgtacgttatttccatggaagatagccgctgtggcagctgtcacatcaccacagctccctagggtctgccgagaaggcaggcagtctttgggttctgttctttgtcacgtcccctacaagtaaattttgtttctttgaacgtttattaaaatgccaagacccaaccatttcttccacctgcttgattgtgccagtgtttgctcaggcctctttcttagtgttgctttcaaatccttctctttcctgggttgggaaggccaggcagggacagagcaaatgacacttctcttcctcttgccctccctgcctctttggtgctcttaaaagccagcagctgagaacatagcacaggcccacgtggtgagggcacccacagcttaaagacgcttccttctaaacacggcgaggtcacctctcactcttctgtctttgcaaaccgagaagagtggcatgcttctggcatcccaagtcaggattttagctcagatgaggcagaatgaagggcctctcttacaggcagtttgtgtttgattctctcgatcctggcacatccatgataaataggagtttttgaaagttggttttattaggtgttccctaatttttaccgtaataggtcatctcagcttatatgaaagtcaagtggggaactgggaaagccaaagtcagtcttgagcagagggagcacattttgtggacctggttccacctttccattccaaaccacctgtttccccttccattagcagaaactctgggggaactttgtgtctcagtcctagaatctccccaagtgagtggaagtgacatgatgcagtcttcctcatggggcacctgaaagaaattagtgtgggtgcttcgatctaccttgtctgtcagagttgaatatctctttccctatcatgctgcttctgaaaattcagttttggagcaagtcctgtgagcaagataagaatctatagaaccaagatgctcattttcagaagaaatatgttcaacctgggatcagacttccatgctctggggaatccaagtggtagcacctgtaaccctgtgtactaagtgctttgaagagaagagcaggcctcagacaccttttaattgcttaggagaaaccattgtctctgactgcaggtttgaataagttgaagaccagagaaaagtacacactgggctacaaaggaatttggagatagccaaggaacaggatttcccctagcaagctaccttctgttcaaatcatgaaaaaagactatttccccttagaatagggaagcttgctattttaaagctcttgtagtgcttttcttttaagggagatgtagtaaaagggaaaatgtagctcttagtttacacttcaaagatgtgggggtctttcagagaactaagaataacagttttatgtgcagagagagtttgccagatctgaagcatatacctcattgactaggctgttactttgggataggttgcagtaccagccacagccagcagatagaggaaaagacacacataaactcgcttctgagcgtccacttctgcactctctgctctgctgttactcagcccctgagtctgactcatctctgcacaacctctctgtgccatgaagataagtcttccatggccaaatcggtcatccgcactgcccttgggacttccgaagtgaaccattccaccagaacctttgattctgcacaagatttccttgctctgggaacaacccccaaatgcccttgggaggaacaacatgagctcaggaagcctctctttcttcacttaccattactaactctccaagcatagaaatccctgggaattgcgagaataactcccactattttaaaatttatattcagatttgtttcgtttcataagacacatcaaacaggcctatacaaaaggtttaggaaaagaaaacaatggtgagtcccggccctcttcgaattcactggcacctcatgcaagtgtaggaaggcacgctggatcgtctatctgattccaaagctgtcctttgccatctcatcccttggcctgccccccaaccctgaggatgcccctgccatccccccaacctcctcatattgcctctgaacccagatggcaatccatcccggttctctctgagggccacgggcttgggtagtggaaagggtgtttgggaaattgttaaatcagttacccgtagtagagctatttcttgtacttctaagttttctagaagtggaaggattgtagtcatcctgaaaatgggtttacttcaaaatccctcagccttgttcttcacgactgtctatactgagagtgtcatgtttccacaaagggctgacacctgagcctggattttcactcatccctgagaagccctttccagtagggtgggcaattcccaacttccttgccacaagcttcccaggctttctcccctggaaaactccagcttgagtcccagatacactcatgggctgccctgggcagccagcattcattgtaagttccctctttgaaaactggtgtgtgggtgttcagttctgtgtctggtgggtatggacagacagtaatctcctgtgatctgtgctagctgtgaggcagctctggaacgtgaagagctgtttggtttgaaccgtgaacaaaactgtgttttgagtttagctgacattaaagaaaaaagttcatcacgtgactgttaatgtaaacctggttattaaaataactatgaaattac

SEQ ID NO: 8342 - DNA, 539 bp, Homo sapiens
  source 1..539: mol_type = unassigned DNA
gcggccgccgcattcgacccgcgccatggcagaggagagcgggtgccgggagggaagccgggaaccgtctccattctgaaactagggcggggaagccgccgcgggagcccgggaggggggcggaggcgggcggaggcggcggcgcggccagcgcaccattcactccacctgatctcggggcgctgtgcgctgaggaaggcgcgggcgagccggagcagaagaaggagggagggagccagccgctgcagccaccaccgccaccatgtcctaccaaggcaagaagaacatcccgcggatcacgagtgaccgtctccttatcaagggaggcagaatcgtcaatgatgatcagtccttttatgctgatatttacatggaagatggcttaataaaacaaattggagacaatctgattgttcctggaggagtgaagaccattgaagccaatgggaagatggtgatccctggaggcatcgatgtccatactcacttccagatgccatataagggaatgaccacagtagatgacttcttccaaggga

SEQ ID NO: 8343 - DNA, 1043 bp, Homo sapiens
  source 1..1043: mol_type = unassigned DNA
actccacctgatctcggggcgctgtgcgctgaggaaggcgcgggcgagccggagcagaagaaggagggagggagccagccgctgcagccaccaccgccacagggaaaatggacgaaaaccagttcgtggctgtgacaagcacaaacgctgccaagatcttcaacctgtatccccgcaagggaagaatatctgtgggttctgacagcgacctcgtcatctgggatccagatgctgtgaagatcgtctctgccaagaaccaccagtctgcggcagagtacaacatctttgaagggatggagctgcgcggggctcctctggttgtcatctgccagggcaagatcatgctggaagatggcaacctgcacgtgacccagggggctggccgcttcataccctgcagcccgttctccgactatgtctacaagcgcattaaagcacggaggaagatggcagacctgcatgccgtcccaaggggcatgtacgatgggcctgtgtttgacctgaccaccacccccaaaggtggcacccccgcaggctctgctcggggctctcctactcggccgaacccacctgtgaggaatcttcatcagtcgggatttagcctgtcaggcacccaagtggatgagggggttcgctcagccagcaagcgcatcgtggcgcccccaggcggccgttctaatatcacatctctgagttaagcaagccttcctcaaagagaggggcagaagcaagaagagattgttttgaagccaaaatggtacaccgatatttaagaaggaaagcgaatccaaacggttgtgatctaaagaatcaataagcctcaagccttatgtttctccaatgttacgctcgcttgcctagctttacgaatattgctttgttttctgtttatgcatagccttgatttgtttgactcccctccccccatttacatgcatgcaatcagacaggccactaaggtaaaagagtctgctctatcatagtgttgagagcgtgtgtagtgctgcatcttatgacaaggggacagacaagctgggacgtca

SEQ ID NO: 8344 - DNA, 2715 bp, Homo sapiens
  source 1..2715: mol_type = unassigned DNA
gcccagcgggggcgggaccggaacggagccgtgcggccccgcgcgctcgcagtctgtctcccgccgtccccacgcacgcgtcccggctcacgcgtccccccgcccgcccgcccgcccgcccgcccccgcttgtgccgcccctaccagagacccccaggagcaggatgtccttccagggcaagaaaagcatcccccggatcacgagtgaccgccttctgatcagaggtgggaggatcgtgaatgacgaccagtccttttacgctgatgtgcacgtggaagatggcttgataaaacaaatcggagaaaacctcatcgtccctgggggcatcaagaccattgacgcccacggcctgatggtccttcctggtggcgttgacgtccacacaaggctgcagatgcctgtcctgggcatgacaccggctgacgacttctgtcagggcaccaaggcagcgctagcaggaggaaccaccatgatcttggaccacgtcttccccgacacgggtgtgagcctgctggcggcctacgagcagtggcgggagcgggcggacagcgcggcctgctgcgactactccctgcacgtggacatcacccgatggcatgagagcatcaaggaggagctggaggccctggtcaaggagaagggtgtgaactccttcctggtcttcatggcatacaaggaccggtgccagtgcagcgacagccagatgtacgagatcttcagcatcatccgggacctgggggccttggcccaggtgcacgctgagaacggggacatcgtggaggaggagcagaagcggttgctggagctcggcatcactggccccgagggccacgtgctcagccaccccgaggaggtggaggctgaggcggtgtaccgagctgtcaccatcgccaagcaggcaaactgcccgctgtacgtcaccaaggtgatgagcaagggggcggccgacgccatcgctcaggccaagcgcagaggggtggtcgtgtttggggagcccatcaccgccagcctgggcaccgacggttcacactactggagcaagaactgggccaaggccgcagccttcgtcacatcaccccctgtcaacccagaccccaccacggcggaccacctcacctgcttgctgtccagcggggacctccaggtgacaggcagcgcccactgcaccttcaccactgcccagaaggctgtgggcaaggacaacttcgcgctgatccccgagggcaccaacggcattgaggagcgcatgtcgatggtctgggagaaatgtgtggcctctgggaagatggacgagaatgagttcgtcgcggtgaccagtacaaatgctgccaaaatcttcaatttttacccaaggaaggggcgagtggctgtgggctctgacgctgacctggtcatatggaaccccaaggccaccaagatcatctctgccaagacccacaatctgaacgtggagtacaacatcttcgagggagtggagtgccggggagcgcctgccgtggtcataagtcagggccgagtggcgctggaggacgggaagatgtttgtcaccccgggggcgggccgcttcgtccctcggaaaacattcccggactttgtctacaagaggatcaaagctcgcaacaggctggcggagatccacggtgtgccccgtggactgtatgacgggcccgtccacgaggtgatggtgcctgccaagccagggagtggcgctccggcccgcgcgtcctgcccaggcaagatctccgtccctcctgtgcgcaacctacatcagtcggggttcagcctatctgggtctcaggctgatgaccacatcgcccgacgcacagcacagaagatcatggcaccacctggcggccgctccaacatcacctctctctcctagacgcccaggaccggccctgtgagccgtgctggccccacccgaggccgcgggggccccagggcactcgcccccctccttagcattttcttttgtagaagtttctcgaaggtgcttggcggtcttgccttccccctccccacaggctctccttgtggggtcccaggtcctgctgccaagagcccctcaagagaagggctgaacctggggagatgtcactgccagggtgaggtggagccacatggcagggacaatgccggcagcctgagcccaggcaccccagtgcccgctgggcccagcctggggacagggaacctgccgggctcacagtgtgggagcagctggacaccaggcttcttggtgaaccggcgaggggccgagtcccgcctggtgggcatttgccgccgcctccccaccaccagtcactgcctcgcagagccctacactcccgcagccgctcctcagaggcctgtgcccatcgcaggcctgggaggaaagtgggcgcagagccctcctgctcacacagctgctgagacttcagggacccatcagaacttggtgcagcacagccccgcccgtggagggtcccttttacgcaccccaaggcccacacctaagcttccatgtagccctcatccagggaagttttgcgatcctttaggaagacactgtcctcttattacagattgtgtatttccgtaggcttcttagtagcagctttgtacactgaggacactgtagccaggaacctgtgcatgccacccaccgcctggacaggcagtcatcctgcctctgatgtgaatcaggcccattaaagacgtctgggtttgaagcc

SEQ ID NO: 8345 - DNA, 1545 bp, Homo sapiens
  source 1..1545: mol_type = unassigned DNA
gatgcctgtcctgggcatgacaccggctgacgacttctgtcagggcaccaaggcagcgctagcaggaggaaccaccatgatcttggaccacgtcttccccgacacgggtgtgagcctgctggcggcctacgagcagtggcgggagcgggcggacagcgcggcctgctgcgactactccctgcacgtggacatcacccgatggcatgagagcatcaaggaggagctggaggccctggtcaaggagaagggtgtgaactccttcctggtcttcatggcatacaaggaccggtgccagtgcagcgacagccagatgtacgagatcttcagcatcatccgggacctgggggccttggcccaggtgcacgctgagaacggggacatcgtggaggaggtggaggctgaggcggtgtaccgagctgtcaccatcgccaagcaggcaaactgcccgctgtacgtcaccaaggtgatgagcaagggggcggccgacgccatcgctcaggccaagcgcagaggggtggtcgtgtttggggagcccatcaccgccagcctgggcaccgacggttcacactactggagcaagaactgggccaaggccgcagccttcgtcacatcaccccctgtcaacccagaccccaccacggcggaccacctcacctgcttgctgtccagcggggacctccaggtgacaggcagcgcccactgcaccttcaccactgcccagaaggctgtgggcaaggacaacttcgcgctgatccccgagggcaccaacggcattgaggagcgcatgtcgatggtctgggagaaatgtgtggcctctgggaagatggacgagaatgagttcgtcgcggtgaccagtacaaatgctgccaaaatcttcaatttttacccaaggaaggggcgagtggctgtgggctctgacgctgacctggtcatatggaaccccaaggccaccaagatcatctctgccaagacccacaatctgctggcggagatccacggtgtgccccgtggactgtatgacgggcccgtccacgaggtgatggtgcctgccaagccagggagtggcgctccggcccgcgcgtcctgcccaggcaagatctccgtccctcctgtgcgcaacctacatcagtcggggttcagcctatctgggtctcaggctgatgaccacatcgcccgacgcacagcacagaagatcatggcaccacctggcggccgctccaacatcacctctctctcctagacgcccaggaccggccctgtgagccgtgctggccccacccgaggccgcgggggccccagggcactcgcccccctccttagcattttcttttgtagaagtttctcgaaggtgcttggcggtcttgccttccccctccccacaggctctccttgtggggtcccaggtcctgctgccaagagcccctcaagagaagggctgaacctggggagatgtcactgccagggtgaggtggagccacatggcagggacaatgccggcagcctgagcccaggcaccccagtgcccgctgggcccagcctggggac

SEQ ID NO: 8346 - DNA, 2466 bp, Homo sapiens
  source 1..2466: mol_type = unassigned DNA
gcccagcgggggcgggaccggaacggagccgtgcggccccgcgcgctcgcagtctgtctcccgccgtccccacgcacgcgtcccggctcacgcgtccccccgcccgcccgcccgcccgcccgcccccgcttgtgccgcccctaccagagacccccaggagcaggatgtccttccagggcaagaaaagcatcccccggatcacgagtgaccgccttctgatcagaggtgggaggatcgtgaatgacgaccagtccttttacgctgatgtgcacgtggaagatggcttgataaaacaaatcggagaaaacctcatcgtccctgggggcatcaagaccattgacgcccacggcctgatggtccttcctggtggcgttgacgtccacacaaggctgcagatgcctgtcctgggcatgacaccggctgacgacttctgtcagggcaccaaggcagcgctagcaggaggaaccaccatgatcttggaccacgtcttccccgacacgggtgtgagcctgctggcggcctacgagcagtggcgggagcgggcggacagcgcggcctgctgcgactactccctgcacgtggacatcacccgatggcatgagagcatcaaggaggagctggaggccctggtcaaggagaagggtgtgaactccttcctggtcttcatggcatacaaggaccggtgccagtgcagcgacagccagatgtacgagatcttcagcatcatccgggacctgggggccttggcccaggtgcacgctgagaacggggacatcgtggaggaggtggaggctgaggcggtgtaccgagctgtcaccatcgccaagcaggcaaactgcccgctgtacgtcaccaaggtgatgagcaagggggcggccgacgccatcgctcaggccaagcgcagaggggtggtcgtgtttggggagcccatcaccgccagcctgggcaccgacggttcacactactggagcaagaactgggccaaggccgcagccttcgtcacatcaccccctgtcaacccagaccccaccacggcggaccacctcacctgcttgctgtccagcggggacctccaggtgacaggcagcgcccactgcaccttcaccactgcccagaaggctgtgggcaaggacaacttcgcgctgatccccgagggcaccaacggcattgaggagcgcatgtcgatggtctgggagaaatgtgtggcctctgggaagatggacgagaatgagttcgtcgcggtgaccagtacaaatgctgccaaaatcttcaatttttacccaaggaaggggcgagtggctgtgggctctgacgctgacctggtcatatggaaccccaaggccaccaagatcatctctgccaagacccacaatctgctggcggagatccacggtgtgccccgtggactgtatgacgggcccgtccacgaggtgatggtgcctgccaagccagggagtggcgctccggcccgcgcgtcctgcccaggcaagatctccgtccctcctgtgcgcaacctacatcagtcggggttcagcctatctgggtctcaggctgatgaccacatcgcccgacgcacagcacagaagatcatggcaccacctggcggccgctccaacatcacctctctctcctagacgcccaggaccggccctgtgagccgtgctggccccacccgaggccgcgggggccccagggcactcgcccccctccttagcattttcttttgtagaagtttctcgaaggtgcttggcggtcttgccttccccctccccacaggctctccttgtggggtcccaggtcctgctgccaagagcccctcaagagaagggctgaacctggggagatgtcactgccagggtgaggtggagccacatggcagggacaatgccggcagcctgagcccaggcaccccagtgcccgctgggcccagcctggggacagggaacctgccgggctcacagtgtgggagcagctggacaccaggcttcttggtgaaccggcgaggggccgagtcccgcctggtgggcatttgccgccgcctccccaccaccagtcactgcctcgcagagccctacactcccgcagccgctcctcagaggcctgtgcccatcgcaggcctgggaggaaagtgggcgcagagccctcctgctcacacagctgctgagacttcagggacccatcagaacttggtgcagcacagccccgcccgtggagggtcccttttacgcaccccaaggcccacacctaagcttccatgtagccctcatccagggaagttttgcgatcctttaggaagacactgtcctcttattacagattgtgtatttccgtaggcttcttagtagcagctttgtacactgaggacactgtagccaggaacctgtgcatgccacccaccgcctggacaggcagtcatcctgcctctgatgtgaatcaggcccattaaagacgtctgggtttgaagcc

SEQ ID NO: 8347 - DNA, 5209 bp, Homo sapiens
  source 1..5209: mol_type = unassigned DNA
ccccactctggactcccgcgctgggcgcgctgaggcggcccccgagcgagcgcgcgtgcagccgccgccgccccgagcacccgcagctccggcgccgcggcgagacggagacggaccgagccacgggcccccgcggccgcagcatctcggaggagaacatgcttgccaactcagccagcgtgaggatcctcatcaagggaggcaaggtggtgaacgatgactgcacccacgaggctgacgtctacatcgagaatggcatcatccagcaggtgggccgcgagctcatgatccctggcggggccaaggtgattgatgccacaggaaaactggtgatccctggtggcatcgacaccagcacccacttccaccagaccttcatgaatgccacgtgcgtggacgacttctaccatgggaccaaggcagcactcgtcggaggcaccaccatgatcatcggccacgtcctgcccgacaaggagacctcccttgtggacgcttatgagaagtgccgaggtctggccgaccccaaggtctgctgtgattacgccctccacgtggggatcacctggtgggcacccaaggtgaaagcagaaatggagacactggtgagggagaagggtgtcaactcgttccagatgttcatgacctacaaggacctgtacatgcttcgagacagtgagctgtaccaagtgttgcacgcttgcaaggacattggggcaatcgcccgcgtccatgctgaaaatggggagcttgtggccgagggtgctaaggaggcactggatttggggatcacaggcccagaaggaatcgagatcagccgtccagaggagctggaagctgaagccactcatcgtgttatcaccattgcaaacaggactcactgtccaatctacctggtcaacgtgtccagtatctcggctggtgacgttatcgcagctgctaagatgcaagggaaggttgtgctggcggagaccaccactgcacatgccacgctgacaggcttacactactaccaccaggactggtcccacgcggctgcctatgtcacggtgcctcccctgagactggacaccaacacctcaacctacctcatgagcctgctggccaatgacactctgaacatcgtggcatcagatcaccggcctttcaccacaaagcagaaagctatgggcaaggaagacttcaccaagatcccacatggagtgagtggcgtgcaggaccgcatgagcgtcatctgggagagaggagtggttggaggaaagatggatgagaaccgttttgtggccgttaccagttccaacgcagctaagcttctgaacctgtatccccgcaagggccgcattattcccggagccgatgctgatgtggtggtgtgggacccagaagccacaaagaccatctcagccagcacgcaggtccagggaggagacttcaacctgtatgagaacatgcgctgccacggcgtgccactggtcaccatcagccgggggcgcgtcgtgtatgagaacggcgtcttcatgtgcgccgagggcaccggcaagttctgtcccctgaggtccttcccagacactgtctacaagaagctggtccagagagagaagactttaaaggttagaggagtggaccgcactccctacctgggggatgtcgctgttgtcgtgcaccctgggaaaaaagagatgggaaccccactcgcagacactcctacccggcccgtcacccggcatgggggcatgagggaccttcacgaatccagcttcagcctctctggctctcagatcgatgaccatgttccaaagcgagcttcagctcggatcctcgctcctcccggaggcaggtcgagtggcatttggtaaaggcattgccaagccccccgagtgaggacgcaccgccgccaccagcccgcaactctccagccgaagctgcaggggcaggagaggctgggctgggtggcacaccacccgaggggggccccgggacccacggagccctccctatgtctgcaaagtgattcactgtgcttcgagccaactctaacaggcactttgagatgtgttcctcctgctgtagtcctttctgccttggcctcggcgggcttttctggggcccaggaagcccacactatgcacagagcccaatgcatagagccctggccagcccttcctctcactcctgcctccgctggctttgggaaagcccagactttagtgccctgccccctggctgactggccagttgcccagagcactttagcagatgtggtttcaaagtaaaggcctcctcccccaccccttaggccccgtggtgacatttcccaagtcagacagatgtcagcttcccagccatgcccaggacgtcctatctcccccaacccacctctggccctgtgtaggggcagggatgggggtggctgggactcctggtgcccctcgccagcttctcctgcgccccgcccacaccctcggggggtcacaggcccagaagggtagctgggcggggctcgaggctggtgccaggcgcgtgtaaatggttttgttttgcacgtttggtttgcgcagtagtttggtttgacttgtttgtgcatcctgtgaaaaataacggtgcttgtgtcactagcatagaatagcgacaggaatagatgtggtccttaggagacgctgcacttgacaccaaccagacagcacagggcaggggtggtggagggggctgggctcacaggcctctcttttccccgcctgcagtcttctgggctgcgggaggccctggccctttccccttcccctcccctccttgtctagtttcccacattccaaaagggggcctgggatgctagccccagagatgccagcccttcaggaagcaggtgtcctttcccctctctgcccctgatcactcccagcactccccttgccttcccctgtcttcacctgccaccacacacacacacacacacacacacacacacacacacgcacggcttcctataacttcttcctgctggacagagactcagcgctcctcctgtgtgactggcaagaggcctcatgcctgctgagagaggaggagtgggagaggggcttgccagacaccagagagggagaccccaggcccacaggacctggctgtcgaacccgcattgctgctcaggtgccgtgatctcccgtggtcggcaccaggcccttgccagctcatggcctcatcttctcccctgtccatccaggtgggccctccctgcttctaaagccccacagaagttcccatggaaacactagaggccgggtgtctccttccacctccagtgatctgggaagtgacccagccgcctgcccttgttaagcctggtctgccccgtgggaagtgacttcatgttgcacatgtgatttcagcccccgaggcttgcgcgaggcttctggaccctcggttaaaggtcagcccctggccgggtgcggtggctcacgcctgtaatcccagcactttgggaggccaaggcgggtggatcatggagtcaggagatcgagaccatcctggctaacacggtgaaaccccgtctctactaaaaatacaaaaattacccaggcgtggtggcgggcgcctgtagtcccagctactgaggaggctgaggcaggagaatagcgtgaacccgggaggcggagcttgcagtgagccaagatcacgccactgcacttcagcctggacgacagagtgagactccatctcaaaaaacagacaaacaaaaaagtcagcccctgcacatctctgtagtgcttttcatgtattcaaaccacttccgtatatgacctctcacttagtcctcatgacaatggagcacttattattcttcccattttacagatgaggaaactaagacccagaaagttcaggtcctctgaccccagaagtgtctgtgatgaccctcccaaccttggctatctaccccacctgtggagaggaggtctggggtgacatctattgtagatcccacctgagagtttaaccaatgagaagacttactttcctggtaggcagcctgctttgttttgcacaggaagatagattttttttctcatctttcttataaacaacctcatgcacattctgtgtttgagccaagactagtcacccattgggggctaaccgtgcagtgtgagctgcgtccacaccctcacttctcccttcactccccctttcctcactcaggggctgagaggacagaggtggtcagccggggagcagaggtggcgaaggggctcatggcaagtggcagccattggaacaggggtgaggacccaggcctgggaaagccaccagggatgggggaaaccatgacgccgcctcctggtgcagtgcacaccatctctatccctgtcagccctcactgggtcatgggccttgggcagatgtcaaagagcccagcagcagcggtggtggccagctgggcagagcatccttgcttgggctaggaaagctttaccttctctgagtgcctccgcctgagagatgtgtgacccgtggcaccagggaaccacgtcttggagtggtccactgtaggccatgcgcttcatccacccccagtccctacataggccctacccttgcccgggagcttctagatagaaatcagaaagagattcaaggagccaaatgagcggtcagcccccaccatgcactccttgccccgtgcagagctccagccagcttcgtcaccagccccactggctcctggttggaacgaaagggtctctggttgcactgaatgcagctctcaaactggtcttgtacttgctgaataaatactgttgttcttgccttagctgctctctaggtttgtggggttaagttgccagaaaattgtgctactgtgtgtgcgtgtgcgtgcgtgtgtgtagtgctaggagtccacagtaggtctctgtcaagccgatgtcgtgatgagggcttttctgatactgacccagaagccacagaaccacaaggaaacccaaaccccctccagctgctgaggcgcaggcacagcctggggtcggatggagcctccagcaccccagcacccaggtgacttccccactcccctgtaaatgtcatggtgctaagactgtgtcaaccccaagacgacacatggtcctgtgctttggccaccgtttgaggcaaaaactaaacagcccgacacgttgtgttctggtgcaggtttgtattaaactgtagctacttctca

SEQ ID NO: 8348 - DNA, 1972 bp, Homo sapiens
  source 1..1972: mol_type = unassigned DNA
ctcccgggctaggacatcctcctctcccccttctgtttctgcgtgaggcgcacaaaagggcggggagccgggaacatgcttgccaactcagccagcgtgaggatcctcatcaagggaggcaaggtggtgaacgatgactgcacccacgaggctgacgtctacatcgagaatggcatcatccagcaggtgggccgcgagctcatgatccctggcggggccaaggtgattgatgccacaggaaaactggtgatccctggtggcatcgacaccagcacccacttccaccagaccttcatgaatgccacgtgcgtggacgacttctaccatgggaccaaggcagcactcgtcggaggcaccaccatgatcatcggccacgtcctgcccgacaaggagacctcccttgtggacgcttatgagaagtgccgaggtctggccgaccccaaggtctgctgtgattacgccctccacgtggggatcacctggtgggcacccaaggtgaaagcagaaatggagacactggtgagggagaagggtgtcaactcgttccagatgttcatgacctacaaggacctgtacatgcttcgagacagtgagctgtaccaagtgttgcacgcttgcaaggacattggggcaatcgcccgcgtccatgctgaaaatggggagcttgtggccgagggtgctaaggaggcactggatttggggatcacaggcccagaaggaatcgagatcagccgtccagaggagctggaagctgaagccactcatcgtgttatcaccattgcaaacaggactcactgtccaatctacctggtcaacgtgtccagtatctcggctggtgacgttatcgcagctgctaagatgcaagggaaggttgtgctggcggagaccaccactgcacatgccacgctgacaggcttacactactaccaccaggactggtcccacgcggctgcctatgtcacggtgcctcccctgagactggacaccaacacctcaacctacctcatgagcctgctggccaatgacactctgaacatcgtggcatcagatcaccggcctttcaccacaaagcagaaagctatgggcaaggaagacttcaccaagatcccacatggagtgagtggcgtgcaggaccgcatgagcgtcatctgggagagaggagtggttggaggaaagatggatgagaaccgttttgtggccgttaccagttccaacgcagctaagcttctgaacctgtatccccgcaagggccgcattattcccggagccgatgctgatgtggtggtgtgggacccagaagccacaaagaccatctcagccagcacgcaggtccagggaggagacttcaacctgtatgagaacatgcgctgccacggcgtgccactggtcaccatcagccgggggcgcgtcgtgtatgagaacggcgtcttcatgtgcgccgagggcaccggcaagttctgtcccctgaggtccttcccagacactgtctacaagaagctggtccagagagagaagactttaaaggttagaggagtggaccgcactccctacctgggggatgtcgctgttgtcgtgcaccctgggaaaaaagagatgggaaccccactcgcagacactcctacccggcccgtcacccggcatgggggcatgagggaccttcacgaatccagcttcagcctctctggctctcagatcgatgaccatgttccaaagcgagcttcagctcggatcctcgctcctcccggaggcaggtcgagtggcatttggtaaaggcattgccaagccccccgagtgaggacgcaccgccgccaccagcccgcaactctccagccgaagctgcaggggcaggagaggctgggctgggtggcacaccacccgaggggggccccgggacccacggagccctccctatgtctgcaaagtgattcactgtgcttcgagccaactctaacaggcactttgagatgtgttc

SEQ ID NO: 8349 - DNA, 647 bp, Homo sapiens
  source 1..647: mol_type = unassigned DNA
atcggggctaagccggggcgctcttggggtcctctttgtacgcccgcgaagcgccgtgccgggccttgctcatagaacatgcttgccaactcagccagcgtgaggatcctcatcaagggaggcaaggtggtgaacgatgactgcacccacgaggctgacgtctacatcgagaatggcatcatccagcaggtgggccgcgagctcatgatccctggcggggccaaggtgattgatgccacaggaaaactggtgatccctggtggcatcgacaccagcacccacttccaccagaccttcatgaatgccacgtgcgtggacgacttctaccatgggaccaaggcagcactcgtcggaggcaccaccatgatcatcggccacgtcctgcccgacaaggagacctcccttgtggacgcttatgagaagtgccgaggtctggccgaccccaaggtctgctgtgattacgccctccacgtggggatcacctggtgggcacccaaggtgaaagcagaaatggagacactggtgagggagaagggtgtcaactcgttccagatgttcatgacctacaaggacctgtacatgcttcgagacagtgagctgtaccaagtgttgcacgcttgcaaggacattggggcaatcgcccgcgt

SEQ ID NO: 8350 - DNA, 560 bp, Homo sapiens
  source 1..560: mol_type = unassigned DNA
aatgcgtgctcgcggggttgcaaagccctggggaacatgcttgccaactcagccagcgtgaggatcctcatcaagggaggcaaggtggtgaacgatgactgcacccacgaggctgacgtctacatcgagaatggcatcatccagcaggtgggccgcgagctcatgatccctggcggggccaaggtgattgatgccacaggaaaactggtgatccctggtggcatcgacaccagcacccacttccaccagaccttcatgaatgccacgtgcgtggacgacttctaccatgggaccaaggcagcactcgtcggaggcaccaccatgatcatcggccacgtcctgcccgacaaggagacctcccttgtggacgcttatgagaagtgccgaggtctggccgaccccaaggtctgctgtgattacgccctccacgtggggatcacctggtgggcacccaaggtgaaagcagaaatggagacactggtgagggagaagggtgtcaactcgttccagatgttcatgacctacaaggacctgtacatgcttcgagacagtgagctgta

SEQ ID NO: 8351 - DNA, 621 bp, Homo sapiens
  source 1..621: mol_type = unassigned DNA
gtcctccggaaccgcccccggccctccctggggacccgtgcctcagcgcgtccaggctttgtggtgtcctgagtcgccatggaaacccgagggaacgcggagccgggtgctaggggggtcggaacatgcttgccaactcagccagcgtgaggatcctcatcaagggaggcaaggtggtgaacgatgactgcacccacgaggctgacgtctacatcgagaatggcatcatccagcaggtgggccgcgagctcatgatccctggcggggccaaggtgattgatgccacaggaaaactggtgatccctggtggcatcgacaccagcacccacttccaccagaccttcatgaatgccacgtgcgtggacgacttctaccatgggaccaaggcagcactcgtcggaggcaccaccatgatcatcggccacgtcctgcccgacaaggagacctcccttgtggacgcttatgagaagtgccgaggtctggccgaccccaaggtctgctgtgattacgccctccacgtggggatcacctggtgggcacccaaggtgaaagcagaaatggagacactggtgagggagaagggtgtcaactcgttccagatgttcatgacctacaaggacc

SEQ ID NO: 8352 - DNA, 1779 bp, Homo sapiens
  source 1..1779: mol_type = unassigned DNA
cgcgccgccggccctagtctgcctgttttcgactcgcgctccggctgctgtcacttggctctctggctggagcttgaggacgcaaggagggtttgtcactggcagactcgagactgtaggcactgccatggcccctgtgctcagtaaggactcggcggacatcgagagtatcctggctttaaatcctcgaacacaaactcatgcaactctgcgttccacttcggccaagaaattagacaagaaacattggaaaagaaatcctgataagaactgctttaattgtgagaagctggagaataattttgatgacatcaagcacacgactcttggtgagcgaggagctctccgagaagcaatgagatgcctgaaatgtgcagatgccccgtgtcagaagagctgtccaactaatcttgatattaaatcattcatcacaagtattgcaaacaagaactattatggagctgctaagatgatattttctgacaacccacttggtctgacttgtggaatggtatgtccaacctctgatctttgtgtaggtggatgcaatttatatgccactgaagagggacccattaatattggtggattgcagcaatttgctactgagactttgatcctggctttctctttaatgaatcatttgtaaagactttgattcttcagacactcttgggctctctgacgtctcctatttggagtcaacaagcaggttaattcccatgtatcatttaaatgatcagcttatatgaagggtatagtaagattttataatctttggagactagttggctagaaggtcaaattaagtgcccgtcaacctagatttttagttaatgacttactgatctggttttgtcagcataaacacaatgtgttctttcattttgggacccttcccataatattcctcaagcttaagtctcactttgctcttagtaataaatcagggttattcccttcctgctttctgacaggttaattctaaagaagagctcctgggaataagaaaataaaaacaattcgaggttgtggattgttgcaataaattctgggatttaatttcttttcttaccaaattcaaaattgcattaggcttacctgaccactacgaagtatgatctttactacctgtgaaaatccttagttgatggagaagattcacttgaattcctcctcacttttctttggggacccattgcctcttcattaaaccagggcaagctttcacagatgcagtaagtgaaaggtcacatagtatgtatatcaactaacacagcattttaaaacaaaatgaattaaaatgatatcattagtaattgatctggtcatgagaggtgtgtgtgtttgtgtgtgtgtgtgtgtgtgtgtgagagagagagagagaaagagagagagagacagggaaatacattattcctctggaaactctcacatggttttaattcttttctctgggaacactgtccctctgggaactcttacttggttctaccactcattcccagagcagagtctatttaagacagagacatgtgccttcagaacagaatttattagaaacttactaaaatttgagagtggtcacacttaggtcttgccataagtatcacctaatgaagagttatgcatagattaggactgcagtagatgcattttaagtgaatcaaggaatttagaataggaatgtatctgcttatttcattccaattatagtttgtataattgtaatttcaatatcaaattataaattaaaaatgtcctcgtgggaactactga

SEQ ID NO: 8353 - DNA, 4412 bp, Homo sapiens
  source 1..4412: mol_type = unassigned DNA
tttcgactcgcgctccggctgctgtcacttggctctctggctggagcttgaggacgcaaggagggtttgtcactggcagactcgagactgtaggcactgccatggcccctgtgctcagtaaggactcggcggacatcgagagtatcctggctttaaatcctcgaacacaaactcatgcaactctgcgttccacttcggccaagaaattagacaagaaacattggaaaagaaatcctgataagaactgctttaattgtgagaagctggagaataattttgatgacatcaagcacacgactcttggtgagcgaggagctctccgagaagcaatgagatgcctgaaatgtgcagatgccccgtgtcagaagagctgtccaactaatcttgatattaaatcattcatcacaagtattgcaaacaagaactattatggagctgctaagatgatattttctgacaacccacttggtctgacttgtggaatggtatgtccaacctctgatctttgtgtaggtggatgcaatttatatgccactgaagagggacccattaatattggtggattgcagcaatttgctactgaggtattcaaagcaatgagtatcccacagatcagaaatccttcgctgcctcccccagaaaaaatgtctgaagcctattctgcaaagattgctctttttggtgctgggcctgcaagtataagttgtgcttcctttttggctcgattggggtactctgacatcactatatttgaaaaacaagaatatgttggtggtttaagtacttctgaaattcctcagttccggctgccgtatgatgtagtgaattttgagattgagctaatgaaggaccttggtgtaaagataatttgcggtaaaagcctttcagtgaatgaaatgactcttagcactttgaaagaaaaaggctacaaagctgctttcattggaataggtttgccagaacccaataaagatgccatcttccaaggcctgacgcaggaccaggggttttatacatccaaagactttttgccacttgtagccaaaggcagtaaagcaggaatgtgcgcctgtcactctccattgccatcgatacggggagtcgtgattgtacttggagctggagacactgcctttgactgtgcaacatctgctctacgttgtggagctcgccgtgtgttcatcgtcttcagaaaaggctttgttaatataagagctgtccctgaggagatggaacttgctaaggaagaaaagtgtgaatttctgccattcctgtccccacggaaggttatagtaaaaggtgggagaattgttgctatgcagtttgttcggacagagcaagatgaaactggaaaatggaatgaagatgaagatcagatggtccatctgaaagccgatgtggtcatcagtgcctttggttcagttctgagtgatcctaaagtaaaagaagccttgagccctataaaatttaacagatggggtctcccagaagtagatccagaaactatgcaaactagtgaagcatgggtatttgcaggtggtgatgtcgttggtttggctaacactacagtggaatcggtgaatgatggaaagcaagcttcttggtacattcacaaatacgtacagtcacaatatggagcttccgtttctgccaagcctgaactacccctcttttacactcctattgatctggtggacattagtgtagaaatggccggattgaagtttataaatccttttggtcttgctagcgcaactccagccaccagcacatcaatgattcgaagagcttttgaagctggatggggttttgccctcaccaaaactttctctcttgataaggacattgtgacaaatgtttcccccagaatcatccggggaaccacctctggccccatgtatggccctggacaaagctcctttctgaatattgagctcatcagtgagaaaacggctgcatattggtgtcaaagtgtcactgaactaaaggctgactttccagacaacattgtgattgctagcattatgtgcagttacaataaaaatgactggacggaacttgccaagaagtctgaggattctggagcagatgccctggagttaaatttatcatgtccacatggcatgggagaaagaggaatgggcctggcctgtgggcaggatccagagctggtgcggaacatctgccgctgggttaggcaagctgttcagattcctttttttgccaagctgaccccaaatgtcactgatattgtgagcatcgcaagagctgcaaaggaaggtggtgccaatggcgttacagccaccaacactgtctcaggtctgatgggattaaaatctgatggcacaccttggccagcagtggggattgcaaagcgaactacatatggaggagtgtctgggacagcaatcagacctattgctttgagagctgtgacctccattgctcgtgctctgcctggatttcccattttggctactggtggaattgactctgctgaaagtggtcttcagtttctccatagtggtgcttccgtcctccaggtatgcagtgccattcagaatcaggatttcactgtgatcgaagactactgcactggcctcaaagccctgctttatctgaaaagcattgaagaactacaagactgggatggacagagtccagctactgtgagtcaccagaaagggaaaccagttccacgtatagctgaactcatggacaagaaactgccaagttttggaccttatctggaacagcgcaagaaaatcatagcagaaaacaagattagactgaaagaacaaaatgtagctttttcaccacttaagagaaactgttttatccccaaaaggcctattcctaccatcaaggatgtaataggaaaagcactgcagtaccttggaacatttggtgaattgagcaacgtagagcaagttgtggctatgattgatgaagaaatgtgtatcaactgtggtaaatgctacatgacctgtaatgattctggctaccaggctatacagtttgatccagaaacccacctgcccaccataaccgacacttgtacaggctgtactctgtgtctcagtgtttgccctattgtcgactgcatcaaaatggtttccaggacaacaccttatgaaccaaagagaggcgtacccttatctgtgaatccggtgtgttaaggtgatttgtgaaacagttgctgtgaactttcatgtcacctacatatgctgatcttttaaaatcatgatccttgtgttcagctctttccaaattaaaacaaatatacattttctaaataaaaatatgtaatttcaaaatacatttgtaagtgtaaaaaatgtctcatgtcaatgaccattcaattagtggtcataaaatagaataattcttttctgaggatagtagttaaataactgtgtggcagttaattggatgttcactgccagttgtcttatgtgaaaaattaacttttttgtggcaattagtgtgacagtttccaaattgccctatgctgtgctccatatttgatttctaattgtaagtgaaattaagcattttgaaacaaagtactctttaacatacaagaaaatgtatccaaggaaacattttatcattaaaaattacctttaattttaatgctgtttctaagaaaatgtagttagctccataaagtacaaatgaagaaagtcaaaaaattatttgctatggcaggataagaaagcctaaaattgagtttgtagaactttattaagtaaaatccccttcgctgaaattgcttatttttggtgttggatagaggatagggagaatatttactaactaaataccattcactactcatgcgtgagatgggtgtacaaactcatcctcttttaatggcatttctctttaaactatgttcctaacaaaatgagatgataggatagatcctggttaccactcttttgctgtgcacatacgggctctgactggttttaatagtcaccttcatgattatagcaactaatgtttgaacaaagctcaaagtatgcaatgcttcattattcaagaatgaaaaatataatgttgataatatatattaagtgtgccaaatcagtttgactactctctgttttagtgtttatgtttaaaagaaatatattttttgttattattagataatatttttgtatttctctattttcataatcagtaaatagtgtcatataaactcatttatctcctcttcatggcatcttcaatatgaatctataagtagtaaatcagaaagtaacaatctatggcttatttctatgacaaattcaagagctagaaaaataaaatgtttcattatgcacttttagaaatgcatatttgccacaaaacctgtattactgaataatatcaaataaaatatcataaagcattttaaa

SEQ ID NO: 8354 - DNA, 835 bp, Homo sapiens
  source 1..835: mol_type = unassigned DNA
acttggctctctggctggagcttgaggacgcaaggagggtttgtcactggcagactcgagactgtaggcactgccatggcccctgtgctcagtaaggactcggcggacatcgagaattgtgagaagctggagaataattttgatgacatcaagcacacgactcttggtgagcgaggagctctccgagaagcaatgagatgcctgaaatgtgcagatgccccgtgtcagaagagctgtccaactaatcttgatattaaatcattcatcacaagtattgcaaacaagaactattatggagctgctaagatgatattttctgacaacccacttggtctgacttgtggaatggtatgtccaacctctgatctttgtgtaggtggatgcaatttatatgccactgaagagggacccattaatattggtggattgcagcaatttgctactgaggttaatggcctcctacatttccaaaactctgtgtctctctggtttcaaaagactgccaacatctcttttctgagctgtggttctcttcaagatgcttagccttcctccctttggtattcaaagcaatgagtatcccacagatcagaaatccttcgctgcctcccccagaaaaaatgtctgaagcctattctgcaaagattgctctttttggtgctgggcctgcaagtataagttgtgcttcctttttggctcgattggggtactctgacatcactatatttgaaaaacaagaatatgttggtggtttaagtacttctgaaattcctcagttccggctgccgtatgatgtagtgaattttgagattgagctaatgaaggaccttggtgt

SEQ ID NO: 8355 - DNA, 2310 bp, Homo sapiens
  source 1..2310: mol_type = unassigned DNA
tgaggcgcgccggctggttcaactccggccgccgcgccgaaaccagcagcggtccgggtcgaaccagcaccggcctcgggaggttccgccgcctgctctgccgctgttccaactgccgctgtagagccactgggatgcgcaccaccggcaggggttcgtcgggactgcggaccgtgaggccccgtcgcggcgccaggagcaaccgagtcacgagggaaaagagccgcaccggccgcgttagagccatgtttcccttagtgcgggagaagcgcacatcagtgacgtcacggacgcgccgcgacctcgcgtacggtggctggcgaggctcagtacggtgtgtggagctggagcaccgtgaggaagaagcgaggttctttttaagagttcagctgcgagatatcaaacaaagaattactctgtacaaagccagaacacatatatcaaagtaatcctgaagtatcagaacaaaataataggctgtaacagaggaggaaatgattttgaatagcctctctctgtgttaccataataagctaatcctggccccaatggttcgggtagggactcttccaatgaggctgctggccctggattatggagcggacattgtttactgtgaggagctgatcgacctcaagatgattcagtgcaagagagttgttaatgaggtgctcagcacagtggactttgtcgcccctgatgatcgagttgtcttccgcacctgtgaaagagagcagaacagggtggtcttccagatggggacttcagacgcagagcgagcccttgctgtggccaggcttgtagaaaatgatgtggctggtattgatgtcaacatgggctgtccaaaacaatattccaccaagggaggaatgggagctgccctgctgtcagaccctgacaagattgagaagatcctcagcactcttgttaaagggacacgcagacctgtgacctgcaagattcgcatcctgccatcgctagaagataccctgagccttgtgaagcggatagagaggactggcattgctgccatcgcagttcatgggaggaagcgggaggagcgacctcagcatcctgtcagctgtgaagtcatcaaagccattgctgataccctctccattcctgtcatagccaacggaggatctcatgaccacatccaacagtattcggacatagaggactttcgacaagccacggcagcctcttccgtgatggtggcccgagcagccatgtggaacccatctatcttcctcaaggagggtctgcggcccctggaggaggtcatgcagaaatacatcagatacgcggtgcagtatgacaaccactacaccaacaccaagtactgcttgtgccagatgctacgagaacagctggagtcgccccagggaaggttgctccatgctgcccagtcttcccgggaaatttgtgaggcctttggccttggtgccttctatgaggagaccacacaggagctggatgcccagcaggccaggctctcagccaagacttcagagcagacaggggagccagctgaagatacctctggtgtcattaagatggctgtcaagtttgaccggagagcatacccagcccagatcacccctaagatgtgcctactagagtggtgccggagggagaagttggcacagcctgtgtatgaaacggttcaacgccctctagatcgcctgttctcctctattgtcaccgttgctgaacaaaagtatcagtctaccttgtgggacaagtccaagaaactggcggagcaggctgcagccatcgtctgtctgcggagccagggcctccctgagggtcggctgggtgaggagagcccttccttgcacaagcgaaagagggaggctcctgaccaagaccctgggggccccagagctcaggagctagcacaacctggggatctgtgcaagaagccctttgtggccttgggaagtggtgaagaaagccccctggaaggctggtgactactcttcctgccttagtcacccctccatgggcctggtgctaaggtggctgtggatgccacagcatgaaccagatgccgttgaacagtttgctggtcttgcctggcagaagttagatgtcctggcaggggccatcagcctagagcatggaccaggggccgcccaggggtggatcctggcccctttggtggatctgagtgacagggtcaagttctctttgaaaacaggagcttttcaggtggtaactccccaacctgacattggtactgtgcaataaagacaccccctaccctcacccacggctggctgcttcagccttgggcatcttcataaa

SEQ ID NO: 8356 - DNA, 1986 bp, Homo sapiens
  source 1..1986: mol_type = unassigned DNA
gctcagtacggtgtgtggagctggagcaccgtgaggaagaagcgaggttctttttaagagttcagctgcgagatatcaaacaaagaattactctgtacaaagccagaacacatatatcaaagtaatcctgaagtatcagaacaaaataataggctgtaacagaggaggaaatgattttgaatagcctctctctgtgttaccataataagctaatcctggccccaatggttcgggtagggactcttccaatgaggctgctggccctggattatggagcggacattgtttactgtgaggagctgatcgacctcaagatgattcagtgcaagagagttgttaatgaggtgctcagcacagtggactttgtcgcccctgatgatcgagttgtcttccgcacctgtgaaagagagcagaacagggtggtcttccagatggggacttcagacgcagagcgagcccttgctgtggccaggcttgtagaaaatgatgtggctggtattgatgtcaacatgggctgtccaaaacaatattccaccaagggaggaatgggagctgccctgctgtcagaccctgacaagattgagaagatcctcagcactcttgttaaagggacacgcagacctgtgacctgcaagattcgcatcctgccatcgctagaagataccctgagccttgtgaagcggatagagaggactggcattgctgccatcgcagttcatgggaggaagcgggaggagcgacctcagcatcctgtcagctgtgaagtcatcaaagccattgctgataccctctccattcctgtcatagccaacggaggatctcatgaccacatccaacagtattcggacatagaggactttcgacaagccacggcagcctcttccgtgatggtggcccgagcagccatgtggaacccatctatcttcctcaaggagggtctgcggcccctggaggaggtcatgcagaaatacatcagatacgcggtgcagtatgacaaccactacaccaacaccaagtactgcttgtgccagatgctacgagaacagctggagtcgccccagggaaggttgctccatgctgcccagtcttcccgggaaatttgtgaggcctttggccttggtgccttctatgaggagaccacacaggagctggatgcccagcaggccaggctctcagccaagacttcagagcagacaggggagccagctgaagatacctctggtgtcattaagatggctgtcaagtttgaccggagagcatacccagcccagatcacccctaagatgtgcctactagagtggtgccggagggagaagttggcacagcctgtgtatgaaacggttcaacgccctctagatcgcctgttctcctctattgtcaccgttgctgaacaaaagtatcagtctaccttgtgggacaagtccaagaaactggcggagcaggctgcagccatcgtctgtctgcggagccagggcctccctgagggtcggctgggtgaggagagcccttccttgcacaagcgaaagagggaggctcctgaccaagaccctgggggccccagagctcaggagctagcacaacctggggatctgtgcaagaagccctttgtggccttgggaagtggtgaagaaagccccctggaaggctggtgactactcttcctgccttagtcacccctccatgggcctggtgctaaggtggctgtggatgccacagcatgaaccagatgccgttgaacagtttgctggtcttgcctggcagaagttagatgtcctggcaggggccatcagcctagagcatggaccaggggccgcccaggggtggatcctggcccctttggtggatctgagtgacagggtcaagttctctttgaaaacaggagcttttcaggtggtaactccccaacctgacattggtactgtgcaataaagacaccccctaccctcacccacggctggctgcttcagccttgggcatcttcataaa

SEQ ID NO: 8357 - DNA, 1864 bp, Homo sapiens
  source 1..1864: mol_type = unassigned DNA
gtgtggagctggagcaccgtgaggaagaagcgaggttctttttaagagttcagctgcgagatatcaaacaaagaattactctgtacaaagccagaacacatatatcaaagtaatcctgaagtatcagaacaaaataataggctgtaacagaggaggaaatgattttgaatagcctctctctgtgttaccataataagctaatcctggccccaatggttcgggtagggactcttccaatgaggctgctggccctggattatggagcggacattgtttactgtgaggagctgatcgacctcaagatgattcagtgcaagagagttgttaatgaggtgctcagcacagtggactttgtcgcccctgatgatcgagttgtcttccgcacctgtgaaagagagcagaacagggtggtcttccagatgggaggaatgggagctgccctgctgtcagaccctgacaagattgagaagatcctcagcactcttgttaaagggacacgcagacctgtgacctgcaagattcgcatcctgccatcgctagaagataccctgagccttgtgaagcggatagagaggactggcattgctgccatcgcagttcatgggaggaagcgggaggagcgacctcagcatcctgtcagctgtgaagtcatcaaagccattgctgataccctctccattcctgtcatagccaacggaggatctcatgaccacatccaacagtattcggacatagaggactttcgacaagccacggcagcctcttccgtgatggtggcccgagcagccatgtggaacccatctatcttcctcaaggagggtctgcggcccctggaggaggtcatgcagaaatacatcagatacgcggtgcagtatgacaaccactacaccaacaccaagtactgcttgtgccagatgctacgagaacagctggagtcgccccagggaaggttgctccatgctgcccagtcttcccgggaaatttgtgaggcctttggccttggtgccttctatgaggagaccacacaggagctggatgcccagcaggccaggctctcagccaagacttcagagcagacaggggagccagctgaagatacctctggtgtcattaagatggctgtcaagtttgaccggagagcatacccagcccagatcacccctaagatgtgcctactagagtggtgccggagggagaagttggcacagcctgtgtatgaaacggttcaacgccctctagatcgcctgttctcctctattgtcaccgttgctgaacaaaagtatcagtctaccttgtgggacaagtccaagaaactggcggagcaggctgcagccatcgtctgtctgcggagccagggcctccctgagggtcggctgggtgaggagagcccttccttgcacaagcgaaagagggaggctcctgaccaagaccctgggggccccagagctcaggagctagcacaacctggggatctgtgcaagaagccctttgtggccttgggaagtggtgaagaaagccccctggaaggctggtgactactcttcctgccttagtcacccctccatgggcctggtgctaaggtggctgtggatgccacagcatgaaccagatgccgttgaacagtttgctggtcttgcctggcagaagttagatgtcctggcaggggccatcagcctagagcatggaccaggggccgcccaggggtggatcctggcccctttggtggatctgagtgacagggtcaagttctctttgaaaacaggagcttttcaggtggtaactccccaacctgacattggtactgtgcaataaagacaccccctaccctcacccacggctggctgcttcagccttgggcatcttc

SEQ ID NO: 8358 - DNA, 3920 bp, Homo sapiens
  source 1..3920: mol_type = unassigned DNA
aggagccgacgggcgctcgcaggctcagcgcgcgctgcccgcggcaggacccggccgcctccgccgccgccgccgcccctaagcctcccgaagccatggccgggctcggccaccccgccgccttcggccgggccacccacgccgtggtgcgggcgctacccgagtcgctcggccagcacgcgctgagaagcgccaagggcgaggaggtggacgtcgcccgcgcggaacggcagcaccagctctacgtgggcgtgctgggcagcaagctggggctgcaggtggtggagctgccggccgacgagagccttccggactgcgtcttcgtggaggacgtggccgtggtgtgcgaggagacggccctcatcacccgacccggggcgccgagccggaggaaggaggttgacatgatgaaagaagcattagaaaaacttcagctcaatatagtagagatgaaagatgaaaatgcaactttagatggcggagatgttttattcacaggcagagaattttttgtgggcctttccaaaaggacaaatcaacgaggtgctgaaatcttggctgatacttttaaggactatgcagtctccacagtgccagtggcagatgggttgcatttgaagagtttctgcagcatggctgggcctaacctgatcgcaattgggtctagtgaatctgcacagaaggcccttaagatcatgcaacagatgagtgaccaccgctacgacaaactcactgtgcctgatgacatagcagcaaactgtatatatctaaatatccccaacaaagggcacgtcttgctgcaccgaaccccggaagagtatccagaaagtgcaaaggtttatgagaaactgaaggaccatatgctgatccccgtgagcatgtctgaactggaaaaggtggatgggctgctcacctgctgctcagttttaattaacaagaaagtagactcctgagctgcagagtcccccccggttgccggcaagaccgcacaggcaaggccgatgactctgtgcccactcctgttgttttccttgacaatctactgtgccactgtgctactaactcttgtttacaaaatttgattctaagttgaattgcttcattcaacacccccaccctccctcccctcgaggtggtacctaagctgtggatttgctaaatgaattaagcaacctagaagatacagagctaatgaattatcaaaatgtgattaatcccagtaaggaaacactcatttagtgtctgtatttttggtgtgaaaattatttagttgccagtatattctgaagaatgtcttcttgatcagtcagataagcttgctttttttttttttttttttcatgaatcatgtttggttcctgtgaaagtccctggtccagggatcctcctcctttctcttttacttctgaattctgaaattcagttagttacttttgcctttcgctcttctatcacagccaccttgaccttgggtaaaacccaaggtctttccttctggctaccttcctgcaggtccaccctgtctgccattggtctcctctgcctctgactacatctgccaccaacaaccctcccctcacccctgccaggggcagacaggcttctcagcagaactgtgactgaaatcagagctgctgtctggggcagtgttaactacacagaggcacatcctgacagggtttgccccagagatctaaattccagaaggagggcaccacacctaggaaggtaaatccagtatcagaaggttgctaaaagattaaagatcaagaagcttggaaacatcccatgggtacaatgtcttagaaagtctttaagtcacataccatgaatttttgcttcattactgaccatatatgaccttggaggaactcttttttttttttccttctactcatttctgtttccacctaccctgactcaccgtatttccagtcttctacccctgcagttatcctagtccagcaaagtcatttctttcaaaagagacatcatgtctgaaaataattactggtagtctaatatgagccagagtaaacagctcctcatggtcaatgaacatgttcaggaagcgatcaccttgatgcttgaacccaaccccagacagtggacaattctactttgaaatatccgtgaatatttactgtgggatccaatttaaacttctttcttctctagcctttaaattacacaactttgaactgacacggatctcttacaaagaacaatgcggcactgaaggaagagatgattcctttactcaaacctgcaggaatcagcctattaacaggcaggggaaacggtactttccaatgaatggtaactgatccaggcacattatcacacttcctagtcatctccacctttcctgtattgcctgtggcttgttgtttaagattaagaatcaaagagattaagaagtatcacttcaaatcttgctctgctcacttctatgtttgcagtcaaattattccttatgttggtgacctaaagagaattactttcattcatttcatttcccccgtagcagatggaaggagaaacctctgagaaaatgaaaacatccttaaccactatctttcccttttatttgattattttatgtcagaaatttgcaaaagtttttttctcctccttctcttccttgttgcttaactttttaattcatgccatatgcagatatccaattatgtgcatcctgtgaataaaccacgtcttggtcactgtcatattttgaaccatctcatcagagatgaataatatctttttaccagagagagaacgaatgttagccacatgcccaagttaacaaagaaaaaatgttctcaaggttgtccttttgggttaaatctggcccttccttggcaaaagcaaaaattctccctgtgagagctcaacatctcaaatacaaccacaggaaaaatggcccaatctgccagtttaggcttaccagcatataatttttaatatctttacttctatcatcccaaatcaaagaactcttctctattatgtttaatcaattgcaagcaaatagatttttctttgtaacaatttgttctgcagaaggctgtttttcacttttcctttcttttgcttctttctgtctttccttctcttttgtctggagaaatcacttagactctgtgtgcctcttctacattgcattctgctctgctatgttacctgctaggctggcttctttggactccctatatgattgatgatgtgaaaacctaaattacttgcagcatagtattacttctttgatgttctcattagcataatgttatttttgaaaaggaaagatactatcacataagttttcctcatctgttgtgatatacaccaatggataaactaacggaaactgctttttgacattaaaagacaggagaaattatatttaactaagtaaaagttaagtcagaattacttgggtgatgtgattcaatttagttaaaggatgatatagagaaaatacattatttagcattatttcttcagctataatgaattgctatagaaatcaggcagatctttctaatgtgtattgattggtcttttcagctactctgaacagattactaaggccatctcctcatctctaagggagaaaaatagtctgtagatgaataatgtaaggtaaagagttgcatgtcagtctttgtaattatttacactttaactttctccagaactcagacatgatttcaacatggtgttagatttgtgcattttattttcctgaccacctcattccagccaatgtatggttatccactctgtgtgccaaaaccaatcatgcctttcacggccctttagttcagagaagttctgcactgatttttagtctcttgatgtctcaatcttacatgtataccaatcacaatggaataaagtgttgagttgtactgtga

SEQ ID NO: 8359 - DNA, 1043 bp, Homo sapiens
  source 1..1043: mol_type = unassigned DNA
agtcagagagaagttcattgttcacacctcccggctgccggcagccttctggaggatccgattcaatgtggttgtacggtctcgggcaggttgacatgatgaaagaagcattagaaaaacttcagctcaatatagtagagatgaaagatgaaaatgcaactttagatggcggagatgttttattcacaggcagagaattttttgtgggcctttccaaaaggacaaatcaacgaggtgctgaaatcttggctgatacttttaaggactatgcagtctccacagtgccagtggcagatgggttgcatttgaagagtttctgcagcatggctgggcctaacctgatcgcaattgggtctagtgaatctgcacagaaggcccttaagatcatgcaacagatgagtgaccaccgctacgacaaactcactgtgcctgatgacatagcagcaaactgtatatatctaaatatccccaacaaagggcacgtcttgctgcaccgaaccccggaagagtatccagaaagtgcaaaggtttatgagaaactgaaggaccatatgctgatccccgtgagcatgtctgaactggaaaaggtggatgggctgctcacctgctgctcagttttaattaacaagaaagtagactcctgagctgcagagtcccccccggttgccggcaagaccgcacaggcaaggccgatgactctgtgcccactcctgttgttttccttgacaatctactgtgccactgtgctactaactcttgtttacaaaatttgattctaagttgaattgcttcattcaacacccccaccctccctcccctcgaggtggtacctaagctgtggatttgctaaatgaattaagcaacctagaagatacagagctaatgaattatcaaaatgtgattaatcccagtaaggaaacactcatttagtgtctgtatttttggtgtgaaaattatttagttgccagtatattctgaagaatgtcttcttgatcagtcagataagcttgctttttttttttttttttttcatgaatcatgtt

SEQ ID NO: 8360 - DNA, 4017 bp, Homo sapiens
  source 1..4017: mol_type = unassigned DNA
gtttgtttctggacttcaactggggaatcttgaggatgagtttgccccagaagagaaatttagagaaccttaccgtcagctgcccatttaaagcagggggtgtgttgtgggatgggggtgggaagctggagcaacagggccaggaggtgtgggagcgggagacactagagtaacctatgtgcacagcctctccatataccatgtgctgttgcgcctgctagtaatcgacgacattaggcaagagaaacagcggctcctcaagtcctgcccaaagaccgtccagaaaccccagcctcccgtcgccttctcgccgcctccgctgggagccgcagatcagtccaagttgacggacaggaggcgaaatgtgcaaatgtttatggtttcatctgtatggaaaaggagctctggtaactttggccaagacttttcagtaggaaatgcttcaaaatacaaagcaagagctattttcaagaaagaccttctaaatttatattaggttgacatgatgaaagaagcattagaaaaacttcagctcaatatagtagagatgaaagatgaaaatgcaactttagatggcggagatgttttattcacaggcagagaattttttgtgggcctttccaaaaggacaaatcaacgaggtgctgaaatcttggctgatacttttaaggactatgcagtctccacagtgccagtggcagatgggttgcatttgaagagtttctgcagcatggctgggcctaacctgatcgcaattgggtctagtgaatctgcacagaaggcccttaagatcatgcaacagatgagtgaccaccgctacgacaaactcactgtgcctgatgacatagcagcaaactgtatatatctaaatatccccaacaaagggcacgtcttgctgcaccgaaccccggaagagtatccagaaagtgcaaaggtttatgagaaactgaaggaccatatgctgatccccgtgagcatgtctgaactggaaaaggtggatgggctgctcacctgctgctcagttttaattaacaagaaagtagactcctgagctgcagagtcccccccggttgccggcaagaccgcacaggcaaggccgatgactctgtgcccactcctgttgttttccttgacaatctactgtgccactgtgctactaactcttgtttacaaaatttgattctaagttgaattgcttcattcaacacccccaccctccctcccctcgaggtggtacctaagctgtggatttgctaaatgaattaagcaacctagaagatacagagctaatgaattatcaaaatgtgattaatcccagtaaggaaacactcatttagtgtctgtatttttggtgtgaaaattatttagttgccagtatattctgaagaatgtcttcttgatcagtcagataagcttgctttttttttttttttttttcatgaatcatgtttggttcctgtgaaagtccctggtccagggatcctcctcctttctcttttacttctgaattctgaaattcagttagttacttttgcctttcgctcttctatcacagccaccttgaccttgggtaaaacccaaggtctttccttctggctaccttcctgcaggtccaccctgtctgccattggtctcctctgcctctgactacatctgccaccaacaaccctcccctcacccctgccaggggcagacaggcttctcagcagaactgtgactgaaatcagagctgctgtctggggcagtgttaactacacagaggcacatcctgacagggtttgccccagagatctaaattccagaaggagggcaccacacctaggaaggtaaatccagtatcagaaggttgctaaaagattaaagatcaagaagcttggaaacatcccatgggtacaatgtcttagaaagtctttaagtcacataccatgaatttttgcttcattactgaccatatatgaccttggaggaactcttttttttttttccttctactcatttctgtttccacctaccctgactcaccgtatttccagtcttctacccctgcagttatcctagtccagcaaagtcatttctttcaaaagagacatcatgtctgaaaataattactggtagtctaatatgagccagagtaaacagctcctcatggtcaatgaacatgttcaggaagcgatcaccttgatgcttgaacccaaccccagacagtggacaattctactttgaaatatccgtgaatatttactgtgggatccaatttaaacttctttcttctctagcctttaaattacacaactttgaactgacacggatctcttacaaagaacaatgcggcactgaaggaagagatgattcctttactcaaacctgcaggaatcagcctattaacaggcaggggaaacggtactttccaatgaatggtaactgatccaggcacattatcacacttcctagtcatctccacctttcctgtattgcctgtggcttgttgtttaagattaagaatcaaagagattaagaagtatcacttcaaatcttgctctgctcacttctatgtttgcagtcaaattattccttatgttggtgacctaaagagaattactttcattcatttcatttcccccgtagcagatggaaggagaaacctctgagaaaatgaaaacatccttaaccactatctttcccttttatttgattattttatgtcagaaatttgcaaaagtttttttctcctccttctcttccttgttgcttaactttttaattcatgccatatgcagatatccaattatgtgcatcctgtgaataaaccacgtcttggtcactgtcatattttgaaccatctcatcagagatgaataatatctttttaccagagagagaacgaatgttagccacatgcccaagttaacaaagaaaaaatgttctcaaggttgtccttttgggttaaatctggcccttccttggcaaaagcaaaaattctccctgtgagagctcaacatctcaaatacaaccacaggaaaaatggcccaatctgccagtttaggcttaccagcatataatttttaatatctttacttctatcatcccaaatcaaagaactcttctctattatgtttaatcaattgcaagcaaatagatttttctttgtaacaatttgttctgcagaaggctgtttttcacttttcctttcttttgcttctttctgtctttccttctcttttgtctggagaaatcacttagactctgtgtgcctcttctacattgcattctgctctgctatgttacctgctaggctggcttctttggactccctatatgattgatgatgtgaaaacctaaattacttgcagcatagtattacttctttgatgttctcattagcataatgttatttttgaaaaggaaagatactatcacataagttttcctcatctgttgtgatatacaccaatggataaactaacggaaactgctttttgacattaaaagacaggagaaattatatttaactaagtaaaagttaagtcagaattacttgggtgatgtgattcaatttagttaaaggatgatatagagaaaatacattatttagcattatttcttcagctataatgaattgctatagaaatcaggcagatctttctaatgtgtattgattggtcttttcagctactctgaacagattactaaggccatctcctcatctctaagggagaaaaatagtctgtagatgaataatgtaaggtaaagagttgcatgtcagtctttgtaattatttacactttaactttctccagaactcagacatgatttcaacatggtgttagatttgtgcattttattttcctgaccacctcattccagccaatgtatggttatccactctgtgtgccaaaaccaatcatgcctttcacggccctttagttcagagaagttctgcactgatttttagtctcttgatgtctcaatcttacatgtataccaatcacaatggaataaagtgttgagttgtactgtg

SEQ ID NO: 8361 - DNA, 1517 bp, Homo sapiens
  source 1..1517: mol_type = unassigned DNA
caagaggagccgacgggcgctcgcaggctcagcgcgcgctgcccgcggcaggacccggccgcctccgccgccgccgccgcccctaagcctcccgaagccatggccgggctcggccaccccgccgccttcggccgggccacccacgccgtggtgcgggcgctacccgagtcgctcggccagcacgcgctgagaagcgccaagggcgaggaggtggacgtcgcccgcgcggaacggcagcaccagctctacgtgggcgtgctgggcagcaagctggggctgcaggtggtggagctgccggccgacgagagccttccggactgcgtcttcgtggaggacgtggccgtggtgtgcgaggagacggccctcatcacccgacccggggcgccgagccggaggaaggaggttgacatgatgaaagaagcattagaaaaacttcagctcaatatagtagagatgaaagatgaaaatgcaactttagatggcggagatgttttattcacaggcagagaattttttgtgggcctttccaaaaggacaaatcaacgaggtgctgaaatcttggctgatacttttaaggactatgcagtctccacagtgccagtggcagatgggttgcatttgaagagtttctgcagcatggctgggcctaacctgatcgcaattgggtctagtgaatctgcacagaaggcccttaagatcatgcaacagatgagtgaccaccgctacgacaaactcactgtgcctgatgacatagcagcaaactgtatatatctaaatatccccaacaaagggcacgtcttgctgcaccgaaccccggaagagtatccagaaagtgcaaaggtttatgagaaactgaaggaccatatgctgatccccgtgagcatgtctgaactggaaaaggtggatgggctgctcacctgctgctcagttttaattaacaagaaagtagactcctgagctgcagagtcccccccggttgccggcaagaccgcacaggcaaggccgatgactctgtgcccactcctgttgttttccttgacaatctgattcaatttagttaaaggatgatatagagaaaatacattatttagcattatttcttcagctataatgaattgctatagaaatcaggcagatctttctaatgtgtattgattggtcttttcagctactctgaacagattactaaggccatctcctcatctctaagggagaaaaatagtctgtagatgaataatgtaaggtaaagagttgcatgtcagtctttgtaattatttacactttaactttctccagaactcagacatgatttcaacatggtgttagatttgtgcattttattttcctgaccacctcattccagccaatgtatggttatccactctgtgtgccaaaaccaatcatgcctttcacggccctttagttcagagaagttctgcactgatttttagtctcttgatgtctcaatcttacatgtataccaatcacaatggaataaagtgttgagttgtactgtg

SEQ ID NO: 8362 - DNA, 1066 bp, Homo sapiens
  source 1..1066: mol_type = unassigned DNA
cagactgttcttcagtaacacaggtggatgttaaaacagggaatctgttgaaaagattgcggaggaactgcttcccaaaagcagttctggatggcaatttgatggcagtcagctatggttgacatgatgaaagaagcattagaaaaacttcagctcaatatagtagagatgaaagatgaaaatgcaactttagatggcggagatgttttattcacaggcagagaattttttgtgggcctttccaaaaggacaaatcaacgaggtgctgaaatcttggctgatacttttaaggactatgcagtctccacagtgccagtggcagatgggttgcatttgaagagtttctgcagcatggctgggcctaacctgatcgcaattgggtctagtgaatctgcacagaaggcccttaagatcatgcaacagatgagtgaccaccgctacgacaaactcactgtgcctgatgacatagcagcaaactgtatatatctaaatatccccaacaaagggcacgtcttgctgcaccgaaccccggaagagtatccagaaagtgcaaaggtttatgagaaactgaaggaccatatgctgatccccgtgagcatgtctgaactggaaaaggtggatgggctgctcacctgctgctcagttttaattaacaagaaagtagactcctgagctgcagagtcccccccggttgccggcaagaccgcacaggcaaggccgatgactctgtgcccactcctgttgttttccttgacaatctactgtgccactgtgctactaactcttgtttacaaaatttgattctaagttgaattgcttcattcaacacccccaccctccctcccctcgaggtggtacctaagctgtggatttgctaaatgaattaagcaacctagaagatacagagctaatgaattatcaaaatgtgattaatcccagtaaggaaacactcatttagtgtctgtatttttggtgtgaaaattatttagttgccagtatattctgaagaatgtcttcttgatcagtcagataagcttgctttttttttttttttttttcatgaatc

SEQ ID NO: 8363 - DNA, 1330 bp, Homo sapiens
  source 1..1330: mol_type = unassigned DNA
cccgcttagacaatgccccggagccgccagaccgtcgcgcccctgccccatcgtagtatatgagctcgcctacacaaggacccgcgctaaaagccagagctcccagtccccgaggcttgaagacggggactcccttctccaccaactctgtcctcggggggtggggccccagccgagatcacagcgcgacaggagtgggggtggccgctggaggtgaagaaacaagaaaactaagaaatccgagcggttggagggggagtctgtgtggatgggatggggacgccgggggaggggctgggccgctgctcccatgccctgatccggggagtcccagagagcctggcgtcgggggaaggtgcgggggctggccttcccgctctggatctggccaaagctcaaagggagcacggggtgctgggaggtaaactgaggcaacgactggggctacagctgctagaactgccacctgaggagtcattgccgctgggaccgctgcttggcgacacggccgtgatccaaggggacacggccctaatcacgcggccctggagccccgctcgtaggccagaggtcgatggagtccgcaaagccctgcaagacctggggctccgaattgtggaaataggagacgagaacgcgacgctggatggcactgacgttctcttcaccggccgggagtttttcgtaggcctctccaaatggaccaatcaccgaggagctgagatcgtggcggacacgttccgggacttcgccgtctccactgtgccagtctcgggtccctcccacctgcgcggtctctgcggcatggggggacctcgcactgttgtggcaggcagcagcgacgctgcccaaaaggctgtccgggcaatggcagtgctgacagatcacccatatgcctccctgaccctcccagatgacgcagctgctgactgtctctttcttcgtcctgggttgcctggtgtgccccctttcctcctgcaccgtggaggtggggatctgcccaacagccaggaggcactgcagaagctctctgatgtcaccctggtacctgtgtcctgctcagaactggagaaggctggcgccgggctcagctccctctgcttggtgctcagcacacgcccccacagctgagggcctggccttggggtactgctggccaggggtaggatagtataggaagtagaaggggaaggagggttagatagagaatgctgaataggcagtagttgggagagagcctcaatattgggggaggggagagtgtagggaaaaggatccactgggtgaatcctccctctcagaaccaataaaatagaattgaccttttaga

SEQ ID NO: 8364 - DNA, 1688 bp, Homo sapiens
  source 1..1688: mol_type = unassigned DNA
atactaggtcgcgctaggggcagcgtgaccagccagggcggagagaggatgcttaactccttaggctcgaactcctcccttcctacccacctctctcccttctcgttcgggtattcaggacttccattccccagcccctgcctctccagctttctccttctgtcccataacccctgcgggtcgcgggctggacttccagtccctgcggtagcgagcagctgagggttaagggggcggggctgctgcatttttggggagtgagcgcatcctagtggctgccaagaggggcgcccgacagggacctcacaagcccccaagcaggggcaacaggtgttttggagattagagaccctagccttgttcctcaggctcctcttaaagaatctgacccctgagggtgctgggtagagtgaggtcgacaggagcggaaggtctggagtgggtggggcggagtgggagggacgcctagagatggcaggaggaagacctgggcgctcttaaccacccccaacgcccttgtctgcatgtctttttctctgtctcctccttttctgtttcttctcccagacaggtgaagaaacaagaaaactaagaaatccgagcggttggagggggagtctgtgtggatgggatggggacgccgggggaggggctgggccgctgctcccatgccctgatccggggagtcccagagagcctggcgtcgggggaaggtgcgggggctggccttcccgctctggatctggccaaagctcaaagggagcacggggtgctgggaggtaaactgaggcaacgactggggctacagctgctagaactgccacctgaggagtcattgccgctgggaccgctgcttggcgacacggccgtgatccaaggggacacggccctaatcacgcggccctggagccccgctcgtaggccagaggtcgatggagtccgcaaagccctgcaagacctggggctccgaattgtggaaataggagacgagaacgcgacgctggatggcactgacgttctcttcaccggccgggagtttttcgtaggcctctccaaatggaccaatcaccgaggagctgagatcgtggcggacacgttccgggacttcgccgtctccactgtgccagtctcgggtccctcccacctgcgcggtctctgcggcatggggggacctcgcactgttgtggcaggcagcagcgacgctgcccaaaaggctgtccgggcaatggcagtgctgacagatcacccatatgcctccctgaccctcccagatgacgcagctgctgactgtctctttcttcgtcctgggttgcctggtgtgccccctttcctcctgcaccgtggaggtggggatctgcccaacagccaggaggcactgcagaagctctctgatgtcaccctggtacctgtgtcctgctcagaactggagaaggctggcgccgggctcagctccctctgcttggtgctcagcacacgcccccacagctgagggcctggccttggggtactgctggccaggggtaggatagtataggaagtagaaggggaaggagggttagatagagaatgctgaataggcagtagttgggagagagcctcaatattgggggaggggagagtgtagggaaaaggatccactgggtgaatcctccctctcagaaccaataaaatagaattgaccttttaga

SEQ ID NO: 8365 - DNA, 1688 bp, Homo sapiens
  source 1..1688: mol_type = unassigned DNA
ataaaatacagaataaaaatcaagtgtttttacgcaatggggatttaaagtgtgggcgacatggaatgaggggtgggtcagtgatcttgagctcagggcagaagccaggaattaagaagggaaatgtttgtggtggggctgctatgtttcgtgccggtccgccggtccgccgttgcgctgttctgaggtctacgaagcgtttgcagccccgtcgccagggccggccagatctgggtgggcctgggcagcgctcgctgggcggtgccgatttctggcaaggggggcgcagtctggatgtaatgggcgaggcttagcagggcggaatgggcgtggcccgaagaagccccgccccgtcccgcttagacaatgccccggagccgccagaccgtcgcgcccctgccccatcgtagtatatgagctcgcctacacaaggacccgcgctaaaagccagagctcccagtccccgaggcttgaagacggggactcccttctccaccaactctgtcctcggggggtggggccccagccgagatcacagcgcgacaggagtgggggtggccgctggagacaggtgaagaaacaagaaaactaagaaatccgagcggttggagggggagtctgtgtggatgggatggggacgccgggggaggggctgggccgctgctcccatgccctgatccggggagtcccagagagcctggcgtcgggggaaggtgcgggggctggccttcccgctctggatctggccaaagctcaaagggagcacggggtgctgggaggtaaactgaggcaacgactggggctacagctgctagaactgccacctgaggagtcattgccgctgggaccgctgcttggcgacacggccgtgatccaaggggacacggccctaatcacgcggccctggagccccgctcgtaggccagaggtcgatggagtccgcaaagccctgcaagacctggggctccgaattgtggaaataggagacgagaacgcgacgctggatggcactgacgttctcttcaccggccgggagtttttcgtaggcctctccaaatggaccaatcaccgaggagctgagatcgtggcggacacgttccgggacttcgccgtctccactgtgccagtctcgggtccctcccacctgcgcggtctctgcggcatggggggacctcgcactgttgtggcaggcagcagcgacgctgcccaaaaggctgtccgggcaatggcagtgctgacagatcacccatatgcctccctgaccctcccagatgacgcagctgctgactgtctctttcttcgtcctgggttgcctggtgtgccccctttcctcctgcaccgtggaggtggggatctgcccaacagccaggaggcactgcagaagctctctgatgtcaccctggtacctgtgtcctgctcagaactggagaaggctggcgccgggctcagctccctctgcttggtgctcagcacacgcccccacagctgagggcctggccttggggtactgctggccaggggtaggatagtataggaagtagaaggggaaggagggttagatagagaatgctgaataggcagtagttgggagagagcctcaatattgggggaggggagagtgtagggaaaaggatccactgggtgaatcctccctctcagaaccaataaaatagaattgaccttttaga

SEQ ID NO: 8366 - DNA, 1330 bp, Homo sapiens
  source 1..1330: mol_type = unassigned DNA
cccgcttagacaatgccccggagccgccagaccgtcgcgcccctgccccatcgtagtatatgagctcgcctacacaaggacccccgctaaaagccagagctcccagtccccgaggcttgaagacggggactcccttctccaccaactctgtcctcggggggtggggccccagccgagatcacagcgcgacaggagtgggggtggccgctggaggtgaagaaacaagaaaactaagaaatccgagcggttggagggggagtctgtgtggatgggatggggacgccgggggaggggctgggccgctgctcccatgccctgatccggggagtcccagagagcctggcgtcgggggaaggtgcgggggctggccttcccgctctggatctggccaaagctcaaagggagcacggggtgctgggaggtaaactgaggcaacgactggggctacagctgctagaactgccacctgaggagtcattgccgctgggaccgctgcttggcgacacggccgtgatccaaggggacacggccctaatcacgcggccctggagccccgctcgtaggccagaggtcgatggagtccgcaaagccctgcaagacctggggctccgaattgtggaaataggagacgagaacgcgacgctggatggcactgacgttctcttcaccggccgggagtttttcgtaggcctctccaaatggaccaatcaccgaggagctgagatcgtggcggacacgttccgggacttcgccgtctccactgtgccagtctcgggtccctcccacctgcgcggtctctgcggcatggggggacctcgcactgttgtggcaggcagcagcgacgctgcccaaaaggctgtccgggcaatggcagtgctgacagatcacccatatgcctccctgaccctcccagatgacgcagctgctgactgtctctttcttcgtcctgggttgcctggtgtgccccctttcctcctgcaccgtggaggtggggatctgcccaacagccaggaggcactgcagaagctctctgatgtcaccctggtacctgtgtcctgctcagaactggagaaggctggcgccgggctcagctccctctgcttggtgctcagcacacgcccccacagctgagggcctggccttggggtactgctggccaggggtaggatagtataggaagtagaaggggaaggagggttagatagagaatgctgaataggcagtagttgggagagagcctcaatattgggggaggggagagtgtagggaaaaggatccactgggtgaatcctccctctcagaaccaataaaatagaattgaccttttaga

SEQ ID NO: 8367 - DNA, 1688 bp, Homo sapiens
  source 1..1688: mol_type = unassigned DNA
atactaggtcgtgctaggggcagcgtgaccagccagggcggagagaggatgcttaactccttaggctcgaactcctcccttcctacccacctctctcccttctcgttcgggtattcaggacttccattccccagcccctgcctctccagctttctccttctgtcccataacccctgcgggtcccgggctggacttccagtccctgcggtagcgagcagctgagggttaagggggcggggctgctgcatttttggggagtgagcgcatcctagtggctgccaagaggggcgcccgacagggacctcacaagcccccaagcaggggcaacaggtgttttggagattagagaccctagccttgttcctcaggctcctcttaaagaatctgacccctgagggtgctgggtagagtgaggtcgacaggagcggaaggtctggagtgggtggggcggagtgggagggacgcctagagatggcaggaggaagacctgggcgctcttaaccacccccaacgcccttgtctgcatgtctttttctctgtctcctccttttctgtttcttctcccagacaggtgaagaaacaagaaaactaagaaatccgagcggttggagggggagtctgtgtggatgggatggggacgccgggggaggggctgggccgctgctcccatgccctgatccggggagtcccagagagcctggcgtcgggggaaggtgcgggggctggccttcccgctctggatctggccaaagctcaaagggagcacggggtgctgggaggtaaactgaggcaacgactggggctacagctgctagaactgccacctgaggagtcattgccgctgggaccgctgcttggcgacacggccgtgatccaaggggacacggccctaatcacgcggccctggagccccgctcgtaggccagaggtcgatggagtccgcaaagccctgcaagacctggggctccgaattgtggaaataggagacgagaacgcgacgctggatggcactgacgttctcttcaccggccgggagtttttcgtaggcctctccaaatggaccaatcaccgaggagctgagatcgtggcggacacgttccgggacttcgccgtctccactgtgccagtctcgggtccctcccacctgcgcggtctctgcggcatggggggacctcgcactgttgtggcaggcagcagcgacgctgcccaaaaggctgtccgggcaatggcagtgctgacagatcacccatatgcctccctgaccctcccagatgacgcagctgctgactgtctctttcttcgtcctgggttgcctggtgtgccccctttcctcctgcaccgtggaggtggggatctgcccaacagccaggaggcactgcagaagctctctgatgtcaccctggtacctgtgtcctgctcagaactggagaaggctggcgccgggctcagctccctctgcttggtgctcagcacacgcccccacagctgagggcctggccttggggtactgctggccaggggtaggatagtataggaagtagaaggggaaggagggttagatagagaatgctgaataggcagtagttgggagagagcctcaatattgggggaggggagagtgtagggaaaaggatccactgggtgaatcctccctctcagaaccaataaaatagaattgaccttttaga

SEQ ID NO: 8368 - DNA, 1688 bp, Homo sapiens
  source 1..1688: mol_type = unassigned DNA
ataaaatacagaataaaaatcaagtgtttttacgcaatgggggtttaaagtgtgggcgacatggaatgaggggtgggtcagtgatcttgagctcagggcagaagccaggaattaagaagggaaatgtttgtggtggggctgctatgtttcgtgccggtccgccggtccgccgttgcgctgttctgaggtctacgaagcgtttgcagccccgtcgccagggccggccagatctgggtgggcctgggcagcgctcgctgggcggtgccgatttctggcaaggggggcgcagtctggatgtaatgggcgcggcttagcagggcggaatgggcgtggcccgaagaagccccgccccgtcccgcttagacaatgccccggagccgccagaccgtcgcgcccctgccccatcgtagtatatgagctcgcctacacaaggacccccgctaaaagccagagctcccagtccccgaggcttgaagacggggactcccttctccaccaactctgtcctcggggggtggggccccagccgagatcacagcgcgacaggagtgggggtggccgctggagacaggtgaagaaacaagaaaactaagaaatccgagcggttggagggggagtctgtgtggatgggatggggacgccgggggaggggctgggccgctgctcccatgccctgatccggggagtcccagagagcctggcgtcgggggaaggtgcgggggctggccttcccgctctggatctggccaaagctcaaagggagcacggggtgctgggaggtaaactgaggcaacgactggggctacagctgctagaactgccacctgaggagtcattgccgctgggaccgctgcttggcgacacggccgtgatccaaggggacacggccctaatcacgcggccctggagccccgctcgtaggccagaggtcgatggagtccgcaaagccctgcaagacctggggctccgaattgtggaaataggagacgagaacgcgacgctggatggcactgacgttctcttcaccggccgggagtttttcgtaggcctctccaaatggaccaatcaccgaggagctgagatcgtggcggacacgttccgggacttcgccgtctccactgtgccagtctcgggtccctcccacctgcgcggtctctgcggcatggggggacctcgcactgttgtggcaggcagcagcgacgctgcccaaaaggctgtccgggcaatggcagtgctgacagatcacccatatgcctccctgaccctcccagatgacgcagctgctgactgtctctttcttcgtcctgggttgcctggtgtgccccctttcctcctgcaccgtggaggtggggatctgcccaacagccaggaggcactgcagaagctctctgatgtcaccctggtacctgtgtcctgctcagaactggagaaggctggcgccgggctcagctccctctgcttggtgctcagcacacgcccccacagctgagggcctggccttggggtactgctggccaggggtaggatagtataggaagtagaaggggaaggagggttagatagagaatgctgaataggcagtagttgggagagagcctcaatattgggggaggggagagtgtagggaaaaggatccactgggtgaatcctccctctcagaaccaataaaatagaattgaccttttaga

SEQ ID NO: 8369 - DNA, 1688 bp, Homo sapiens; identical to SEQ ID NO: 8368
  source 1..1688: mol_type = unassigned DNA

SEQ ID NO: 8370 - DNA, 724 bp, Homo sapiens
  source 1..724: mol_type = unassigned DNA
tcgtaggccagaggtcgatggagtccgcaaagccctgcaagacctggggctccgaattgtggaaataggagacgagaacgcgacgctggatggcactgacgttctcttcaccggccgggagtttttcgtaggcctctccaaatggaccaatcaccgaggagctgagatcgtggcggacacgttccgggacttcgccgtctccactgtgccagtctcgggtccctcccacctgcgcggtctctgcggcatggggggacctcgcactgttgtggcaggcagcagcgacgctgcccaaaaggctgtccggatgacgcagctgctgactgtctctttcttcgtcctgggttgcctggtgtgccccctttcctcctgcaccgtggaggtggggatctgcccaacagccaggaggcactgcagaagctctctgatgtcaccctggtacctgtgtcctgctcagaactggagaaggctggcgccgggctcagctccctctgcttggtgctcagcacacgcccccacagctgagggcctggccttggggtactgctggccaggggtaggatagtataggaagtagaaggggaaggagggttagatagagaatgctgaataggcagtagttgggagagagcctcaatattgggggaggggagagtgtagggaaaaggatccactgggtgaatcctccctctcagaaccaataaaatagaattgaccttttaga

SEQ ID NO: 8371 - DNA, 724 bp, Homo sapiens; identical to SEQ ID NO: 8370
  source 1..724: mol_type = unassigned DNA

SEQ ID NO: 8372 - DNA, 1330 bp, Homo sapiens; identical to SEQ ID NO: 8366
  source 1..1330: mol_type = unassigned DNA

SEQ ID NO: 8373 - DNA, 1688 bp, Homo sapiens; identical to SEQ ID NO: 8364
  source 1..1688: mol_type = unassigned DNA

SEQ ID NO: 8374 - DNA, 1688 bp, Homo sapiens; identical to SEQ ID NO: 8364
  source 1..1688: mol_type = unassigned DNA

SEQ ID NO: 8375 - DNA, 887 bp, Homo sapiens
  source 1..887: mol_type = unassigned DNA
gtttatactaggtcgcgctaggggcagcgtgaccagccagggcggagagaggatgcttaactccttaggctcgaactcctcccttcctacccacctctctcccttctcgttcggacaggtgaagaaacaagaaaactaagaaatccgagcggttggagggggagtctgtgtggatgggatggggacgccgggggaggggctgggccgctgctcccatgccctgatccggggagtcccagagagcctggcgtcgggggaaggtgcgggggctggccttcccgctctggatctggccaaagctcaaagggagcacggggtgctgggaggtaaactgaggcaacgactggggctacagctgctagaactgccacctgaggagtcattgccgctgggaccgctgcttggcgacacggccgtgatccaaggggacacggccctaatcacgcggccctggagccccgctcgtaggccagaggtcgatggagtccgcaaagccctgcaagacctggggctccgaattgtggaaataggagacgagaacgcgacgctggatggcactgacgttctcttcaccggccgggagtttttcgtaggcctctccaaatggaccaatcaccgaggagctgagatcgtggcggacacgttccgggacttcgccgtctccactgtgccagtctcgggtccctcccacctgcgcggtctctgcggcatggggggacctcgcactgttgtggcaggcagcagcgacgctgcccaaaaggctgtccgggcaatggcagtgctgacagatcacccatatgcctccctgaccctcccagatgacgcagctgctgactgtctctttcttcgtcctgggttgcctggtgtgccccctttcctcctgcacc

SEQ ID NO: 8376 - DNA, 882 bp, Homo sapiens
  source 1..882: mol_type = unassigned DNA
ccgacagggacctcacaagcccccaagcaggggcaacaggtgttttggagattagagaccctagccttgttcctcaggctcctcttaaagaatctgacccctgagggtgctgggtagagtgaggtcgacaggagcggaagacaggtgaagaaacaagaaaactaagaaatccgagcggttggagggggagtctgtgtggatgggatggggacgccgggggaggggctgggccgctgctcccatgccctgatccggggagtcccagagagcctggcgtcgggggaaggtgcgggggctggccttcccgctctggatctggccaaagctcaaagggagcacggggtgctgggaggtaaactgaggcaacgactggggctacagctgctagaactgccacctgaggagtcattgccgctgggaccgctgcttggcgacacggccgtgatccaaggggacacggccctaatcacgcggccctggagccccgctcgtaggccagaggtcgatggagtccgcaaagccctgcaagacctggggctccgaattgtggaaataggagacgagaacgcgacgctggatggcactgacgttctcttcaccggccgggagtttttcgtaggcctctccaaatggaccaatcaccgaggagctgagatcgtggcggacacgttccgggacttcgccgtctccactgtgccagtctcgggtccctcccacctgcgcggtctctgcggcatggggggacctcgcactgttgtggcaggcagcagcgacgctgcccaaaaggctgtccgggcaatggcagtgctgacagatcacccatatgcctccctgaccctcccagatgacgcagctgctgactgtctctttcttcgtcctggg

SEQ ID NO: 8377 - DNA, 887 bp, Homo sapiens; identical to SEQ ID NO: 8375
  source 1..887: mol_type = unassigned DNA

SEQ ID NO: 8378 - DNA, 1330 bp, Homo sapiens; identical to SEQ ID NO: 8366
  source 1..1330: mol_type = unassigned DNA

SEQ ID NO: 8379 - DNA, 1330 bp, Homo sapiens; identical to SEQ ID NO: 8366
  source 1..1330: mol_type = unassigned DNA

SEQ ID NO: 8380 - DNA, 1688 bp, Homo sapiens; identical to SEQ ID NO: 8364
  source 1..1688: mol_type = unassigned DNA

SEQ ID NO: 8381 - DNA, 882 bp, Homo sapiens; identical to SEQ ID NO: 8376
  source 1..882: mol_type = unassigned DNA

SEQ ID NO: 8382 - DNA, 1330 bp, Homo sapiens; identical to SEQ ID NO: 8366
  source 1..1330: mol_type = unassigned DNA

SEQ ID NO: 8383 - DNA, 882 bp, Homo sapiens; identical to SEQ ID NO: 8376
  source 1..882: mol_type = unassigned DNA

SEQ ID NO: 8384 - DNA, 882 bp, Homo sapiens; identical to SEQ ID NO: 8376
  source 1..882: mol_type = unassigned DNA

SEQ ID NO: 8385 - DNA, 1688 bp, Homo sapiens
  source 1..1688: mol_type = unassigned DNA
ataaaatacagaataaaaatcaagtgtttttacgcaatgggggtttaaagtgtgggcgacatggaatgaggggtgggtcagtgatcttgagctcagggcagaagccaggaattaagaagggaaatgtttgtggtggggctgctatgtttcgtgccggtccgccggtccgccgttgcgctgttctgaggtctacgaagcgtttgcagccccgtcgccagggccggccagatctgggtgggcctgggcagcgctcgctgggcggtgccgatttctggcaaggggggcgcagtctggatgtaatgggcgaggcttagcagggcggaatgggcgtggcccgaagaagccccgccccgtcccgcttagacaatgccccggagccgccagaccgtcgcgcccctgccccatcgtagtatatgagctcgcctacacaaggacccccgctaaaagccagagctcccagtccccgaggcttgaagacggggactcccttctccaccaactctgtcctcggggggtggggccccagccgagatcacagcgcgacaggagtgggggtggccgctggagacaggtgaagaaacaagaaaactaagaaatccgagcggttggagggggagtctgtgtggatgggatggggacgccgggggaggggctgggccgctgctcccatgccctgatccggggagtcccagagagcctggcgtcgggggaaggtgcgggggctggccttcccgctctggatctggccaaagctcaaagggagcacggggtgctgggaggtaaactgaggcaacgactggggctacagctgctagaactgccacctgaggagtcattgccgctgggaccgctgcttggcgacacggccgtgatccaaggggacacggccctaatcacgcggccctggagccccgctcgtaggccagaggtcgatggagtccgcaaagccctgcaagacctggggctccgaattgtggaaataggagacgagaacgcgacgctggatggcactgacgttctcttcaccggccgggagtttttcgtaggcctctccaaatggaccaatcaccgaggagctgagatcgtggcggacacgttccgggacttcgccgtctccactgtgccagtctcgggtccctcccacctgcgcggtctctgcggcatggggggacctcgcactgttgtggcaggcagcagcgacgctgcccaaaaggctgtccgggcaatggcagtgctgacagatcacccatatgcctccctgaccctcccagatgacgcagctgctgactgtctctttcttcgtcctgggttgcctggtgtgccccctttcctcctgcaccgtggaggtggggatctgcccaacagccaggaggcactgcagaagctctctgatgtcaccctggtacctgtgtcctgctcagaactggagaaggctggcgccgggctcagctccctctgcttggtgctcagcacacgcccccacagctgagggcctggccttggggtactgctggccaggggtaggatagtataggaagtagaaggggaaggagggttagatagagaatgctgaataggcagtagttgggagagagcctcaatattgggggaggggagagtgtagggaaaaggatccactgggtgaatcctccctctcagaaccaataaaatagaattgaccttttaga

SEQ ID NO: 8386 - DNA, 882 bp, Homo sapiens; identical to SEQ ID NO: 8376
  source 1..882: mol_type = unassigned DNA

SEQ ID NO: 8387 - DNA, 724 bp, Homo sapiens; identical to SEQ ID NO: 8370
  source 1..724: mol_type = unassigned DNA

SEQ ID NO: 8388 - DNA, 724 bp, Homo sapiens; identical to SEQ ID NO: 8370
  source 1..724: mol_type = unassigned DNA

SEQ ID NO: 8389 - DNA, 882 bp, Homo sapiens; identical to SEQ ID NO: 8376
  source 1..882: mol_type = unassigned DNA

SEQ ID NO: 8390 - DNA, 1688 bp, Homo sapiens
  source 1..1688: mol_type = unassigned DNA
ataaaatacagaataaaaatcaagtgtttttacgcaatggggatttaaagtgtgggcgacatggaatgaggggtgggtcagtgatcttgagctcagggcagaagccaggaattaagaagggaaatgtttgtggtggggctgctatgtttcgtgccggtccgccggtccgccgttgcgctgttctgaggtctacgaagcgtttgcagccccgtcgccagggccggccagatctgggtgggcctgggcagcgctcgctgggcggtgccgatttctggcaaggggggcgcagtctggatgtaatgggcgaggcttagcagggcggaatgggcgtggcccgaagaagccccgccccgtcccgcttagacaatgccccggagccgccagaccgtcgcgcccctgccccatcgtagtatatgagctcgcctacacaaggacccccgctaaaagccagagctcccagtccccgaggcttgaagacggggactcccttctccaccaactctgtcctcggggggtggggccccagccgagatcacagcgcgacaggagtgggggtggccgctggagacaggtgaagaaacaagaaaactaagaaatccgagcggttggagggggagtctgtgtggatgggatggggacgccgggggaggggctgggccgctgctcccatgccctgatccggggagtcccagagagcctggcgtcgggggaaggtgcgggggctggccttcccgctctggatctggccaaagctcaaagggagcacggggtgctgggaggtaaactgaggcaacgactggggctacagctgctagaactgccacctgaggagtcattgccgctgggaccgctgcttggcgacacggccgtgatccaaggggacacggccctaatcacgcggccctggagccccgctcgtaggccagaggtcgatggagtccgcaaagccctgcaagacctggggctccgaattgtggaaataggagacgagaacgcgacgctggatggcactgacgttctcttcaccggccgggagtttttcgtaggcctctccaaatggaccaatcaccgaggagctgagatcgtggcggacacgttccgggacttcgccgtctccactgtgccagtctcgggtccctcccacctgcgcggtctctgcggcatggggggacctcgcactgttgtggcaggcagcagcgacgctgcccaaaaggctgtccgggcaatggcagtgctgacagatcacccatatgcctccctgaccctcccagatgacgcagctgctgactgtctctttcttcgtcctgggttgcctggtgtgccccctttcctcctgcaccgtggaggtggggatctgcccaacagccaggaggcactgcagaagctctctgatgtcaccctggtacctgtgtcctgctcagaactggagaaggctggcgccgggctcagctccctctgcttggtgctcagcacacgcccccacagctgagggcctggccttggggtactgctggccaggggtaggatagtataggaagtagaaggggaaggagggttagatagagaatgctgaataggcagtagttgggagagagcctcaatattgggggaggggagagtgtagggaaaaggatccactgggtgaatcctccctctcagaaccaataaaatagaattgaccttttaga

SEQ ID NO: 8391 - DNA, 887 bp, Homo sapiens
  source 1..887: mol_type = unassigned DNA
gtttatactaggtcgtgctaggggcagcgtgaccagccagggcggagagaggatgcttaactccttaggctcgaactcctcccttcctacccacctctctcccttctcgttcggacaggtgaagaaacaagaaaactaagaaatccgagcggttggagggggagtctgtgtggatgggatggggacgccgggggaggggctgggccgctgctcccatgccctgatccggggagtcccagagagcctggcgtcgggggaaggtgcgggggctggccttcccgctctggatctggccaaagctcaaagggagcacggggtgctgggaggtaaactgaggcaacgactggggctacagctgctagaactgccacctgaggagtcattgccgctgggaccgctgcttggcgacacggccgtgatccaaggggacacggccctaatcacgcggccctggagccccgctcgtaggccagaggtcgatggagtccgcaaagccctgcaagacctggggctccgaattgtggaaataggagacgagaacgcgacgctggatggcactgacgttctcttcaccggccgggagtttttcgtaggcctctccaaatggaccaatcaccgaggagctgagatcgtggcggacacgttccgggacttcgccgtctccactgtgccagtctcgggtccctcccacctgcgcggtctctgcggcatggggggacctcgcactgttgtggcaggcagcagcgacgctgcccaaaaggctgtccgggcaatggcagtgctgacagatcacccatatgcctccctgaccctcccagatgacgcagctgctgactgtctctttcttcgtcctgggttgcctggtgtgccccctttcctcctgcacc

SEQ ID NO: 8392 - DNA, 887 bp, Homo sapiens; identical to SEQ ID NO: 8375
  source 1..887: mol_type = unassigned DNA

SEQ ID NO: 8393 - DNA, 1688 bp, Homo sapiens; identical to SEQ ID NO: 8367
  source 1..1688: mol_type = unassigned DNA

SEQ ID NO: 8394 - DNA, 880 bp, Homo sapiens
  source 1..880: mol_type = unassigned DNA
ccgacagggacctcacaagcccccaagcaggggcaacaggtgttttggagattagagaccctagccttgttcctcaggctcctcttaaagaatctgacccctgagggtgctgggtagagtgaggtcgacaggagcggaagacaggtgaagaaacaagaaaactaagaaatccgagcggttggagggggagtctgtgtggatgggatggggacgccgggggaggggctgggccgctgctcccatgccctgatccggggagtcccagagagcctggcgtcgggggaaggtgcgggggctggccttcccgctctggatctggccaaagctcaaagggagcacggggtgctgggaggtaaactgaggcaacgactggggctacagctgctagaactgccacctgaggagtcattgccgctgggaccgctgcttggcgacacggccgtgatccaaggggacacggccctaatcacgcggccctggagccccgctcgtaggccagaggtcgatggagtccgcaaagccctgcaagacctggggctccgaattgtggaaataggagacgagaacgcgacgctggatggcactgacgttctcttcaccggccgggagtttttcgtaggcctctccaaatggaccaatcaccgaggagctgagatcgtggcggacacgttccgggacttcgccgtctccactgtgccagtctcgggtccctcccacctgcgcggtctctgcggcatggggggacctcgcactgttgtggcaggcagcagcgacgctgcccaaaaggctgtccgggcaatggcagtgctgacagatcacccatatgcctccctgaccctcccagatgacgcagctgctgactgtctctttcttcgtcctg

SEQ ID NO: 8395 - DNA, 1330 bp, Homo sapiens; identical to SEQ ID NO: 8366
  source 1..1330: mol_type = unassigned DNA

SEQ ID NO: 8396 - DNA, 724 bp, Homo sapiens; identical to SEQ ID NO: 8370
  source 1..724: mol_type = unassigned DNA

SEQ ID NO: 8397 - DNA, 724 bp, Homo sapiens; identical to SEQ ID NO: 8370
  source 1..724: mol_type = unassigned DNA

SEQ ID NO: 8398 - DNA, 1688 bp, Homo sapiens; identical to SEQ ID NO: 8385
  source 1..1688: mol_type = unassigned DNA

SEQ ID NO: 8399 - DNA, 887 bp, Homo sapiens; identical to SEQ ID NO: 8375
  source 1..887: mol_type = unassigned DNA

SEQ ID NO: 8400 - DNA, 724 bp, Homo sapiens; identical to SEQ ID NO: 8370
  source 1..724: mol_type = unassigned DNA

SEQ ID NO: 8401 - DNA, 1688 bp, Homo sapiens; identical to SEQ ID NO: 8364
  source 1..1688: mol_type = unassigned DNA

SEQ ID NO: 8402 - DNA, 1688 bp, Homo sapiens; identical to SEQ ID NO: 8385
  source 1..1688: mol_type = unassigned DNA

SEQ ID NO: 8403 - DNA, 887 bp, Homo sapiens; identical to SEQ ID NO: 8391
  source 1..887: mol_type = unassigned DNA

SEQ ID NO: 8404 - DNA, 887 bp, Homo sapiens; identical to SEQ ID NO: 8375
  source 1..887: mol_type = unassigned DNA

SEQ ID NO: 8405 - DNA, 3097 bp, Homo sapiens
  source 1..3097: mol_type = unassigned DNA
gcgcctgcgccctcggcctcggcctagtcatgctccgtcccggcgcgcagctgctgcggggcctcctgctgcggagctgcccgctgcagggctcccccgggcgcccgcgctctgtctgcggccgggaaggagaggaaaaaccacccttatctgcagaaacacaatggaaagacagagcagaaacagtgataattggaggtggctgtgttggtgtgagtctggcttatcacctggccaaagcagggatgaaagatgtggtcctgctggagaaatcagagctcacggctggatctacctggcacgcagcaggtttaacaacttactttcatcctggaataaacttgaagaaaatacattatgatagcatcaaactttatgagaaactggaagaagaaactggtcaggtggtgggattccatcagccaggtagtatcagacttgctaccacccctgtaagggtagatgaatttaaatatcaaatgactcggactggctggcatgcaacagaacagtatctcattgaacctgaaaaaattcaagagatgttccctttactcaacatgaataaggttttagctggattgtataatcctggagatggtcacattgatccttattctctaactatggcactggctgctggggctaggaaatgtggtgcccttttaaaatatcctgcaccagtaacttctctgaaagccaggtcagatggaacatgggacgttgaaacaccacaggggtctatgagagcaaatagaattgtgaatgctgcaggattttgggctcgtgaagtaggtaaaatgattggactagaacatcctctcattccggttcaacatcaatatgttgttacatcgactatatctgaagtgaaagctttgaaacgagaactgcctgtgctccgtgacctggaaggatcatattatctccgacaggaaagggatgggcttttgtttggtccatatgaaagtcaagagaaaatgaaagttcaggactcctgggtcaccaatggagttcctccaggttttggaaaggaactctttgagtctgatctagatcgaatcatggaacacatcaaagctgccatggaaatggttcctgtcttgaaaaaggctgacatcatcaatgttgtcaatggtcctatcacgtattctcctgacattctgcctatggtggggccccatcagggggtcagaaactactgggtggctataggctttggatatggcataatccacgctggtggggtagggaaatatctcagtgactggatcctgcatggagaacctccttttgatctgatagaattggatcctaatcgctatggcaaatggacaacaacccagtacactgaggccaaagcaagagaatcatatggattcaacaatattgttggttatcctaaagaagaacggtttgctgggaggccgactcaacgagtcagtgggctctatcaaaggctggagtctaagtgttccatggggttccatgctggctgggagcagccgcactggttctacaaaccaggccaggacactcagtacaggccaagttttcgccgcacaaactggtttgagcctgtgggctcggagtataaacaggttatgcaaagagtagcggtaactgacctatcaccatttggcaagtttaacatcaaaggccaagattccattagactactggaccatctctttgcaaatgtcattccaaaggtgggttttacaaatataagtcacatgttaacacccaagggtcgagtgtatgctgagctgactgtttctcaccaatctcctggggagtttcttttaattactggctctggatcagaacttcatgatcttagatggattgaagaagaagcagtcaaaggtggatatgatgttgaaattaaaaacataactgatgagcttggagttcttggagttgctgggccacaggcaagaaaggtccttcagaaactgacctctgaagatcttagtgatgatgttttcaagtttcttcaaaccaagtccttaaaggtttccaacattcctgtcactgctattaggatatcttatactggtgagctgggttgggagctgtatcacagaagagaagattctgtggcgctgtatgacgctatcatgaatgcaggccaggaggagggaatcgacaattttggaacctatgccatgaatgccttacgcctggagaaagccttcagagcctgggggttagagatgaactgtgatacaaatcctttggaagctggactggaatattttgtgaagttaaataagccagcagacttcataggaaagcaagcactgaaacagattaaagccaaggggctgaaacgaagactggtctgcctcaccttggcaacggatgatgttgatccagagggaaatgaaagcatctggtacaatggcaaggtggttggcaacacgacatctggaagctatagctacagcatccagaagagtctggctttcgcatatgtccctgtacaactaagtgaagtgggacagcaagtggaagttgaactattaggcaaaaattacccagcagtcatcatacaagaacctttggtattgaccgaaccaaccagaaaccggcttcagaaaaaaggtggaaaggacaaaacttgaaaaaagaccttcagcagtcaactgaattagagttgctaatgactgtccttgaaattattataactggctcccaggggaatagaggaaaccaggaattcatttcaaaatcatcaaagtctaaatttagaatcttaatgaaacctttctgttaagtgttttctaagcaagacagaataatagataaatgatttacattgttcttttaaatgaagaaatttgaaatgaatgtttttttatttaccccacattacccaatcagtaaaacatttaggtgtttgctaatatacacaatcattactataacctaattaagggacattttataattttagtaacaaatgcattcggttcttgacagctgaaaacaaattaataaattatcttttacataaaaacatgtacaatattgtttatggatttacttctttgagaaatctttccttagatgaataaatgaaagttttaat

SEQ ID NO: 8406 - DNA, 1966 bp, Homo sapiens
  source 1..1966: mol_type = unassigned DNA
ggcctagtcatgctccgtcccggcgcgcagctgctgcggggcctcctgctgcggagctgcccgctgcagggctcccccgggcgcccgcgctctgtctgcggccgggaaggagaggaaaaaccacccttatctgcagaaacacaatggaaagacagagcagaaacagtgataattggaggtggctgtgttggtgtgagtctggcttatcacctggccaaagcagggatgaaagatgtggtcctgctggagaaatcagagctcacggctggatctacctggcacgcagattttgggctcgtgaagtaggtaaaatgattggactagaacatcctctcattccggttcaacatcaatatgttgttacatcgactatatctgaagtgaaagctttgaaacgagaactgcctgtgctccgtgacctggaaggatcatattatctccgacaggaaagggatgggcttttgtttggtccatatgaaagtcaagagaaaatgaaagttcaggactcctgggtcaccaatggagttcctccaggttttggaaaggaactctttgagtctgatctagatcgaatcatggaacacatcaaagctgccatggaaatggttcctgtcttgaaaaaggctgacatcatcaatgttgtcaatggtcctatcacgtattctcctgacattctgcctatggtggggccccatcagggggtcagaaactactgggtggctataggctttggatatggcataatccacgctggtggggtagggaaatatctcagtgactggatcctgcatggagaacctccttttgatctgatagaattggatcctaatcgctatggcaaatggacaacaacccagtacactgaggccaaagcaagagaatcatatggattcaacaatattgttggttatcctaaagaagaacggtttgctgggaggccgactcaacgagtcagtgggctctatcaaaggctggagtctaagtgttccatggggttccatgctggctgggagcagccgcactggttctacaaaccaggccaggacactcagtacaggccaagttttcgccgcacaaactggtttgagcctgtgggctcggagtataaacaggttatgcaaagagtagcggtaactgacctatcaccatttggcaagtttaacatcaaaggccaagattccattagactactggaccatctctttgcaaatgtcattccaaaggtgggttttacaaatataagtcacatgttaacacccaagggtcgagtgtatgctgagctgactgtttctcaccaatctcctggggagtttcttttaattactggctctggatcagaacttcatgatcttagatggattgaagaagaagcagtcaaaggtggatatgatgttgaaattaaaaacataactgatgagcttggagttcttggagttgctgggccacaggcaagaaaggtccttcagaaactgacctctgaagatcttagtgatgatgttttcaagtttcttcaaaccaagtccttaaaggtttccaacattcctgtcactgctattaggatatcttatactggtgagctgggttgggagctgtatcacagaagagaagattctgtggcgctgtatgacgctatcatgaatgcaggccaggaggagggaatcgacaattttggaacctatgccatgaatgccttacgcctggagaaagccttcagagcctgggggttagagatgaactgtgatacaaatcctttggaagctggactggaatattttgtgaagttaaataaggatcagaatagctgctttgcccattttaaggaggaaaatggctgggtgagcagatgggccatcaggccttattagggtgaatcgtgttcttgtcaaaacctgtcagcaagtagggaaaagaacaatggagtactgaagaactctttcatcacaaagggagacggcgcagtggccct

SEQ ID NO: 8407 - DNA, 2777 bp, Homo sapiens
  source 1..2777: mol_type = unassigned DNA
tatctcattgaacctgaaaaaattcaagagatgttccctttactcaacatgaataaggttttagctggattgtataatcctggagatggtcacattgatccttattctctaactatggcactggctgctggggctaggaaatgtggtgcccttttaaaatatcctgcaccagtaacttctctgaaagccaggtcagatggaacatgggacgttgaaacaccacaggggtctatgagagcaaatagaattgtgaatgctgcaggattttgggctcgtgaagtaggtaaaatgattggactagaacatcctctcattccggttcaacatcaatatgttgttacatcgactatatctgaagtgaaagctttgaaacgagaactgcctgtgctccgtgacctggaaggatcatattatctccgacaggaaagggatgggcttttgtttggtccatatgaaagtcaagagaaaatgaaagttcaggactcctgggtcaccaatggagttcctccaggttttggaaaggaactctttgagtctgatctagatcgaatcatggaacacatcaaagctgccatggaaatggttcctgtcttgaaaaaggctgacatcatcaatgttgtcaatggtcctatcacgtattctcctgacattctgcctatggtggggccccatcagggggtcagaaactactgggtggctataggctttggatatggcataatccacgctggtggggtagggaaatatctcagtgactggatcctgcatggagaacctccttttgatctgatagaattggatcctaatcgctatggcaaatggacaacaacccagtacactgaggccaaagcaagagaatcatatggattcaacaatattgttggttatcctaaagaagaacggtttgctgggaggccgactcaacgagtcagtgggctctatcaaaggctggagtctaagtgttccatggggttccatgctggctgggagcagccgcactggttctacaaaccaggccaggacactcagtacaggccaagttttcgccgcacaaactggtttgagcctgtgggctcggagtataaacaggttatgcaaagagtagcggtaactgacctatcaccatttggcaagtttaacatcaaaggccaagattccattagactactggaccatctctttgcaaatgtcattccaaaggtgggttttacaaatataagtcacatgttaacacccaagggtcgagtgtatgctgagctgactgtttctcaccaatctcctggggagtttcttttaattactggctctggatcagaacttcatgatcttagatggattgaagaagaagcagtcaaaggtggatatgatgttgaaattaaaaacataactgatgagcttggagttcttggagttgctgggccacaggcaagaaaggtccttcagaaactgacctctgaagatcttagtgatgatgttttcaagtttcttcaaaccaagtccttaaaggtttccaacattcctgtcactgctattaggatatcttatactggtgagctgggttgggagctgtatcacagaagagaagattctgtggcgctgtatgacgctatcatgaatgcaggccaggaggagggaatcgacaattttggaacctatgccatgaatgccttacgcctggagaaagccttcagagcctgggggttagagatgaactgtgatacaaatcctttggaagctggactggaatattttgtgaagttaaataaggatcagaatagctgctttgcccattttaaggaggaaaatggctgggtgagcagatgggccatcaggccttattagggtgaatcgtgttcttgtcaaaacctgtcagcaagtagggaaaagaacaatggagtactgaagaactctttcatcacaaagggagacggcgcagtggcccttgcttccttccgtcttggagttgttccagcctccttcccctgctgttggcttatgtgaagttgatacacatgtatcattcattcatccgttcatctagtagacatttattaagtaccgctgattagacaccttgctaacccatagatctaaatgttaaagatatactcctgatggctctcagatctcatgaacctggaaacaaataatatttcaggaactaaagctgtagggatacgttcttagccgtaattgtgaagataacccttccgcaagtggagggctctccagccgcatacaacactgccatcttgtgggaagtgctccgtagagccacttcaggaagccttgaccaaagctgcggtaaaaataattgaatctgtacttttaaaatcttcttaactaaaaacgcttcacctgaaacgactcatatcattgttctcaatggtatttttggtatgttccaaaggaagtaacttttgggaggaaaatcagtagcctttgtttagttggagatggaagaaatgcattaatcaagagcaaaaggaaaatcagctgcctttggatggagtcataggcattcctggaattttcatggtggaaatattgaatttttgtccatttctggagaacctccacgaagattcacagagactcaagtattaaacgtaatgtgttgaagcacatcagaagaatttgttttctataatatgtttctccctctttttctcactctctccttctccctctctttccctttttctctctccttcccctctctccccgtgtagagcttctaactagtagaaacagaataaaatgtaatctctattaaa

SEQ ID NO: 8408 - DNA, 2331 bp, Homo sapiens
  source 1..2331: mol_type = unassigned DNA
ctagtcatgctccgtcccggcgcgcagctgctgcggggcctcctgctgcggagctgcccgctgcagggctcccccgggcgcccgcgctctgtctgcggccgggaaggagaggaaaaaccacccttatctgcagaaacacaatggaaagacagagcagaaacagtgataattggaggtggctgtgttggtgtgagtctggcttatcacctggccaaagcagggatgaaagatgtggtcctgctggagaaatcagagctcacggctggatctacctggcacgcagcaggtttaacaacttactttcatcctggaataaacttgaagaaaatacattatgatagcatcaaactttatgagaaactggaagaagaaactggtcaggtggtgggattccatcagccaggtagtatcagacttgctaccacccctgtaagggtagatgaatttaaatatcaaatgactcggactggctggcatgcaacagaacagtatctcattgaacctgaaaaaattcaagagatgttccctttactcaacatgaataaggttttagctggattgtataatcctggagatggtcacattgatccttattctctaactatggcactggctgctggggctaggaaatgtggtgcccttttaaaatatcctgcaccagtaacttctctgaaagccaggtcagatggaacatgggacgttgaaacaccacaggggtctatgagagcaaatagaattgtgaatgctgcaggattttgggctcgtgaagtaggtaaaatgattggactagaacatcctctcattccggttcaacatcaatatgttgttacatcgactatatctgaagtgaaagctttgaaacgagaactgcctgtgctccgtgacctggaaggatcatattatctccgacaggaaagggatgggcttttgtttggtccatatgaaagtcaagagaaaatgaaagttcaggactcctgggtcaccaatggagttcctccaggttttggaaaggaactctttgagtctgatctagatcgaatcatggaacacatcaaagctgccatggaaatggttcctgtcttgaaaaaggctgacatcatcaatgttgtcaatggtcctatcacgtattctcctgacattctgcctatggtggggccccatcagggggtcagaaactactgggtggctataggctttggatatggcataatccacgctggtggggtagggaaatatctcagtgactggatcctgcatggagaacctccttttgatctgatagaattggatcctaatcgctatggcaaatggacaacaacccagtacactgaggccaaagcaagagaatcatatggattcaacaatattgttggttatcctaaagaagaacggtttgctgggaggccgactcaacgagtcagtgggctctatcaaaggctggagtctaagtgttccatggggttccatgctggctgggagcagccgcactggttctacaaaccaggccaggacactcagtacaggccaagttttcgccgcacaaactggtttgagcctgtgggctcggagtataaacaggttatgcaaagagtagcggtaactgacctatcaccatttggcaagtttaacatcaaaggccaagattccattagactactggaccatctctttgcaaatgtcattccaaaggtgggttttacaaatataagtcacatgttaacacccaagggtcgagtgtatgctgagctgactgtttctcaccaatctcctggggagtttcttttaattactggctctggatcagaacttcatgatcttagatggattgaagaagaagcagtcaaaggtggatatgatgttgaaattaaaaacataactgatgagcttggagttcttggagttgctgggccacaggcaagaaaggtccttcagaaactgacctctgaagatcttagtgatgatgttttcaagtttcttcaaaccaagtccttaaaggtttccaacattcctgtcactgctattaggatatcttatactggtgagctgggttgggagctgtatcacagaagagaagattctgtggcgctgtatgacgctatcatgaatgcaggccaggaggagggaatcgacaattttggaacctatgccatgaatgccttacgcctggagaaagccttcagagcctgggggttagagatgaactgtgatacaaatcctttggaagctggactggaatattttgtgaagttaaataaggatcagaatagctgctttgcccattttaaggaggaaaatggctgggtgagcagatgggccatcaggccttattag

SEQ ID NO: 8409 - DNA, 1517 bp, Homo sapiens
  source 1..1517: mol_type = unassigned DNA
ggcctagtcatgctccgtcccggcgcgcagctgctgcggggcctcctgctgcggagctgcccgctgcagggctcccccgggcgcccgcgctctgtctgcggccgggaaggagaggaaaaaccacccttatctgcagaaacacaatggaaagacagagcagaaacagtgataattggaggtggctgtgttggtgtgagtctggcttatcacctggccaaagcagggatgaaagatgtggtcctgctggagaaatcagagctcacggctggatctacctggcacgcaatatggcataatccacgctggtggggtagggaaatatctcagtgactggatcctgcatggagaacctccttttgatctgatagaattggatcctaatcgctatggcaaatggacaacaacccagtacactgaggccaaagcaagagaatcatatggattcaacaatattgttggttatcctaaagaagaacggtttgctgggaggccgactcaacgagtcagtgggctctatcaaaggctggagtctaagtgttccatggggttccatgctggctgggagcagccgcactggttctacaaaccaggccaggacactcagtacaggccaagttttcgccgcacaaactggtttgagcctgtgggctcggagtataaacaggttatgcaaagagtagcggtaactgacctatcaccatttggcaagtttaacatcaaaggccaagattccattagactactggaccatctctttgcaaatgtcattccaaaggtgggttttacaaatataagtcacatgttaacacccaagggtcgagtgtatgctgagctgactgtttctcaccaatctcctggggagtttcttttaattactggctctggatcagaacttcatgatcttagatggattgaagaagaagcagtcaaaggtggatatgatgttgaaattaaaaacataactgatgagcttggagttcttggagttgctgggccacaggcaagaaaggtccttcagaaactgacctctgaagatcttagtgatgatgttttcaagtttcttcaaaccaagtccttaaaggtttccaacattcctgtcactgctattaggatatcttatactggtgagctgggttgggagctgtatcacagaagagaagattctgtggcgctgtatgacgctatcatgaatgcaggccaggaggagggaatcgacaattttggaacctatgccatgaatgccttacgcctggagaaagccttcagagcctgggggttagagatgaactgtgatacaaatcctttggaagctggactggaatattttgtgaagttaaataaggatcagaatagctgctttgcccattttaaggaggaaaatggctgggtgagcagatgggccatcaggccttattagggtgaatcgtgttcttgtcaaaacctgtcagcaagtagggaaaagaacaatggagtactgaagaactctttcatcacaaagggagacggcgcagtggccc

SEQ ID NO: 8410 - DNA, 8593 bp, Homo sapiens
  source 1..8593: mol_type = unassigned DNA
tcttgtcttccggagtgtggctggcggagctgggatggcggaacgaggcctggagccgtcgccggccgcggtggcggcgctgccgcctgaagtgcgggcgcagctggcggagctggagctggagctctcggagggggacatcacccagaagggctatgaaaagaaaaggtccaaactcctatctccttacagcccgcagacacaagaaactgattcagcagtacagaaagaacttagaaaccagacacctgctccatctgcagctcaaacttctgctccctctaagtaccaccgaactcgatctgggggagccagggatgaacgatatcgatcagatatccacacagaagcagttcaggctgcactggcaaagcataaagaacagaagatggctttgcccatgccaaccaaaaggcgatccacatttgttcagtctcctgcagatgcctgcacacctcctgacacatcttcggcctctgaggatgagggctctctgagacgccaagctgcgctctctgctgccttgcaacagagcttacagaatgctgagtcctggatcaaccgttcaattcagggatcgtccacttcttcatccgcatcttctacgctgtcccacggagaggtcaaaggaaccagtgggtctctagctgatgtatttgccaatactcgaatagagaatttctctgctcctcctgatgtcactacaactacctcttcctcctcatcatcttcctcaattcgcccagcaaacattgacctgcccccctcggggatagttaaaggcatgcacaaaggatccaacaggtccagccttatggatacagctgatggtgttcctgtcagtagcagagtatctacaaaaatccagcagcttctgaacactctgaaacgacccaaaaggcctcccttaaaggaattttttgtggatgactctgaagaaattgtggaagtacctcagccagaccccaaccagcccaagccggagggacggcagatgacccctgtgaaaggagagcctttaggagtcatctgtaactggcctcctgctcttgaatctgccctgcagcgctggggtaccactcaagcaaaatgctcctgtctgactgcactggacatgacagggaaaccagtttacactcttacatatggaaagttgtggagcagaagtttaaagttggcctacacacttcttaataaactggggaccaaaaatgaacctgtgttaaaacctggagacagggtagccctggtttaccccaacaatgatccagtcatgtttatggtggctttctatggatgcctcctggcagaagtgattccagtgcctatagaggtacctcttaccagaaaggatgctggaggtcagcagattggcttcttgctaggaagctgtggtattgccttagctcttaccagtgaagtttgtctaaaaggactgccaaaaacccagaatggagaaattgtacagtttaaaggttggccccggctcaaatgggttgtaacagattccaagtacctttcaaagccaccgaaagactggcagccacacatctcacctgctgggacagaaccggcatacattgagtataaaacaagcaaagaagggagtgtaatgggagttacagtatcccggcttgcaatgttgtctcactgccaagctctgtcgcaggcctgcaattattctgaaggggaaacaatagtaaatgtcttagactttaagaaggatgctgggctgtggcacggcatgtttgcgaatgtaatgaataagatgcacacaatcagcgtaccctactctgttatgaaaacctgtcctctctcttgggtccaaagagtacatgctcacaaagccaaggtagctttagtaaaatgtcgggacttgcactgggctatgatggcacatcgggaccaaagagacgtgagcttgagttccctccgaatgttaattgtgactgatggagctaacccctggtccgtgtcatcctgtgatgccttcctgagtctgttccaaagtcatggactgaagcctgaggccatctgtccgtgcgccacgtctgctgaagccatgactgtagcaatccgcaggcctggagttccaggagcccctttgccaggaagagccattctctcaatgaatggattgagctatggggtaatacgggtcaatactgaagataaaaattcagcactgacggtccaggatgtagggcatgtaatgcctggtgggatgatgtgcattgtgaaaccagatggacctccccagctctgcaaaacagatgaaattggagaaatctgtgttagctccagaactggaggcatgatgtactttgggcttgctggtgtgacaaaaaatacatttgaggtaattccagtgaattctgcaggctctcctgttggggatgtgccattcatccgatcaggattgctggggtttgtagggccgggtagtttggtgttcgtggttgggaaaatggatggcttactgatggttagtggtcgaagacataatgctgatgacattgttgctactggattggctgtagaatcaataaagactgtttatagaggaagaattgctgtgttttctgtgtctgtattttatgatgagcgcattgtggtggttgcggaacaaagacctgatgcttctgaggaagatagtttccagtggatgagccgcgtgctgcaggcgatcgatagcattcatcaagtgggggtttattgtcttgctctggtgccagccaatacattgccaaaaactccactaggaggaatccatatatctcagacgaaacaactctttctggagggatcactgcatccttgcaacatcctcatgtgcccccatacatgtgtgacaaacttgccaaagccccggcaaaaacaaccaggtgtaggccctgcttccgtgatggttgggaatctggttgctggaaaacgtatagcacaagctgctggaagggatctgggacaaatagaagagaatgatttggtgaggaagcaccagtttctggcagagatcctacagtggcgagcccaggcgactcctgaccatgtactcttcatgctgttaaatgccaagggaaccactgtatgcacagccagctgccttcagcttcataagcgagcagagaggattgcatctgttcttggtgataagggacatctaaatgcaggagataatgtggtgttgctctatccacctggcattgagttaatcgccgccttctatggctgcctgtatgcgggctgtatacctgtgaccgtcagacctccacatgctcagaacctcacggccacgctgcccactgtccgaatgattgttgatgtcagcaaagcagcctgtattctcaccagtcagaccctaatgaggctactgaggtcccgagaggcagcagcagctgtggatgtgaaaacctggccaaccatcattgacacagatgatttacccaggaaaaggttacctcagctgtataaaccgcccactcctgagatgttggcatatcttgattttagtgtctccacaactggcatgcttacaggagtgaagatgtcccactctgcagtgaacgctctgtgtcgagccatcaagctccagtgtgagttgtactcttctcggcagatcgccatctgccttgacccttactgtggacttggcttcgcgctctggtgtctctgcagtgtctattcaggccaccagtctgtcttaattcctcctatggagttagagaacaaccttttcctctggctctccacagtcaaccagtacaaaataagggacactttctgctcctattcagtgatggagctctgcaccaaaggtcttgggaaccaagtggaagtgctaaagaccagagggatcaacctctcctgcgtccggacctgtgtggtggtggcggaggagaggccccgcgttgcactccagcagtccttctctaagctcttcaaagacatcgggctgtccccgcgggctgtcagcaccacttttggatcaagagtcaatgtagcaatatgtttacagggaacctcagggcctgatccgactactgtgtatgtggatctgaaatcactaagacatgacagggttcgtctcgtggaacgtggcgcccctcagagtttgcttctctcagagtctggaaagattttacctggagtgaaagtggttattgttaatcctgagaccaaagggccggttggagactctcaccttggagagatttgggtgaacagtccccatacagccagcggctactacaccatctatgatagcgagactcttcaagctgatcatttcaacactcgcctcagctttggagatgcagctcagacactctgggctcggacaggataccttggttttgtccgccggaccgagctcacagcggccactggagagcgtcatgatgcattgtatgtggtgggagcgctggatgaaacactggagctgagaggattacgataccacccaattgatattgagacctcggtgtcccggatccacagaagcattgctgaatgtgccgtgttcacatggaccaacttgcttgtggtggttgtggaactgtgcggctctgaacaggaagccctagatctggtcccattagtgaccaacgtggtcctggaagagcattacctcatcgttggcgtcgtggttgtggtggacccaggtgtcatcccgatcaactccagaggagagaagcagaggatgcacctccgtgatagcttcctagctgaccagttagaccccatctacgtggcttataacatgtaaccagccttgtggggactgcagtgggccattctgaagaatcacaaagacagaagacctctggctaagagcaggcttcaaacgatgtgaaataagctgagatggctacatgatattcttcatctcatcctgtgggattctgcaatcataaaacacaggaaaggggaattctgtgatggcaaatgaaaaaaatgttaacatttggtagacatgtgctttgacatagcgtgagcagcacattactaaagcaattacatgcatgttgcatttttttcatctgttgtacatagttgtatttttatctaatgccattttagaattttctaagggaatttaatgaattcacatgaaaggggtagtctgagtgacacagttccccactccgtactgtattttgccattctgccgtagctagatgttctgtggggtttgttaacatggaactactcagctttctttcagtcaacccataagcaaatcagataacccactgactatgagaattactttatatagataattcttgactgtaaaacattttgaccagtgttttacaacatgtacataagaatacacataattcaactagagatttgaagaattggcttgtatagttataacaaccacagtagaaacatttctactttgagagaatttcaatattctcttaatgttgtgtaattgattaggtaactaaaaagcgcaaattgttggcaggttttgctgcacattgttctatgtctttgttggctggtgtattttataaactaaagctgcctatgtttctttttaaagctcgcattcccagaatcagcttaggcttctatgaattcagcctgtttctaaaagctgaaaatctcagtttaaaaatcaaaatgttaacacaaagctaagattcatcagagcccaccctattctaaggaaccacaataacttactctggccccagtgttaaaacgatctttcagatttagagtgactatgtaagaatttaggatttcctcttttccaggcacattgtaaactgtgtctacagtttatccatataacttctcttctgaaaactgaggagtgtcctctgttcttccagttcacgagggcagggggtttaaaacaagaatgataggccaggaaggcagtggggatccaccatcacatggaactgtaaggccatataactacacaaaactgaccaatctgggttgccaaagcagccaggcttatgctgaaaccggggaagtctgacatatgcaggaaactcttttgaaataactttggtgcccaggccaagtagaatgagatgagactgagtttggcctctggctcggtttcctttctttggtctgatacttcatgtatttgaatatagttaaatcgtattatttttttcttaacagaaatatttttaaaaatgaaaaagtactcaaaagtgagaagagttaacttgtcaaagcagaatggttctctttgacccactctggtctattgtgtaaatatttatttagactattttaataatacatattatttaccccactgtaacatcatgtaaactaagtatgtttttaaacaatttttaagacttgtaattaccctgaaaataaggtttataatgcaaagaccagctcctttgcggtggcagtgctctagggctgccattacacggtcttgtgatgtgactaaaagccactttgtgactcccttcatgtaatcctcttttcctccccactcctccacagagggcagagctcaggacatttgccagttccagatctctttttcagcattttcatggaattaatttacacgtaatgagggaagtcctaggatggatagaaaaaaagcacttacattggggcacacaggaaatcccagtgtctagcaatggtttggtttgcagagaacacagcctgatacttaattttcttaaaactatttttaatgatccactaaacaaagcaggggatcctgaagctgatataaataagtctagctctataatccccaagttctaaaagttatggttagatgctattctgtgggttgctttgataattcttactaacacagattagggtataggcatctagagatgcactgtccactgtaaatactataatgagagccacatctgtaatttaaatgtttctagtaaccacatttttttaaaagtaaaaagaaacccatggtattgatttaaatatattttatttaacccaatagctcaaaaacactatcatttcaacataggatcaatataaaaattattaatgagttattttactttttttcatattaggcctttgaaattcagtgtgtattaaacacatctcaattcaaaccatcaccatatttcaagtctttgtagccaaatgtgactagtggctaccatattagacagtgcagatctatactcattccttcaaatacattactctgttaatctcaaagtgtggccaactcccatttacttagaggctgattatctagttttgtagttcctcaggcctctaatttattttttgctttctgctttattgatcttttgcatgtcccccaaagccagaatctgctcatggaggaaggaaggctaagaactgtccttgaggaacttcatcagtaactctggtaaagcatcctgtggagggagaggagagcccagtcatttgcttagatggtgtttgtgggatcacctgcagatttaaagcctactctgccacagactcgagtaagaaaatgttctcttgatgacacagtgctcctactctatccacattaagtagcacttttgtggtagaactgattcttaaggcaggcctgaaaggccattactaatagaaacacagcctttccaatcctctggaacatattctgtctgggtttttaatgtctgtggaaaaaaactaaacaagtctctgtctcagttaagagaaatctattggtctgaaggtttctgaacctctttctggttctcagcagaagtaactgaagtagatcaggaaggggctgcctcaggaaaattcctagatcctaggaattcagtgagaccctgggaaggaccagcatgctaatcagtgtcagtgaatccacagtctttacttcctgcctcataaagggccaggtctccccagtaccaagtcctttcctcatgaagttgtgttgcctcaggctgtttagggaccattgcctgtcttggtcacatgagtctgtctccttactttagtccctgggcaatccttgcttaatgcttttgttgactcaacaagggcccgaggccttaggttttctattaaggtctctgccccaggcatggtgctctatatcttggccaaataaattactttccttgaatatccaggaatcttttagtctaaagcaatgaggagttatcacctcatcctcaaactccaacaagatctatgccttagtgttgtttttgttgtctgctttgatgtaaaagcaagagtatttggagcaagaagctgcaatgcgccaaatacacaataggccttttctttatcattcatacgacatttctggtttaggtgtatgtagttgggccatgttacttgtccagaggaagagactaaagatataagaataattttttagtcctaaatgctgttttgtttactttctgtcaagatatttacccgtgtcaaattcaaactacagtactgtgtaattatgtataaagtttttttatttatttgaagttagactagatatacgtttttaaatttaacatctggctggacagtgttctattaactcattgaatgtgtttcctttgtcttgtgttaataaatattgatgcctgattctgtttaa

SEQ ID NO: 8411 - DNA, 1335 bp, Homo sapiens
  source 1..1335: mol_type = unassigned DNA
acgtgacctttgctcatggcggcggcggcggcggcggcggtgctggtggtgctcggcggccggagccggatcctgtagccgggtgtgggcccgtgtctgtccgtccctccttcggccccctctcttgtcttccggagtgtggctggcggagctgggatggcggaacgaggcctggagccgtcgccggccgcggtggcggcgctgccgcctgaagtgcgggcgcagctggcggagctggagctggagctctcggagggggacatcacccagaagggctatgaaaagaaaaggtccaaactcctatctccttacagcccgcagacacaagaaactgattcagcagtacagaaagaacttagaaaccagacacctgctccatctgcagctcaaacttctgctccctctaagtaccaccgaactcgatctgggggagccagggatgaacgatatcgatcagaattctctcttgtcagaatttactctgaagatatccacacagaagcagttcaggctgcactggcaaagcataaagaacagaagatggctttgcccatgccaaccaaaaggcgatccacatttgttcagtctcctgcagatgcctgcacacctcctgacacatcttcggcctctgaggatgagggctctctgagacgccaagctgcgctctctgctgccttgcaacagagcttacagaatgctgagtcctggatcaaccgttcaattcagggatcgtccacttcttcatccgcatcttctacgctgtcccacggagaggtcaaaggaaccagtgggtctctagctgatgtatttgccaatactcgaatagagaatttctctgctcctcctgatgtcactacaactacctcttcctcctcatcatcttcctcaattcgcccagcaaacattgacctgcccccctcggggatagttaaaggcatgcacaaaggatccaacaggtccagccttatggatacagctgatggtgttcctgtcagtagcagagtatctacaaaaatccagcagcttctgaacactctgaaacgacccaaaaggcctcccttaaaggaattttttgtggatgactctgaagaaattgtggaagtacctcagccagaccccaaccagcccaagccggagggacggcagatgacccctgtgaaaggagagcctttaggagtcatctgtaactggcctcctgctcttgaatctgccctgcagcgctggggtaccactcaagcaaaatgctcctgtctgactgcactggacatgacagggaaaccagtttacactcttacatatggtgagtctgcaagattccagatccttctctcctga

SEQ ID NO: 8412 - DNA, 7894 bp, Homo sapiens
  source 1..7894: mol_type = unassigned DNA
cggtgcggttccgccgggcgcgaggagccgccgagacctccgcctgcgaacaaagaggaggccgtgcggggcgcggcgcccgcggagcatggcggaccgcagcctggagggcatggcgctgcccctggaggtgcgggcgcgcctggccgagctggagctggagctgtcggaaggtgacatcacacaaaaaggatatgaaaagaagaggtcaaagttaattggagcctaccttccgcagcctccgagggtggaccaagctttgccgcaagaacgccgggctcctgtcactccttcctccgcctctcgctaccaccgccgacggtcttcagggtcacgagatgagcgctatcggtcagacgtccacacggaagctgtccaggcggctctggccaaacacaaagagcggaagatggcagtgcctatgccttccaaacgcaggtccctggtcgtgcagacctcgatggacgcctacacccctccagatacctcttctggctcagaagatgaaggctcagtgcagggggactcccagggcacccccacctccagccagggcagcatcaatatggagcactggatcagccaggccatccacggctccaccacgtccaccacctcctcgtcctctacgcagagcgggggcagcggggctgcccacaggctggcggacgtcatggctcagacccacatagaaaatcattctgcacctcctgacgtaaccacgtacacctcagagcactcgatacaggtggagagaccgcagggttccacggggtcccggacagcgcccaagtacggcaacgccgagctcatggagaccggggatggagtaccagtaagtagccgggtgtcagcaaaaatccagcagcttgtcaataccctcaaacgaccgaaacgaccacctttacgagaattctttgtcgatgactttgaagaattattagaagttcaacaaccggatccgaaccaaccaaagccggagggggcccagatgctggccatgcgcggagagcagctgggcgtggtcacgaactggccgccgtcgctggaggccgcactgcagaggtggggcaccatctcgcccaaggcgccctgcctgaccaccatggacaccaacgggaagcccctctacatcctcacttacggcaagctgtggacaagaagtatgaaggtcgcttacagcattctacacaaattaggcacaaagcaggaacccatggtccggcctggagatagggtggcactggtgttccccaacaatgatccggctgccttcatggcggctttctacggctgcctgctggccgaggtggtccccgtgcccatcgaggtgccgctcaccaggaaggacgcagggagccagcagataggtttcttgcttggaagctgtggagttactgtagccttgactagtgacgcctgccataaaggacttccaaaaagcccaacgggagagatcccacagtttaaaggttggccaaagctgctgtggtttgtcacagagtctaaacatctctccaaaccgccccgagactggttcccacacattaaagatgccaataacgacactgcgtatattgagtacaagacgtgtaaggatggcagtgtgctgggtgtgacggtgacgaggactgcgctgctgacacactgccaggccctgacgcaggcgtgtggctacacggaagctgaaaccattgtgaatgtgctggatttcaagaaggacgtcgggctctggcatggcatcctgacaagcgtcatgaacatgatgcatgtgatcagcatcccgtactcgctgatgaaggtgaaccctctctcctggatccagaaggtctgccagtacaaagcaaaagtggcgtgtgtgaaatcgagggatatgcattgggcattagtagcacacagagatcagagagacatcaacctctcctctctgcgaatgctgatagtggcggacggcgcgaacccctggtctatttcttcttgcgatgcatttctcaatgtcttccaaagtaaaggccttcgacaggaggtcatctgtccttgtgccagctcgccagaggccctcactgtggccatccggaggcccacggatgacagtaaccagcccccgggccggggtgtcctctccatgcatggactgacctatggggtcattcgtgtggactcggaagagaagctgtccgtgctcaccgtgcaggatgtcggcctcgtgatgcctggagccatcatgtgttcagtgaagccagacggggttcctcagctgtgcagaacggatgagatcggggagctgtgtgtgtgtgcagttgcgacgggcacgtcctactatggcctctctggcatgaccaagaacacctttgaggtgtttcccatgacaagctccggggctccgatcagtgaatacccattcataaggacaggcttgctggggttcgtgggtcccggaggcctcgtcttcgtggtgggcaagatggatggcctcatggtggtcagcgggcgcaggcacaacgccgacgacatcgtggccactgcgctggccgtagaacccatgaagtttgtctaccggggaaggatagccgtgttctcggtgaccgtgctgcacgacgagaggatcgtgatcgtggctgagcagaggcctgactccacggaagaggacagtttccagtggatgagccgtgtgctgcaggcgattgacagtatacatcaagttggagtttattgcctggccttggtgccagcaaacaccctccccaaaaccccgcttggtgggatccatttatcagaaacaaaacagctttttctggagggctctctgcacccctgcaatgtcctaatgtgcccccacacctgcgtcacaaacttgcctaagcctcgacagaagcagccagaaatcggccctgcctctgtgatggtggggaacctggtctctgggaagagaatcgcccaggccagtggcagagacctgggtcagatcgaagataacgaccaggcacgcaagttcctgttcctctcagaggtcttgcagtggagagcacagaccaccccggaccacatcctctacacgctgctcaactgtcggggtgcgatagcgaactcgctgacctgcgtgcagctgcacaagagagctgagaagatcgccgtgatgctgatggagaggggccaccttcaggacggcgaccacgtggccttggtctaccccccaggaatagacctgatagcagcgttttatggttgcctgtacgcaggctgtgtgccaataaccgtccgtcccccgcacccacagaacatcgcgacgacgttgcctaccgtcaagatgattgtggaggtgagtcgctctgcctgtctgatgacgacacagctgatctgtaagttgctgcggtccagggaggcggcggcggctgtggacgtcaggacgtggcccctcatcctggacacagatgatttgccaaagaagcggcctgcccagatctgcaaaccttgcaacccagacactcttgcatatctcgacttcagcgtgtccacaactgggatgctagctggcgtaaagatgtctcacgcagccaccagtgccttctgccgttccattaagctgcagtgtgaactttacccctctagagaagtggccatctgcctggacccttactgtggactgggatttgtcctctggtgcctctgcagtgtgtattctgggcaccagtccatcctgatcccgccctctgagctggaaaccaaccccgccttgtggcttcttgccgtgagtcagtacaaagtccgagacacgttttgctcctactccgtgatggagctgtgcaccaaggggctgggctcgcaaacagagtccctcaaggcgcgagggctggacttgtcccgagtgaggacctgcgtggttgtggcggaagagaggcctcggatcgcactcacacagtcgttctcaaagctgtttaaggacctgggccttcacccgcgggccgtcagcacctcgttcggttgcagggtgaacctggcgatttgcttgcagggaacctcaggacctgacccaaccactgtctacgtggacatgagagccctgagacacgacagagtccgcttagtggaaagaggatcccctcatagtctgcccctgatggaatcgggaaagatacttccaggggttcggattataattgccaacccagaaacaaaaggaccgctgggggactcacaccttggagagatttgggttcacagtgcccacaatgccagcggttatttcactatttacggagacgaatccctccagtcagatcacttcaactcaagactaagttttggagacacccagaccatctgggcacgcacaggctacttggggttcctgcggagaactgagctcacagatgcaaatggagagcgccatgatgccctctacgtggtaggggcactggacgaagccatggagctgcggggcatgcggtaccacccaatcgacattgagacctcggtcatcagagcccataaaagcgttacggaatgtgctgtgtttacctggacaaatttgttggtggttgtggttgagctggatgggtcggaacaagaagccttggacctggttcccttggtgaccaacgtggtcctggaggagcactacctgatcgtcggagtggtggtcgtggtggacatcggcgtcatccccatcaactcccgtggggagaagcagcgcatgcacctgcgagacgggtttttggcagaccagctagaccccatctatgtggcctacaacatgtagtctcgtctcttggcttccatggacttttctagagatgtagacattgttctccgtgtccactgaagcgtgcagacacagggcaacactcaccagaatacagccatttgtggtgagagtggaggaggaagaggaggaggaagaggacttctcacagcagccacgattggcatgggggtgaaatgtgaatttaccactgaatttcgctcagaaggactttggattactgccttcagtttgttggaaaagcccatttcaaaactttcttttcttttctttcttttttaattattggataataagtgctttcttcgtaaatgtggtattttgttaagccgaaatagcaattaaaaaaatatcctgccctccagatgggttcttttaaacaatttatgtagtgtgacaaagaattgttttctctgttttaatgtgtcatgaaatcttaatgacatggatctgttactaatttaagccattgctagatctcatccttttaggaaagtttgaggtacgagaaaaccttccaaatagcaccttccaattagataatagcagctttctttgtcagaaatgtgctgaagaaacaaaggctggtatacggccttcgaagttagtatagaatgagaagaaattataaataaggtgtatttcggcaattatcttgcaaatatctttgtactaaactaaaaagataaaataagttaacttcctcaatatgtaattatgtacaaaacgtttaatttattttgatctctttagaactataaaagagaaaaacattcaagaatattaaagtcttgtaatgtttgctaatataaaaaagtgttgtattatcttgcgtggatagtatcacaacaaatatatatatatgaaatataaattcactaatgaacaaaggagattttaaagtttaagatgcagaacttgtcacttgcatggtgtgccccccgtactcacatacactctgctgttgccagcagtcgcagaccgcaggagccctgtctaaaagtttcttctagaaccagagaccagcaagtgaaattattgccatctcaaggatggcaaaagaattcaaagctcaatgtgcactatttttttctttgctgtgggacaacagtgaatgtgtttatgccagcgtgtgctgatgatactgaggggctttaggttggcaaatagcactgttttcttagctgcaagaattcattgcacaatgtttttcatcatttttgttaatgtcatctttttttggtccttgctacgaaaaggaatgcgattctgtggtcattcgcactgggttgcattgattccccctctgatggccaatgtggagtggacaaagtgtccggaactcacatcggtgatcgtcccctcgtcttaagacccagcccgctctgtgtgagcctctggggctccctcgctcagtgagcacagttccccgggggttcatgccagagctccggctgaagcaagaagtcctccagctgcgtcgtttgccgcctgtggacgagtgcgccccagtttctgccctggcagctcctggccacaccttctcagagctcacctgtgcacttctaaattgaattggcccacggtgtccaaccaagaaggagcatctgcactccgagaaagatgtgttctgtaactgccccagtgtgaccccgcagtggctctcggtgctagatatgcatgactaagattgatgctgggcaaaatgtagatgatctttcattatgttgtgggcagcgtctttctctgcctttgctatatgcagtcagcagtaagccttttgctaaaagagttttgtttgacttctgagatccaaggctgattgttgttaaaaaaaaaaaaaaaaaaaaagtggcacatttaaaaaaatgtgtctgcatatgtggtgcatccttccatctccacaaaccatttgattcttgaaatattgtttgacctcattgctgtgtgtgaatatttctccacatgcttcagatgcacattcctagtctctgcttcctaaggggggaaccaccacacattggggggaaaaaagacattttcctacacccacccaccttgttgaaagggaggtaggtttggggcttcaggccaggcactgactatgaaacattagctgcagtgtgcaggacagctttgaggtccagctgaagtcaggaagcaaaacaaatgtagatgtcacttcaaacataatttcaactgtcaccagatcaactctacattcaaggagtgtggacgctgcagtgcagttgtgagggcagttagcagccgcctcttctgcatcctgtcaactctgattagttagagtttaggctcaaaagagttggtggactgagattgaaatttggttgtgcaagagaaaggaaaggagacacttagtaccaccagtttcagcaataaagaagggtcattctgtattcaaaattgtactgtagataaatcattcatgagattgtaaaaaatgtttgtcttgtgaccttgtgcttttgaagtcagacaaaaccgtgtaatcaacttgcacaaaaagagggtacacagtgaacatataaacacagacctaatcaaacaggagcagattcctcatggtgcttgtttattatatatatttaatcctgcttgacactttacccaagggagatggtcccttttatcagttgaatgttagcagcgttatttcagagtgtggtgactggttagagaaactcatgtactcaaccagccacagtttcaaacaaaatttttatgtgcaaaggacagcaaccttcttgtatgttaaaccaccagtacgctttgtacatctgtgataacgcctgttttatattcaaatgaacaaataaaagcttttatttttgttgctctgaaaatagcagtttcttaattggtcccctggaaagatgtctgggacagctttaatcccgggaaggaagtgactcctacagggaaatgtatctgactctgtttacataatttgttgcattacttagtacagataatcatactttgaaaaatgtttaaattttgatgtgggcatttattgctaaaaataattcctatggcaacaaatgttttgtgaaatgttttttttaattcttttaaatatatctaaatatatttgttcacattttgctgcaa

SEQ ID NO: 8413 - DNA, 4205 bp, Homo sapiens
  source 1..4205: mol_type = unassigned DNA
cacatttgtggctgctcaaagctgctctccttctgcgtcattacaggcgatctctaggcacgtgcttggttcttggagaagtggcgtctggctgtggaggatgaccgtggcagaactgcttccggctgttgagcgctggctgagagctgcttggcgtgcacagatcggtttcagcacagtctcgggagcagccccgggcagtgcagaaagcgaggcccaggtgacatcacacaaaaaggatatgaaaagaagaggtcaaagttaattggagcctaccttccgcagcctccgagggtggaccaagctttgccgcaagaacgccgggctcctgtcactccttcctccgcctctcgctaccaccgccgacggtcttcagggtcacgagatgagcgctatcggtcagacgtccacacggaagctgtccaggcggctctggccaaacacaaagagcggaagatggcagtgcctatgccttccaaacgcaggtccctggtcgtgcagacctcgatggacgcctacacccctccagatacctcttctggctcagaagatgaaggctcagtgcagggggactcccagggcacccccacctccagccagggcagcatcaatatggagcactggatcagccaggccatccacggctccaccacgtccaccacctcctcgtcctctacgcagagcgggggcagcggggctgcccacaggctggcggacgtcatggctcagacccacatagaaaatcattctgcacctcctgacgtaaccacgtacacctcagagcactcgatacaggtggagagaccgcagggttccacggggtcccggacagcgcccaagtacggcaacgccgagctcatggagaccggggatggagtaccagtaagtagccgggtgtcagcaaaaatccagcagcttgtcaataccctcaaacgaccgaaacgaccacctttacgagaattctttgtcgatgactttgaagaattattagaagttcaacaaccggatccgaaccaaccaaagccggagggggcccagatgctggccatgcgcggagagcagctgggcgtggtcacgaactggccgccgtcgctggaggccgcactgcagaggtggggcaccatctcgcccaaggcgccctgcctgaccaccatggacaccaacgggaagcccctctacatcctcacttacggcaagctgtggacaagaagtatgaaggtcgcttacagcattctacacaaattaggcacaaagcaggaacccatggtccggcctggagatagggtggcactggtgttccccaacaatgatccggctgccttcatggcggctttctacggctgcctgctggccgaggtggtccccgtgcccatcgaggtgccgctcaccaggaaggacgcagggagccagcagataggtttcttgcttggaagctgtggagttactgtagccttgactagtgacgcctgccataaaggacttccaaaaagcccaacgggagagatcccacagtttaaaggttggccaaagctgctgtggtttgtcacagagtctaaacatctctccaaaccgccccgagactggttcccacacattaaagatgccaataacgacactgcgtatattgagtacaagacgtgtaaggatggcagtgtgctgggtgtgacggtgacgaggactgcgctgctgacacactgccaggccctgacgcaggcgtgtggctacacggaagctgaaaccattgtgaatgtgctggatttcaagaaggacgtcgggctctggcatggcatcctgacaagcgtcatgaacatgatgcatgtgatcagcatcccgtactcgctgatgaaggtgaaccctctctcctggatccagaaggtctgccagtacaaagcaaaagtggcgtgtgtgaaatcgagggatatgcattgggcattagtagcacacagagatcagagagacatcaacctctcctctctgcgaatgctgatagtggcggacggcgcgaacccctggtctatttcttcttgcgatgcatttctcaatgtcttccaaagtaaaggccttcgacaggaggtcatctgtccttgtgccagctcgccagaggccctcactgtggccatccggaggcccacggatgacagtaaccagcccccgggccggggtgtcctctccatgcatggactgacctatggggtcattcgtgtggactcggaagagaagctgtccgtgctcaccgtgcaggatgtcggcctcgtgatgcctggagccatcatgtgttcagtgaagccagacggggttcctcagctgtgcagaacggatgagatcggggagctgtgtgtgtgtgcagttgcgacgggcacgtcctactatggcctctctggcatgaccaagaacacctttgagcatacttccaacaagggcaaataacattttatgaatgaagagagattactttaaaactaacagacgttgtttaaaatgtaccttgactcttcactcgtcttttacattgtggttttgtaaaccaagtaatcagttactgctgattggcctcctgtgagacttctgggtgttatctgttcagggttcagaggcaggaggctccagcaggtgtttcccatgacaagctccggggctccgatcagtgaatacccattcataaggacaggcttgctggggttcgtgggtcccggaggcctcgtcttcgtggtgggcaagatggatggcctcatggtggtcagcgggcgcaggcacaacgccgacgacatcgtggccactgcgctggccgtagaacccatgaagtttgtctaccggggaaggatagccgtgttctcggtgaccgtgctgcacgacgagaggatcgtgatcgtggctgagcagaggcctgactccacggaagaggacagtttccagtggatgagccgtgtgctgcaggcgattgacagtatacatcaagttggagtttattgcctggccttggtgccagcaaacaccctccccaaaaccccgcttggtgggatccatttatcagaaacaaaacagctttttctggagggctctctgcacccctgcaatgtcctaatgtgcccccacacctgcgtcacaaacttgcctaagcctcgacagaagcagccagaaatcggccctgcctctgtgatggtggggaacctggtctctgggaagagaatcgcccaggccagtggcagagacctgggtcagatcgaagataacgaccaggcacgcaagttcctgttcctctcagaggtcttgcagtggagagcacagaccaccccggaccacatcctctacacgctgctcaactgtcgggtgaggcgcggagctggccttccctggctactggcctcaaggggcctagcctggttcctgggagcgctcctgcttctttctttgaatccttttgcttcagtcttatgggaattctttttatgttttgctattttgactgagacttttgtacctagggattgtttttaaacgtaaccatttgtgcagttatttacacctatttgtgtgtacagatattttagcaacctatttacaatatttctcccccaaaatgagtaatgatatctgcaagagagaaatcgtaagtctatgagatatttgcatttttattttgattactaaactagtttttgttttgttttgtgttttgaggcagtctcgctctgttgcccaggctagagttcagtggcacgatctccgctcactgcaacctccacctccctggttgaagcaattctcgtgcatcagcctccgggtagctgggactacaagtgcccaccaccacatctggctaatttttgtatttttagtatttagagatggggtttcaccatgttggcgaggatggtcttgaattcctggccttgagtgatccacctgccttggcctcccaaagtgctgggattacaggcgtgagtcaccacaccgagccctaaaccacttttttatacaccagaagttatgtttattgcagactcaggaatgaaaatcatttccactttgtaattaaatttcctgtttacactttacatgagaaaactacactcatcaaatattgttccaccgtagtacttaagagtaaggcattaaataaacaagctaatactattaacaagaaaaattaaatgcaaaaatcttaatatgcttgttactactttttaccatggaaataaagcttg

SEQ ID NO: 8414 - DNA, 827 bp, Homo sapiens
  source 1..827: mol_type = unassigned DNA
gcgtctgggtgagtcgctctgcctgtctgatgacgacacagctgatctgtaagttgctgcggtccagggaggcggcggcggctgtggacgtcaggacgtggcccctcatcctggacacagatgatttgccaaagaagcggcctgcccagatctgcaaaccttgcaacccagacactcttgcatatctcgacttcagcgtgtccacaactgggatgctagctggcgtaaagatgtctcacgcagccaccagtgccttctgccgttccattaagctgcagtgtgaactttacccctctagagaagtggccatctgcctggacccttactgtggactgggatttgtcctctggtgcctctgcagtgtgtattctgggcaccagtccatcctgatcccgccctctgagctggaaaccaaccccgccttgtggcttcttgccgtgagtcagtacaaagtccgagacacgttttgctcctactccgtgatggagctgtgcaccaaggggctgggctcgcaaacagagtccctcaaggcgcgagggctggacttgtcccgagtgaggacctgcgtggttgtggcggaagagaggcctcggatcgcactcacacagtcgttctcaaagctgtttaaggacctgggccttcacccgcgggccgtcagcacctcgttcggttgcagggtgaacctggcgatttgcttgcagtgctgggattacaggcatgagccaccacgcccagccccaaaatgttttaagatggtttacaaggaaggagtacgctcagtaggagaagataaaatacgtgaaaaaagaaccaaaacatggagatga

SEQ ID NO: 8415 - DNA, 731 bp, Homo sapiens
  source 1..731: mol_type = unassigned DNA
ctgaaaccattgtgaatgtgctggatttcaagaaggacgtcgggctctggcatggcatcctgacaagcgtcatgaacatgatgcatgtgatcagcatcccgtactcgctgatgaaggtgaaccctctctcctggatccagaaggtctgccagtacaaagcaaaagtggcgtgtgtgaaatcgagggatatgcattgggcattagtagcacacagagatcagagagacatcaacctctcctctctgcgaatgctgatagtggcggacggcgcgaacccctggtctatttcttcttgcgatgcatttctcaatgtcttccaaagtaaaggccttcgacaggaggtcatctgtccttgtgccagctcgccagaggccctcactgtggccatccggaggcccacggatgacagtaaccagcccccgggccggggtgtcctctccatgcatggactgacctatggggtcattcgtgtggactcggaagagaagctgtccgtgctcaccgtgcaggatgtcggcctcgtgatgcctggagccatcatgtgttcagtgaagccagacggggttcctcagctgtgcagaacggatgagatcggggagctgtgtgtgtgtgcagttgcgacgggcacgtcctactatggcctctctggcatgaccaagaacacctttgagcatacttccaacaagggcaaataacattttatgaatgaagagagattactttaaaactaa

SEQ ID NO: 8416 - DNA, 727 bp, Homo sapiens
  source 1..727: mol_type = unassigned DNA
ctgaggaggcgccgaggggagggaggtccctgcgcgcccgccgcccgcctcccgcgcccgcgccgccgcctcctcctcggtgcggttccgccgggcgcgaggagccgccgagacctccgcctgcgaacaaagaggaggccgtgcggggcgcggcgcccgcggagcatggcggaccgcagcctggagggcatggcgctgcccctggaggtgcgggcgcgcctggccgagctggagctggagctgtcggaaggtgacatcacacaaaaaggatatgaaaagaagaggtcaaagttaattggagcctaccttccgcagcctccgacagcgaatggagctgccgtggttcggtgtagactgcagcacagtgaaggagcgccgaggagaacattccgctctgcccacatcggggtgtgcgacgtccgagaagctgcggctcgggagcgggtggccagcaccgcagggaaccggcctctgttttactttcgtttcggggtggaccaagctttgccgcaagaacgccgggctcctgtcactccttcctccgcctctcgctaccaccgccgacggtcttcagggtcacgagatgagcgctatcggtcagacgtccacacggaagctgtccaggcggctctggccaaacacaaagagcggaagatggcagtgcctatgccttccaaacgcaggtccctggtcgtgcagacctcgatggacgcctacacccctccag

SEQ ID NO: 8417 - DNA, 721 bp, Homo sapiens
  source 1..721: mol_type = unassigned DNA
tgtgtattctgggcaccagtccatcctgatcccgccctctgagctggaaaccaaccccgccttgtggcttcttgccgtgagtcagtacaaagtccgagacacgttttgctcctactccgtgatggagctgtgcaccaaggggctgggctcgcaaacagagtccctcaaggcgcgagggctggacttgtcccgagtgaggacctgcgtggttgtggcggaagagaggcctcggatcgcactcacacagtcgttctcaaagctgtttaaggacctgggccttcacccgcgggccgtcagcacctcgttcggttgcagggtgaacctggcgatttgcttgcagtgctgggattacaggcatgagccaccacgcccagccccaaaatgttttaagatggtttacaaggaaggagtacgctcagtaggagaagataaaatacgtgaaaaaagaaccaaaacatggagatgaaagaaaaacagcgcaggaaagggacagaatgaagaacagagttggcgtgctggtgttttccacaaggcttctgaagcgtgccaccgtccttacctcggcaccagggcggggcctgacacgtggtggatattgaatgaatgtgcgccgtgggagtgttgagcacggttctgtattcttaataggaaatggcaatatgttcttgtgcagaagacaattctgtcaatatgaccgctaaatcaaaattcagtattctaa

SEQ ID NO: 8418 - DNA, 1781 bp, Homo sapiens
  source 1..1781: mol_type = unassigned DNA
atctgggtgagtcgctctgcctgtctgatgacgacacagctgatctgtaagttgctgcggtccagggaggcggcggcggctgtggacgtcaggacgtggcccctcatcctggacacagatgatttgccaaagaagcggcctgcccagatctgcaaaccttgcaacccagacactcttgcatatctcgacttcagcgtgtccacaactgggatgctagctggcgtaaagatgtctcacgcagccaccagtgccttctgccgttccattaagctgcagtgtgaactttacccctctagagaagtggccatctgcctggacccttactgtggactgggatttgtcctctggtgcctctgcagtgtgtattctgggcaccagtccatcctgatcccgccctctgagctggaaaccaaccccgccttgtggcttcttgccgtgagtcagtacaaagtccgagacacgttttgctcctactccgtgatggagctgtgcaccaaggggctgggctcgcaaacagagtccctcaaggcgcgagggctggacttgtcccgagtgaggacctgcgtggttgtggcggaagagaggcctcggatcgcactcacacagtcgttctcaaagctgtttaaggacctgggccttcacccgcgggccgtcagcacctcgttcggttgcagggtgaacctggcgatttgcttgcagggaacctcaggacctgacccaaccactgtctacgtggacatgagagccctgagacacgacagagtccgcttagtggaaagaggatcccctcatagtctgcccctgatggaatcgggaaagatacttccaggggttcggattataattgccaacccagaaacaaaaggaccgctgggggactcacaccttggagagatttgggttcacagtgcccacaatgccagcggttatttcactatttacggagacgaatccctccagtcagatcacttcaactcaagactaagttttggagacacccagaccatctgggcacgcacaggctacttggggttcctgcggagaactgagctcacagatgcaaatggagagcgccatgatgccctctacgtggtaggggcactggacgaagccatggagctgcggggcatgcggtaccacccaatcgacattgagacctcggtcatcagagcccataaaagcgttacggaatgtgctgtgtttacctggacaaatttgttggtggttgtggttgagctggatgggtcggaacaagaagccttggacctggttcccttggtgaccaacgtggtcctggaggagcactacctgatcgtcggagtggtggtcgtggtggacatcggcgtcatccccatcaactcccgtggggagaagcagcgcatgcacctgcgagacgggtttttggcagaccagctagaccccatctatgtggcctacaacatgtagtctcgtctcttggcttccatggacttttctagagatgtagacattgttctccgtgtccactgaagcgtgcagacacagggcaacactcaccagaatacagccatttgtggtgagagtggaggaggaagaggaggaggaagaggacttctcacagcagccacgattggcatgggggtgaaatgtgaatttaccactgaatttcgctcagaaggactttggattactgccttcagtttgttggaaaagcccatttcaaaactttcttttcttttctttcttttttaattattggataataagtgctttcttcgtaaatgtggtattttgttaagccg

SEQ ID NO: 8419 - DNA, 1358 bp, Homo sapiens
  source 1..1358: mol_type = unassigned DNA
actcagtgtcctgggatcagaggcaaagaccagggaggggcgggcactcaggtcagcaggggctatgctctgggtctgagtcctgccgagccccaccacccacttgggcagtgaagtcaacctttctgtgcccgaatcttctcatctgaaagtgaggaataatagccataggcttatggcccacggatgacagtaaccagcccccgggccggggtgtcctctccatgcatggactgacctatggggtcattcgtgtggactcggaagagaagctgtccgtgctcaccgtgcaggatgtcggcctcgtgatgcctggagccatcatgtgttcagtgaagccagacggggttcctcagctgtgcagaacggatgagatcggggagctgtgtgtgtgtgcagttgcgacgggcacgtcctactatggcctctctggcatgaccaagaacacctttgaggtgtttcccatgacaagctccggggctccgatcagtgaatacccattcataaggacaggcttgctggggttcgtgggtcccggaggcctcgtcttcgtggtgggcaagatggatggcctcatggtggtcagcgggcgcaggcacaacgccgacgacatcgtggccactgcgctggccgtagaacccatgaagtttgtctaccggggaaggatagccgtgttctcggtgaccgtgctgcacgacgagaggatcgtgatcgtggctgagcagaggcctgactccacggaagaggacagtttccagtggatgagccgtgtgctgcaggcgattgacagtatacatcaagttggagtttattgcctggccttggtgccagcaaacaccctccccaaaaccccgcttggtgggatccatttatcagaaacaaaacagctttttctggagggctctctgcacccctgcaatgtcctaatgtgcccccacacctgcgtcacaaacttgcctaagcctcgacagaagcagccagaaatcggccctgcctctgtgatggtggggaacctggtctctgggaagagaatcgcccaggccagtggcagagacctgggtcagatcgaagataacgaccaggcacgcaagttcctgttcctctcagaggtcttgcagtggagagcacagaccaccccggaccacatcctctacacgctgctcaactgtcgggtgaggcgcggagctggccttccctggctactggcctcaaggggcctagcctggttcctgggagcgctcctgcttctttctttgaatccttttgcttcagtcttatgggaattctttttatgttttgctattttgactgagacttttgtacctagggattgtttttaaacgtaaccatttgtgcag

SEQ ID NO: 8420 - DNA, 1598 bp, Homo sapiens
  source 1..1598: mol_type = unassigned DNA
cctctggtgcctctcctggcaggcagagtggctcctcacagcctgaagctcatccttctgcacgggccagccaggccagcacagaggcaccagggcagcagtgcacacaggtccccggggaccccaccatgtggagcggatggtggctgtggccccttgtggccgtctgcactgcagacttctttcgggacgaggcagagaggatcatgagggactcccctgtcattgatgggcacaatgacctcccctggcagctgctggatatgttcaacaaccggctgcaggacgagagggccaacctgaccaccttggccggcacacacaccaacatccccaagctgagggccggctttgtgggaggccagttctggtccgtgtacacgccctgcgacacccagaacaaagacgccgtgcggaggacgctggagcagatggacgtggtccaccgcatgtgccggatgtacccggagaccttcctgtatgtcaccagcagtgcaggcattcggcaggccttccgggaagggaaggtggccagcctgatcggcgtggagggcggccactccattgacagcagtttgggcgtcctgcgggcactctatcagctgggcatgcggtacctgaccctcacccacagctgcaacacgccctgggctgacaactggctggtggacacgggagacagcgagccccagagccaaggcttgtcaccctttgggcagcgtgtggtgaaggagctgaaccgtctgggggtcctcatcgacttggctcacgtgtctgtggccaccatgaaggccaccctgcagctgtccagagccccggtcatcttcagccactcctcggcctacagcgtgtgcgcaagccggcgcaacgtgcctgacgacgtcctgaggctggtgaaacagacagacagcctggtgatggtgaacttctacaacaattacatttcctgcaccaacaaggccaacctgtcccaagtggccgaccatctggatcacatcaaggaggtggcaggagccagagccgtgggttttggtggggactttgatggtgttccaagggtccctgaggggctggaggacgtctccaagtatccagacctgatcgctgagctgctcaggaggaactggacggaggcggaggtcaagggcgcactggctgacaacctgctgagggtcttcgaggctgtggaacaggccagcaacctcacacaggctcccgaggaggagcccatcccgctggaccagctgggtggctcctgcaggacccattacggctactcctctggggcttccagcctccatcgccactgggggctcctgctggcctccctcgctcccctggtcctctgtctgtctctcctgtgaaacctgggagaccagagtcccctttagggttcccggagctccgggaagacccgcccatcccaggactccagatgccaggagccctgctgcccacatgcaaggaccagcatctcctgagaggacgcctgggcttacctggggggcaggatgcctggggacagttcaggacacacacacagtaggcccgcaataaaagcaacaccccttcacatcctggggtacgtgtcatcggca

SEQ ID NO: 8421 - DNA, 1735 bp, Homo sapiens
  source 1..1735: mol_type = unassigned DNA
ggggtactgtgcgagccctcaaggaggtggctgttctgtagctggagagctccgtgggtggcaggactgaacttgaacaccagaaacaacccccaagccttgtgacctgggaggcaggaggcgggtctgtctccctgggacttgggtggctgagccgaggtactcgggaccctgtcccgcgcatggcagagtggctcctcacagcctgaagctcatccttctgcacgggccagccaggccagcacagaggcaccagggcagcagtgcacacaggtccccggggaccccaccatgtggagcggatggtggctgtggccccttgtggccgtctgcactgcagacttctttcgggacgaggcagagaggatcatgagggactcccctgtcattgatgggcacaatgacctcccctggcagctgctggatatgttcaacaaccggctgcaggacgagagggccaacctgaccaccttggccggcacacacaccaacatccccaagctgagggccggctttgtgggaggccagttctggtccgtgtacacgccctgcgacacccagaacaaagacgccgtgcggaggacgctggagcagatggacgtggtccaccgcatgtgccggatgtacccggagaccttcctgtatgtcaccagcagtgcaggcattcggcaggccttccgggaagggaaggtggccagcctgatcggcgtggagggcggccactccattgacagcagtttgggcgtcctgcgggcactctatcagctgggcatgcggtacctgaccctcacccacagctgcaacacgccctgggctgacaactggctggtggacacgggagacagcgagccccagagccaaggcttgtcaccctttgggcagcgtgtggtgaaggagctgaaccgtctgggggtcctcatcgacttggctcacgtgtctgtggccaccatgaaggccaccctgcagctgtccagagccccggtcatcttcagccactcctcggcctacagcgtgtgcgcaagccggcgcaacgtgcctgacgacgtcctgaggctggtgaaacagacagacagcctggtgatggtgaacttctacaacaattacatttcctgcaccaacaaggccaacctgtcccaagtggccgaccatctggatcacatcaaggaggtggcaggagccagagccgtgggttttggtggggactttgatggtgttccaagggtccctgaggggctggaggacgtctccaagtatccagacctgatcgctgagctgctcaggaggaactggacggaggcggaggtcaagggcgcactggctgacaacctgctgagggtcttcgaggctgtggaacaggccagcaacctcacacaggctcccgaggaggagcccatcccgctggaccagctgggtggctcctgcaggacccattacggctactcctctggggcttccagcctccatcgccactgggggctcctgctggcctccctcgctcccctggtcctctgtctgtctctcctgtgaaacctgggagaccagagtcccctttagggttcccggagctccgggaagacccgcccatcccaggactccagatgccaggagccctgctgcccacatgcaaggaccagcatctcctgagaggacgcctgggcttacctggggggcaggatgcctggggacagttcaggacacacacacagtaggcccgcaataaaagcaacaccccttc

SEQ ID NO: 8422 - DNA, 1647 bp, Homo sapiens
  source 1..1647: mol_type = unassigned DNA
ggcacatccacacatgagggaaaaacactgccaggacatctcagggcactctcaggaaatgaggaagctgctggagaagtttctagccttgggggaggcagagtggctcctcacagcctgaagctcatccttctgcacgggccagccaggccagcacagaggcaccagggcagcagtgcacacaggtccccggggaccccaccatgtggagcggatggtggctgtggccccttgtggccgtctgcactgcagacttctttcgggacgaggcagagaggatcatgagggactcccctgtcattgatgggcacaatgacctcccctggcagctgctggatatgttcaacaaccggctgcaggacgagagggccaacctgaccaccttggccggcacacacaccaacatccccaagctgagggccggctttgtgggaggccagttctggtccgtgtacacgccctgcgacacccagaacaaagacgccgtgcggaggacgctggagcagatggacgtggtccaccgcatgtgccggatgtacccggagaccttcctgtatgtcaccagcagtgcaggcattcggcaggccttccgggaagggaaggtggccagcctgatcggcgtggagggcggccactccattgacagcagtttgggcgtcctgcgggcactctatcagctgggcatgcggtacctgaccctcacccacagctgcaacacgccctgggctgacaactggctggtggacacgggagacagcgagccccagagccaaggcttgtcaccctttgggcagcgtgtggtgaaggagctgaaccgtctgggggtcctcatcgacttggctcacgtgtctgtggccaccatgaaggccaccctgcagctgtccagagccccggtcatcttcagccactcctcggcctacagcgtgtgcgcaagccggcgcaacgtgcctgacgacgtcctgaggctggtgaaacagacagacagcctggtgatggtgaacttctacaacaattacatttcctgcaccaacaaggccaacctgtcccaagtggccgaccatctggatcacatcaaggaggtggcaggagccagagccgtgggttttggtggggactttgatggtgttccaagggtccctgaggggctggaggacgtctccaagtatccagacctgatcgctgagctgctcaggaggaactggacggaggcggaggtcaagggcgcactggctgacaacctgctgagggtcttcgaggctgtggaacaggccagcaacctcacacaggctcccgaggaggagcccatcccgctggaccagctgggtggctcctgcaggacccattacggctactcctctggggcttccagcctccatcgccactgggggctcctgctggcctccctcgctcccctggtcctctgtctgtctctcctgtgaaacctgggagaccagagtcccctttagggttcccggagctccgggaagacccgcccatcccaggactccagatgccaggagccctgctgcccacatgcaaggaccagcatctcctgagaggacgcctgggcttacctggggggcaggatgcctggggacagttcaggacacacacacagtaggcccgcaataaaagcaacaccccttc

SEQ ID NO: 8423 - DNA, 993 bp, Homo sapiens
  source 1..993: mol_type = unassigned DNA
attgtttcttgggaattgtctgtatcagacatcatgggagcagatccagggcgacatcaaagggaagcatgagtctccaggaccagaggggcttggatgcagatgatcatcatctgggcactgctggatactgagctctctgactgccacccctgcctgcctgcccggccctgcacaacatgcagccctccggcctcgagggtcccggcacgtttggtcggtggcctctgctgagtctgctgctcctgctgctgctgctccagcctgtaacctgtgcctacaccacgccaggcccccccagagccctcaccacgctgggcgcccccagagcccacaccatgccgggcacctacgctccctcgaccacactcagtagtcccagcacccagggcctgcaagagcaggcacgggccctgatgcgggacttcccgctcgtggacggttctggtcagcctatgtgccatgccagacccaggaccgggatgccctgcgcctcaccctggagcagattgacctcatacgccgcatgtgtgcctcctattctgagctggagcttgtgacctcggctaaaggtaggcaagttgatgggaagcgttaggaacttgattgagctactccagccctggaaagtaatcacctgacctacctgcccccagctctgaacgacactcagaaattggcctgcctcatcggtgtagagggtggccactcgctggacaatagcctctccatcttacctaccttctacatgctgggagtgcgctacctgacgctcacccacacctgcaacacaccctggtgagcctagtgcagatggtgtgggaccgctgaggcaggggcagagatctgcctgaggtcactgtgggcccagaacaagctttacccatgggatgtggcactgactctggagtggggaggggagctgggattctggttttcagaatacgacttgacccctggccagacgcggtggctcatgcctgtaatcccaaa

SEQ ID NO: 8424 - DNA, 1309 bp, Homo sapiens
  source 1..1309: mol_type = unassigned DNA
atgcagccctccggcctcgagggtcccggcacgtttggtcggtggcctctgctgagtctgctgctcctgctgctgctgctccagcctgtaacctgtgcctacaccacgccaggcccccccagagccctcttctggtcagcctatgtgccatgccagacccaggaccgggatgccctgcgcctcaccctggagcagattgacctcatacgccgcatgtgtgcctcctattctgagctggagcttgtgacctcggctaaagctctgaacgacactcagaaattggcctgcctcatcggtgtagagggtggccactcgctggacaatagcctctccatcttacctaccttctacatgctgggagtgcgctacctgacgctcacccacacctgcaacacaccctgggcagagagctccgctaagggcgtccactccttctacaacaacatcagcgggctgactgactttggtgagaaggtggtggcagaaatgaaccgcctgggcatgatggtagacttatcccatgtctcagatgctgtggcacggcgggccctggaagtgtcacaggcacctgtgatcttctcccactcggctgcccggggtgtgtgcaacagtgctcggaatgttcctgatgacatcctgcagcttctgaagaagaacggtggcgtcgtgatggtgtctttgtccatgggagtaatacagtgcaacccatcagccaatgtgtccactgtggcagatcacttcgaccacatcaaggctgtcattggatccaagttcatcgggattggtggagattatgatggggccggcaaattccctcaggggctggaagacgtgtccacatacccggtcctgatagaggagttgctgagtcgtggctggagtgaggaagagcttcagggtgtccttcgtggaaacctgctgcgggtcttcagacaagtggaaaaggtacaggaagaaaacaaatggcaaagccccttggaggacaagttcccggatgagcagctgagcagttcctgccactccgacctctcacgtctgcgtcagagacagagtctgacttcaggccaggaactcactgagattcccatacactggacagccaagttaccagccaagtggtcagtctcagagtcctccccccacatggccccagtccttgcagttgtggccaccttcccagtccttattctgtggctctgatgacccagttagtcctgccagatgtcactgtagcaagccacagacaccccacaaagttcccctgttgtgcaggcacaaatatttcctgaaataaatgttttggacatag

SEQ ID NO: 8425 - DNA, 1697 bp, Homo sapiens
  source 1..1697: mol_type = unassigned DNA
cggaattggtgggttcttggtctcactgagttctagaatgaagctgcagaccctcgcagtgagtgttacagctcttaaggctctctgactgccacccctgcctgcctgcccggccctgcacaacatgcagccctccggcctcgagggtcccggcacgtttggtcggtggcctctgctgagtctgctgctcctgctgctgctgctccagcctgtaacctgtgcctacaccacgccaggcccccccagagccctcaccacgctgggcgcccccagagcccacaccatgccgggcacctacgctccctcgaccacactcagtagtcccagcacccagggcctgcaagagcaggcacgggccctgatgcgggacttcccgctcgtggacggccacaacgacctgcccctggtcctaaggcaggtttaccagaaagggctacaggatgttaacctgcgcaatttcagctacggccagaccagcctggacaggcttagagatggcctcgtgggcgcccagttctggtcagcctatgtgccatgccagacccaggaccgggatgccctgcgcctcaccctggagcagattgacctcatacgccgcatgtgtgcctcctattctgagctggagcttgtgacctcggctaaagctctgaacgacactcagaaattggcctgcctcatcggtgtagagggtggccactcgctggacaatagcctctccatcttacctaccttctacatgctgggagtgcgctacctgacgctcacccacacctgcaacacaccctgggcagagagctccgctaagggcgtccactccttctacaacaacatcagcgggctgactgactttggtgagaaggtggtggcagaaatgaaccgcctgggcatgatggtagacttatcccatgtctcagatgctgtggcacggcgggccctggaagtgtcacaggcacctgtgatcttctcccactcggctgcccggggtgtgtgcaacagtgctcggaatgttcctgatgacatcctgcagcttctgaagaagaacggtggcgtcgtgatggtgtctttgtccatgggagtaatacagtgcaacccatcagccaatgtgtccactgtggcagatcacttcgaccacatcaaggctgtcattggatccaagttcatcgggattggtggagattatgatggggccggcaaattccctcaggggctggaagacgtgtccacatacccggtcctgatagaggagttgctgagtcgtggctggagtgaggaagagcttcagggtgtccttcgtggaaacctgctgcgggtcttcagacaagtggaaaaggtacaggaagaaaacaaatggcaaagccccttggaggacaagttcccggatgagcagctgagcagttcctgccactccgacctctcacgtctgcgtcagagacagagtctgacttcaggccaggaactcactgagattcccatacactggacagccaagttaccagccaagtggtcagtctcagagtcctccccccacatggccccagtccttgcagttgtggccaccttcccagtccttattctgtggctctgatgacccagttagtcctgccagatgtcactgtagcaagccacagacaccccacaaagttcccctgttgtgcaggcacaaatatttcctgaaataaatgttttggacatagaaa

SEQ ID NO: 8426 - DNA, 2236 bp, Homo sapiens
  source 1..2236: mol_type = unassigned DNA
agactattgtttcttgggaattgtctgtatcagacatcatgggagcagatccagggcgacatcaaagggaagcatgagtctccaggaccagaggggcttggatgcagatgatcatcatctgggcactgctggatactgaagttctcattatgttgcctagactggtctcaaacctccggcttcaagagatcctctcacctcgaccttcaaattactgggattacaggcatgagccaccatgtcctaccagactttgttaaaagaggaacaggccaggcatcgtgggctcacatgaacactcatgccccagaagtaaacaagtgttagccaaccaggaggcctatcctccccctaacctcacccaaagccatctctgtgccctcccccttgcaggggaaacagcacacactagtgaaatcttgtcttagtgtgtccggaattggtgggttcttggtctcactgagttctagaatgaagctgcagaccctcgcagtgagtgttacagctcttaaggtagcgcgtctggagtttgtttcttttgatgtttggatgtttggagtttcttccttctggtgggtttgtggtcttgttggctcaggagtgaagctgcagaccttcgtggctctctgactgccacccctgcctgcctgcccggccctgcacaacatgcagccctccggcctcgagggtcccggcacgtttggtcggtggcctctgctgagtctgctgctcctgctgctgctgctccagcctgtaacctgtgcctacaccacgccaggcccccccagagccctcaccacgctgggcgcccccagagcccacaccatgccgggcacctacgctccctcgaccacactcagtagtcccagcacccagggcctgcaagagcaggcacgggccctgatgcgggacttcccgctcgtggacggccacaacgacctgcccctggtcctaaggcaggtttaccagaaagggctacaggatgttaacctgcgcaatttcagctacggccagaccagcctggacaggcttagagatggcctcgtgggcgcccagttctggtcagcctatgtgccatgccagacccaggaccgggatgccctgcgcctcaccctggagcagattgacctcatacgccgcatgtgtgcctcctattctgagctggagcttgtgacctcggctaaagctctgaacgacactcagaaattggcctgcctcatcggtgtagagggtggccactcgctggacaatagcctctccatcttacctaccttctacatgctgggagtgcgctacctgacgctcacccacacctgcaacacaccctgggcagagagctccgctaagggcgtccactccttctacaacaacatcagcgggctgactgactttggtgagaaggtggtggcagaaatgaaccgcctgggcatgatggtagacttatcccatgtctcagatgctgtggcacggcgggccctggaagtgtcacaggcacctgtgatcttctcccactcggctgcccggggtgtgtgcaacagtgctcggaatgttcctgatgacatcctgcagcttctgaagaagaacggtggcgtcgtgatggtgtctttgtccatgggagtaatacagtgcaacccatcagccaatgtgtccactgtggcagatcacttcgaccacatcaaggctgtcattggatccaagttcatcgggattggtggagattatgatggggccggcaaattccctcaggggctggaagacgtgtccacatacccggtcctgatagaggagttgctgagtcgtggctggagtgaggaagagcttcagggtgtccttcgtggaaacctgctgcgggtcttcagacaagtggaaaaggtacaggaagaaaacaaatggcaaagccccttggaggacaagttcccggatgagcagctgagcagttcctgccactccgacctctcacgtctgcgtcagagacagagtctgacttcaggccaggaactcactgagattcccatacactggacagccaagttaccagccaagtggtcagtctcagagtcctccccccacatggccccagtccttgcagttgtggccaccttcccagtccttattctgtggctctgatgacccagttagtcctgccagatgtcactgtagcaagccacagacaccccacaaagttcccctgttgtgcaggcacaaatatttcctgaaataaatgttttggacatag

SEQ ID NO: 8427 - DNA, 1999 bp, Homo sapiens
  source 1..1999: mol_type = unassigned DNA
aaaccagacagaccgaattaactcttctgagtcgcagcttagaatatttgacctgcctaggagctgggcacaagccggcagctaaccgccacgtgggcctgggtaggaggtgagatcaggaagatccctgggcccctactagttccctgcctggcctcctcccccactcgtgtgggggtctacggagccagcgctgggggtggaagggcgaggagtcctcgacgctgcagcggcggttccggcccatgggggcgctctcctgcttgggggcggaaaagccgtggcgcccccttgcgtggcgcgtcggtctcagagtcgcgtgacttcaaccccctcttcgggaggctgggtcgtcatgatccggaccccattgtcggcctctgcccatcgcctgctcctcccaggctcccgcggccgacccccgcgcaacatgcagcccacgggccgcgagggttcccgcgcgctcagccggcggtatctgcggcgtctgctgctcctgctactgctgctgctgctgcggcagcccgtaacccgcgcggagaccacgccgggcgcccccagagccctctccacgctgggctcccccagcctcttcaccacgccgggtgtccccagcgccctcactaccccaggcctcactacgccaggcacccccaaaaccctggaccttcggggtcgcgcgcaggccctgatgcggagtttcccactcgtggacggccacaatgacctgccccaggtcctgagacagcgttacaagaatgtgcttcaggatgttaacctgcgaaatttcagccatggtcagaccagcctggacaggcttagagacggcctcgtgggtgcccagttctggtcagcctccgtctcatgccagtcccaggaccagactgccgtgcgcctcgccctggagcagattgacctcattcaccgcatgtgtgcctcctactctgaactcgagcttgtgacctcagctgaaggtctgaacagctctcaaaagctggcctgcctcattggcgtggagggtggtcactcactggacagcagcctctctgtgctgcgcagtttctatgtgctgggggtgcgctacctgacacttaccttcacctgcagtacaccatgggcagagagttccaccaagttcagacaccacatgtacaccaacgtcagcggattgacaagctttggtgagaaagtagtagaggagttgaaccgcctgggcatgatgatagatttgtcctatgcatcggacaccttgataagaagggtcctggaagtgtctcaggctcctgtgatcttctcccactcagctgccagagctgtgtgtgacaatttgttgaatgttcccgatgatatcctgcagcttctgaagaagaacggtggcatcgtgatggtgacactgtccatgggggtgctgcagtgcaacctgcttgctaacgtgtccactgtggcagatcactttgaccacatcagggcagtcattggatctgagttcatcgggattggtggaaattatgacgggactggccggttccctcaggggctggaggatgtgtccacatacccagtcctgatagaggagttgctgagtcgtagctggagcgaggaagagcttcaaggtgtccttcgtggaaacctgctgcgggtcttcagacaagtggaaaaggtgagagaggagagcagggcgcagagccccgtggaggctgagtttccatatgggcaactgagcacatcctgccactcccacctcgtgcctcagaatggacaccaggctactcatctggaggtgaccaagcagccaaccaatcgggtcccctggaggtcctcaaatgcctccccataccttgttccaggccttgtggctgctgccaccatcccaaccttcacccagtggctctgctgacacagtcggtccccgcagaggtcactgtggcaaagcctcacaaagccccctctcctagttcattcacaagcatatgctgagaataaacatgttacacatgga

SEQ ID NO: 8428 - DNA, 3052 bp, Homo sapiens
  source 1..3052: mol_type = unassigned DNA
ggctgggctcccgcgcctccctcttctcaccctcccccgccccgccccagttccaggctctcctgcttctccacggactctgcgggaagttagagcctctgcgtgcgctccggggcccggcgagaggatgcgcaaggtggagagccgcggggaagggggcagagaggaactgggaagtaacagccctccacagagaaactggaagggaattgctattgctctgctggtgattttagttgtatgctcactcatcactatgtcagtcatcctcttaaccccagatgaactcacaaattcgtcagaaaccagattgtctttggaagacctctttaggaaagactttgtgcttcacgatccagaggctcggtggatcaatgatacagatgtggtgtataaaagcgagaatggacatgtcattaaactgaatatagaaacaaatgctaccacattattattggaaaacacaacttttgtaaccttcaaagcatcaagacattcagtttcaccagatttaaaatatgtccttctggcatatgatgtcaaacagatttttcattattcgtatactgcttcatatgtgatttacaacatacacactagggaagtttgggagttaaatcctccagaagtagaggactccgtcttgcagtacgcggcctggggtgtccaagggcagcagctgatttatatttttgaaaataatatctactatcaacctgatataaagagcagttcattgcgactgacatcttctggaaaagaagaaataatttttaatgggattgctgactggttatatgaagaggaactcctgcattctcacatcgcccactggtggtcaccagatggagaaagacttgccttcctgatgataaatgactctttggtacccaccatggttatccctcggtttactggagcgttgtatcccaaaggaaagcagtatccgtatcctaaggcaggtcaagtgaacccaacaataaaattatatgttgtaaacctgtatggaccaactcacactttggagctcatgccacctgacagctttaaatcaagagaatactatatcactatggttaaatgggtaagcaataccaagactgtggtaagatggttaaaccgagctcagaacatctccatcctcacagtctgtgagaccactacaggtgcttgtagtaaaaaatatgagatgacatcagatacgtggctctctcagcagaatgaggagcccgtgttttctagagacggcagcaaattctttatgacagtgcctgttaagcaagggggacgtggagaatttcaccacgtagctatgttcctcatccagagtaaaagtgagcaaattaccgtgcggcatctgacatcaggaaactgggaagtgataaagatcttggcatacgatgaaactactcaaaaaatttactttctgagcactgaatcttctcccagaggaaggcagctgtacagtgcttctactgaaggattattgaatcgccaatgcatttcatgtaatttcatgaaagaacaatgtacatattttgatgccagttttagtcccatgaatcaacatttcttattattctgtgaaggtccaagggtcccagtggtcagcctacatagtacggacaacccagcaaaatattttatattggaaagcaattctatgctgaaggaagctatcctgaagaagaagataggaaagccagaaattaaaatccttcatattgacgactatgaacttcctttacagttgtcccttcccaaagattttatggaccgaaaccagtatgctcttctgttaataatggatgaagaaccaggaggccagctggttacagataagttccatattgactgggattccgtactcattgacatggataatgtcattgtagcaagatttgatggcagaggaagtggattccagggtctgaaaattttgcaggagattcatcgaagattaggttcagtagaagtaaaggaccaaataacagctgtgaaatttttgctgaaactgccttacattgactccaaaagattaagcatttttggaaagggttatggtggctatattgcatcaatgatcttaaaatcagatgaaaagctttttaaatgtggatccgtggttgcacctatcacagacttgaaattgtatgcctcagctttctctgaaagataccttgggatgccatctaaggaagaaagcacttaccaggcagccagtgtgctacataatgttcatggcttgaaagaagaaaatatattaataattcatggaactgctgacacaaaagttcatttccaacactcagcagaattaatcaagcacctaataaaagctggagtgaattatactatgcaggtctacccagatgaaggtcataacgtatctgagaagagcaagtatcatctctacagcacaatcctcaaattcttcagtgattgtttgaaggaagaaatatctgtgctaccacaggaaccagaagaagatgaataatggactgtatttatacagaactgaagggaatattgaggctcaatgaaacctgacaaagagactgtaatattgtagttgctccagaatgtcaagggcagcttacggagatgtcactggagcagcacgctcagagacagtgaactagcatttgaatacacaagtccaagtctactgtgttgctaggggtgcagaacccgtttctttgtatgagagaggtcaaagggttggtttcctgggagaaattagttttgcattaaagtaggagtagtgcatgttttcttctgttatccccctgtttgttctgtaactagttgctctcattttaatttcactggccaccatcatctttgcatataatgcacaatctatcatctgtcctacagtccctgatctttcatggctgagctgcaatctaacactttactgtacctttataataagtgcaattctttcattgtctattattatgcttaagaaaatattcagttaataaaaaacagagtattttatgtaatttctgtttttaaaaagacattattaaatgggtcaaaggac

SEQ ID NO: 8429 - DNA, 2758 bp, Homo sapiens
  source 1..2758: mol_type = unassigned DNA
aagaaggcacgaggcgtcgccgcagctcggtcaggggccggggccccgccgctcgccgctgcactaacttgccgcttggtctcgcctcgccgccgcggctcgctgcgctttgggtggcggggggcggggagagcggggagtcagagggtctgcggtggccgagggagggaccctacgacggggagcccgcccggtgccgctcttcttcccctccccgcccctccgctccccccaccccgtcccttccgccgattccgggagcgacgggcgcccgtgacctgcgaacgctgccaagtgacggtccccgagtctgaagcgcccgcgaggaagcgagcgccagcgcgggccgccggcgatgacggccgcgaagcaggagccgcagcccaccccgggggccagggcgagccaggcgcagccggcggaccaggaactgggaagtaacagccctccacagagaaactggaagggaattgctattgctctgctggtgattttagttgtatgctcactcatcactatgtcagtcatcctcttaaccccagatgaactcacaaattcgtcagaaaccagattgtctttggaagacctctttaggaaagactttgtgcttcacgatccagaggctcggtggatcaatgatacagatgtggtgtataaaagcgagaatggacatgtcattaaactgaatatagaaacaaatgctaccacattattattggaaaacacaacttttgtaaccttcaaagcatcaagacattcagtttcaccagatttaaaatatgtccttctggcatatgatgtcaaacagatttttcattattcgtatactgcttcatatgtgatttacaacatacacactagggaagtttgggagttaaatcctccagaagtagaggactccgtcttgcagtacgcggcctggggtgtccaagggcagcagctgatttatatttttgaaaataatatctactatcaacctgatataaagagcagttcattgcgactgacatcttctggaaaagaagaaataatttttaatgggattgctgactggttatatgaagaggaactcctgcattctcacatcgcccactggtggtcaccagatggagaaagacttgccttcctgatgataaatgactctttggtacccaccatggttatccctcggtttactggagcgttgtatcccaaaggaaagcagtatccgtatcctaaggcaggtcaagtgaacccaacaataaaattatatgttgtaaacctgtatggaccaactcacactttggagctcatgccacctgacagctttaaatcaagagaatactatatcactatggttaaatgggtaagcaataccaagactgtggtaagatggttaaaccgagctcagaacatctccatcctcacagtctgtgagaccactacaggtgcttgtagtaaaaaatatgagatgacatcagatacgtggctctctcagcagaatgaggagcccgtgttttctagagacggcagcaaattctttatgacagtgcctgttaagcaagggggacgtggagaatttcaccacgtagctatgttcctcatccagagtaaaagtgagcaaattaccgtgcggcatctgacatcaggaaactgggaagtgataaagatcttggcatacgatgaaactactcaaaaaatttactttctgagcactgaatcttctcccagaggaaggcagctgtacagtgcttctactgaaggattattgaatcgccaatgcatttcatgtaatttcatgaaagaacaatgtacatattttgatgccagttttagtcccatgaatcaacatttcttattattctgtgaaggtccaagggtcccagtggtcagcctacatagtacggacaacccagcaaaatattttatattggaaagcaattctatgctgaaggaagctatcctgaagaagaagataggaaagccagaaattaaaatccttcatattgacgactatgaacttcctttacagttgtcccttcccaaagattttatggaccgaaaccagtatgctcttctgttaataatggatgaagaaccaggaggccagctggttacagataagttccatattgactgggattccgtactcattgacatggataatgtcattgtagcaagatttgatggcagaggaagtggattccagggtctgaaaattttgcaggagattcatcgaagattaggttcagtagaagtaaaggaccaaataacagctgtgaaatttttgctgaaactgccttacattgactccaaaagattaagcatttttggaaagggttatggtggctatattgcatcaatgatcttaaaatcagatgaaaagctttttaaatgtggatccgtggttgcacctatcacagacttgaaattgtatgcctcagctttctctgaaagataccttgggatgccatctaaggaagaaagcacttaccaggcagccagtgtgctacataatgttcatggcttgaaagaagaaaatatattaataattcatggaactgctgacacaaaagttcatttccaacactcagcagaattaatcaagcacctaataaaagctggagtgaattatactatgcaggtctacccagatgaaggtcataacgtatctgagaagagcaagtatcatctctacagcacaatcctcaaattcttcagtgattgtttgaaggaagaaatatctgtgctaccacaggaaccagaagaagatgaataa

SEQ ID NO: 8430 - DNA, 6278 bp, Homo sapiens
  source 1..6278: mol_type = unassigned DNA
aaatattttgcactggaaaaactataatctggagagacagaggagttgagagtgcccctttaaactgcaggactgcaattgatctctgtatgttttctggttttcgtccctttgaaaggggaatgagagccaggatcattggctgtactgtggagctgtcacatctccatactgaaaaggtacactgcaagtgaatttaaaccgtttttggctttctattgcatattgccaagagctttgagactgatgaaccaagtaaatgctctatttagggctaagtgagatacagattcctccaatctgatagcgtttcagcctccggagtgaggaagcagcagaaacagaagcagcagaagcaacagcagtagcagcggcagcagcaacagcagcagcccctactgaagtccaatagaggagacttgatctctagttcattctggaactccgcctgggattgtgcactgtccagggtcctgaaacatgaaccaaactgccagcgtgtcccatcacatcaagtgtcaaccctcaaaaacaatcaaggaactgggaagtaacagccctccacagagaaactggaagggaattgctattgctctgctggtgattttagttgtatgctcactcatcactatgtcagtcatcctcttaaccccagatgaactcacaaattcgtcagaaaccagattgtctttggaagacctctttaggaaagactttgtgcttcacgatccagaggctcggtggatcaatgatacagatgtggtgtataaaagcgagaatggacatgtcattaaactgaatatagaaacaaatgctaccacattattattggaaaacacaacttttgtaaccttcaaagcatcaagacattcagtttcaccagatttaaaatatgtccttctggcatatgatgtcaaacagatttttcattattcgtatactgcttcatatgtgatttacaacatacacactagggaagtttgggagttaaatcctccagaagtagaggactccgtcttgcagtacgcggcctggggtgtccaagggcagcagctgatttatatttttgaaaataatatctactatcaacctgatataaagagcagttcattgcgactgacatcttctggaaaagaagaaataatttttaatgggattgctgactggttatatgaagaggaactcctgcattctcacatcgcccactggtggtcaccagatggagaaagacttgccttcctgatgataaatgactctttggtacccaccatggttatccctcggtttactggagcgttgtatcccaaaggaaagcagtatccgtatcctaaggcaggtcaagtgaacccaacaataaaattatatgttgtaaacctgtatggaccaactcacactttggagctcatgccacctgacagctttaaatcaagagaatactatatcactatggttaaatgggtaagcaataccaagactgtggtaagatggttaaaccgagctcagaacatctccatcctcacagtctgtgagaccactacaggtgcttgtagtaaaaaatatgagatgacatcagatacgtggctctctcagcagaatgaggagcccgtgttttctagagacggcagcaaattctttatgacagtgcctgttaagcaagggggacgtggagaatttcaccacgtagctatgttcctcatccagagtaaaagtgagcaaattaccgtgcggcatctgacatcaggaaactgggaagtgataaagatcttggcatacgatgaaactactcaaaaaatttactttctgagcactgaatcttctcccagaggaaggcagctgtacagtgcttctactgaaggattattgaatcgccaatgcatttcatgtaatttcatgaaagaacaatgtacatattttgatgccagttttagtcccatgaatcaacatttcttattattctgtgaaggtccaagggtcccagtggtcagcctacatagtacggacaacccagcaaaatattttatattggaaagcaattctatgctgaaggaagctatcctgaagaagaagataggaaagccagaaattaaaatccttcatattgacgactatgaacttcctttacagttgtcccttcccaaagattttatggaccgaaaccagtatgctcttctgttaataatggatgaagaaccaggaggccagctggttacagataagttccatattgactgggattccgtactcattgacatggataatgtcattgtagcaagatttgatggcagaggaagtggattccagggtctgaaaattttgcaggagattcatcgaagattaggttcagtagaagtaaaggaccaaataacagctgtgaaatttttgctgaaactgccttacattgactccaaaagattaagcatttttggaaagggttatggtggctatattgcatcaatgatcttaaaatcagatgaaaagctttttaaatgtggatccgtggttgcacctatcacagacttgaaattgtatgcctcagctttctctgaaagataccttgggatgccatctaaggaagaaagcacttaccaggcagccagtgtgctacataatgttcatggcttgaaagaagaaaatatattaataattcatggaactgctgacacaaaagttcatttccaacactcagcagaattaatcaagcacctaataaaagctggagtgaattatactatgcaggtctacccagatgaaggtcataacgtatctgagaagagcaagtatcatctctacagcacaatcctcaaattcttcagtgattgtttgaaggaagaaatatctgtgctaccacaggaaccagaagaagatgaataatggactgtatttatacagaactgaagggaatattgaggctcaatgaaacctgacaaagagactgtaatattgtagttgctccagaatgtcaagggcagcttacggagatgtcactggagcagcacgctcagagacagtgaactagcatttgaatacacaagtccaagtctactgtgttgctaggggtgcagaacccgtttctttgtatgagagaggtcaaagggttggtttcctgggagaaattagttttgcattaaagtaggagtagtgcatgttttcttctgttatccccctgtttgttctgtaactagttgctctcattttaatttcactggccaccatcatctttgcatataatgcacaatctatcatctgtcctacagtccctgatctttcatggctgagctgcaatctaacactttactgtacctttataataagtgcaattctttcattgtctattattatgcttaagaaaatattcagttaataaaaaacagagtattttatgtaatttctgtttttaaaaagacattattaaatgggtcaaaggacatatagaaatgtggatttcagcaccttccaaagttcagccagttatcagtagatacaatatctttaaatgaacacacgagtgtatgtctcacaatatatatacacaagtgtgcatatacagttaatgaaactatctttaaatgttattcatgctataaagagtaaacgtttgatgaattagaagagatgctcttttccaagctataatggatgctttgtttaatgagccaaatatgatgaaacattttttccaattcaaattctagctattgctttcctataaatgtttgggttgtgtttggtattgtttttagtggttaatagttttccagttgcatttaattttttgaatatgataccttgtcacatgtaaattagatacttaaatattaaattatagtttctgataaagaaattttgttaacaatgcaatgccactgagtgctattttgctcttttggtggagaaggcttttttcaaaactcttggtccttttacttctttctctcagtgcagaatcaattctcattttcatcgtaaaagcaaatagctggattatttcatttgccagtttctatttagtattccatgcctgcccaattcatctgttactgtttaatttcaattcttctggtgagaattagaaatgaaatattttttattcattggccaaaaagttcacagacagcagtgtttgctatttactttgaattgaaggcacaaaatgcatcaattcctgtgctgtgttgacttgcagtagtaagtaactgagagcataaaataaacctgactgtatgaagtcaatttaagtgatgagaacatttaactttggtgactaaagtcagaatatcttctcacttcacttaagggatcttccagaagatatctaaaagtctgtaataagcttagaagttcagataaatctaggcaggatactgcatttttgtggttttaaaaaagtccttaggacagactgaattatcataacttatggcatcaggaggaaactttaaaatatcaaggaatcactcagtcaccctcctgttttgttgaaggatcaaccccaaattctgggtatttgagtacatgtgaatcatggatttggtattcaactttttccctggatgctttggaatcgtgtcttccatgctccactgggttcaatttaaaataggagaggctttctcttctgaaagatccattttaggtctttttcaagaatagtgaacacattttttaacaaaataagttgtaattttaaaaggaaagttttgcctattttattaagatggaaatttctttttaggctaatttgaaatccaactgaagctttttaaccaatattttaaatttgaaccactagagttttttatgatgcaaatgattatgttgtctgaaaggtgtggttttattgaatgtctatttgagtatcatttaaaaagtatttgccttttactgtcatcatttctcttgttttattattattatcaatgtttatctatttttcaattaatttaatacagtttctaatgtgaaagacatttttctggaacccgttttccccttaaacactaaagagacctcaagtgaaagcatattgcttagtaggaaggtagaaaatgttaatccctgcgattctttgagttttaatgacagggtcattttcagtaaaggaaatgctcaccaacacatagtcaccaactattaaaggaatcatgtgattggattttcccctgtatacatgtacccttggtcataatcccactatttcatacatatttatgcattgctagattttcctaggactccaatagcatgctttccaagtgttattattcccttaatgttaaagaaaaaaatcaatatattgaattctttaattaaataggtaagcagtattaaatcatccacagagataaacaatctcttgaaactcttttgaaagagaaaagtgtttgttcactttcattgccttcattaagatctccaaatactcagagactaagcaggctattctcatctctttgagtttcctgacagaactaaaggaaggaatcactcttcaaaagatggatctcacttcactctgaaaatgtgcctttttttaattgggtgtttagcataaaaatcactattggggatcttacagatgtctgttgtagatctattacaatgaggtgacttagacattgggctttaccatattagagaattacttaagccattgtccttcaaatgttgggcttggagacagaagtaccttggactgaattgctttcaagtctctagaatcactgacagcacatagcttctatgaggagttatatatgaaataccacttgtgtccctcctcaagttctctgaccaccttcacatcctgcggccaccaacactgtatggatacaatctggcctctcagctctgctcactttcactttctgttctggggattctctgatactaattttggctacttggtagaaccaagagacaaatcgcttacatgctgcaaaccgatgtgaaggtgttactaacccgctaaaacacaattaatgaaagactgtagcaggtaactgatctttccctcagatattctacatggtccatggaagactctgtgggccgcagaagcccatagctgcatacccttctattttcctcttccccatttcactcttttaagctccctactcctattccctatgatcactttccaaaataaacggcaggtgtgctagctgttgtcttagactctgctttctggaaactatttttcccctccacaagaaattatcactgtgaatattacaggaggagaaataaaataagaataaatcagtggtttattttca

SEQ ID NO: 8431 - DNA, 565 bp, Homo sapiens
  source 1..565: mol_type = unassigned DNA
gtacaaaggattctcaggtcaatagctagattttactaaactggccctgaaaattttataattttgattctcaatagcagttttctgtactctagtctgtgagttactggggaacatttgaaggcaagaagaatagcagttaatacggcgtgccaccttctcaccatgcacactggattcgcaggaactgggaagtaacagccctccacagagaaactggaagggaattgctattgctctgctggtgattttagttgtatgctcactcatcactatgtcagtcatcctcttaaccccagatgaactcacaaattcgtcagaaaccagattgtctttggaagacctctttaggaaagactttgtgcttcacgatccagaggctcggtggatcaatgatacagatgtggtgtataaaagcgagaatggacatgtcattaaactgaatatagaaacaaatgctaccacattattattggaaaacacaacttttgtaaccttcaaagcatcaagacattcagtttcaccagatttaaaatatgtccttctggcatatgatgtcaaacag

SEQ ID NO: 8432 - DNA, 4646 bp, Homo sapiens
  source 1..4646: mol_type = unassigned DNA
ctctctatccttatactgacatctaatgaactcacaaattcgtcagaaaccagattgtctttggaagacctctttaggaaagactttgtgcttcacgatccagaggctcggtggatcaatgatacagatgtggtgtataaaagcgagaatggacatgtcattaaactgaatatagaaacaaatgctaccacattattattggaaaacacaacttttgtaaccttcaaagcatcaagacattcagtttcaccagatttaaaatatgtccttctggcatatgatgtcaaacagatttttcattattcgtatactgcttcatatgtgatttacaacatacacactagggaagtttgggagttaaatcctccagaagtagaggactccgtcttgcagtacgcggcctggggtgtccaagggcagcagctgatttatatttttgaaaataatatctactatcaacctgatataaagagcagttcattgcgactgacatcttctggaaaagaagaaataatttttaatgggattgctgactggttatatgaagaggaactcctgcattctcacatcgcccactggtggtcaccagatggagaaagacttgccttcctgatgataaatgactctttggtacccaccatggttatccctcggtttactggagcgttgtatcccaaaggaaagcagtatccgtatcctaaggcaggtcaagtgaacccaacaataaaattatatgttgtaaacctgtatggaccaactcacactttggagctcatgccacctgacagctttaaatcaagagaatactatatcactatggttaaatgggtaagcaataccaagactgtggtaagatggttaaaccgagctcagaacatctccatcctcacagtctgtgagaccactacaggtgcttgtagtaaaaaatatgagatgacatcagatacgtggctctctcagcagaatgaggagcccgtgttttctagagacggcagcaaattctttatgacagtgcctgttaagcaagggggacgtggagaatttcaccacgtagctatgttcctcatccagagtaaaagtgagcaaattaccgtgcggcatctgacatcaggaaactgggaagtgataaagatcttggcatacgatgaaactactcaaaaaatttactttctgagcactgaatcttctcccagaggaaggcagctgtacagtgcttctactgaaggattattgaatcgccaatgcatttcatgtaatttcatgaaagaacaatgtacatattttgatgccagttttagtcccatgaatcaacatttcttattattctgtgaaggtccaagggtcccagtggtcagcctacatagtacggacaacccagcaaaatattttatattggaaagcaattctatgctgaaggaagctatcctgaagaagaagataggaaagccagaaattaaaatccttcatattgacgactatgaacttcctttacagttgtcccttcccaaagattttatggaccgaaaccagtatgctcttctgttaataatggatgaagaaccaggaggccagctggttacagataagttccatattgactgggattccgtactcattgacatggataatgtcattgtagcaagatttgatggcagaggaagtggattccagggtctgaaaattttgcaggagattcatcgaagattaggttcagtagaagtaaaggaccaaataacagctgtgaaatttttgctgaaactgccttacattgactccaaaagattaagcatttttggaaagggttatggtggctatattgcatcaatgatcttaaaatcagatgaaaagctttttaaatgtggatccgtggttgcacctatcacagacttgaaattgtatgcctcagctttctctgaaagataccttgggatgccatctaaggaagaaagcacttaccaggcagccagtgtgctacataatgttcatggcttgaaagaagaaaatatattaataattcatggaactgctgacacaaaagttcatttccaacactcagcagaattaatcaagcacctaataaaagctggagtgaattatactatgcaggtctacccagatgaaggtcataacgtatctgagaagagcaagtatcatctctacagcacaatcctcaaattcttcagtgattgtttgaaggaagaaatatctgtgctaccacaggaaccagaagaagatgaataatggactgtatttatacagaactgaagggaatattgaggctcaatgaaacctgacaaagagactgtaatattgtagttgctccagaatgtcaagggcagcttacggagatgtcactggagcagcacgctcagagacagtgaactagcatttgaatacacaagtccaagtctactgtgttgctaggggtgcagaacccgtttctttgtatgagagaggtcaaagggttggtttcctgggagaaattagttttgcattaaagtaggagtagtgcatgttttcttctgttatccccctgtttgttctgtaactagttgctctcattttaatttcactggccaccatcatctttgcatataatgcacaatctatcatctgtcctacagtccctgatctttcatggctgagctgcaatctaacactttactgtacctttataataagtgcaattctttcattgtctattattatgcttaagaaaatattcagttaataaaaaacagagtattttatgtaatttctgtttttaaaaagacattattaaatgggtcaaaggacatatagaaatgtggatttcagcaccttccaaagttcagccagttatcagtagatacaatatctttaaatgaacacacgagtgtatgtctcacaatatatatacacaagtgtgcatatacagttaatgaaactatctttaaatgttattcatgctataaagagtaaacgtttgatgaattagaagagatgctcttttccaagctataatggatgctttgtttaatgagccaaatatgatgaaacattttttccaattcaaattctagctattgctttcctataaatgtttgggttgtgtttggtattgtttttagtggttaatagttttccagttgcatttaattttttgaatatgataccttgtcacatgtaaattagatacttaaatattaaattatagtttctgataaagaaattttgttaacaatgcaatgccactgagtgctattttgctcttttggtggagaaggcttttttcaaaactcttggtccttttacttctttctctcagtgcagaatcaattctcattttcatcgtaaaagcaaatagctggattatttcatttgccagtttctatttagtattccatgcctgcccaattcatctgttactgtttaatttcaattcttctggtgagaattagaaatgaaatattttttattcattggccaaaaagttcacagacagcagtgtttgctatttactttgaattgaaggcacaaaatgcatcaattcctgtgctgtgttgacttgcagtagtaagtaactgagagcataaaataaacctgactgtatgaagtcaatttaagtgatgagaacatttaactttggtgactaaagtcagaatatcttctcacttcacttaagggatcttccagaagatatctaaaagtctgtaataagcttagaagttcagataaatctaggcaggatactgcatttttgtggttttaaaaaagtccttaggacagactgaattatcataacttatggcatcaggaggaaactttaaaatatcaaggaatcactcagtcaccctcctgttttgttgaaggatcaaccccaaattctgggtatttgagtacatgtgaatcatggatttggtattcaactttttccctggatgctttggaatcgtgtcttccatgctccactgggttcaatttaaaataggagaggctttctcttctgaaagatccattttaggtctttttcaagaatagtgaacacattttttaacaaaataagttgtaattttaaaaggaaagttttgcctattttattaagatggaaatttctttttaggctaatttgaaatccaactgaagctttttaaccaatattttaaatttgaaccactagagttttttatgatgcaaatgattatgttgtctgaaaggtgtggttttattgaatgtctatttgagtatcatttaaaaagtatttgccttttactgtcatcatttctcttgttttattattattatcaatgtttatctatttttcaattaatttaatacagtttctaatgtgaaagacatttttctggaacccgttttccccttaaacactaaagagacctcaagtgaaagcatattgcttagtaggaaggtagaaaatgttaatccctgcgattctttgagttttaatgacagggtcattttcagtaaaggaaatgctcaccaacacatagtcaccaactattaaaggaatcatgtgattggattttcccctgtatacatgtacccttggtcataatcccactatttcatacatatttatgcattgctagattttcctaggactccaatagcatgctttccaagtgttattattcccttaatgttaa

SEQ ID NO: 8433 - DNA, 3883 bp, Homo sapiens
  source 1..3883: mol_type = unassigned DNA
aagacctagaaggctttaagaaagacagggtaatattttgctggtgtagagggcctgctcttcggagacaaatacttgcttttcattttgatcagccgtctgcacttaaaagcctcctagccagggacatgttaattaaacagtctggggctcagtgctgccatccgtaaattggaggattagagaaataatatacacaagtacctggtacataccaaatatgatagaagatatcttcaacctttagctataagaagaatggaaaatgaaaaagagacaggtggagagagggagggagatgagagctgcgtggagctggtatgctggttaggaggtaggaaataatgaggcctcgaccatctaagatacagaagtctccctgctgaatcgaaaggaagtgctacaatattctttcaaattcatcgcagttgagagaaaactggagcagagtgtgatatcaagaaagggcttcaccaggatgatcaatgcaaatggatatggagctttcttggaatgaaacattatcccgtaacaccaggtatacatacatgaagagtggcttcaggactggaactgggaagtaacagccctccacagagaaactggaagggaattgctattgctctgctggtgattttagttgtatgctcactcatcactatgtcagtcatcctcttaaccccagatgaactcacaaattcgtcagaaaccagattgtctttggaagacctctttaggaaagactttgtgcttcacgatccagaggctcggtggatcaatgatacagatgtggtgtataaaagcgagaatggacatgtcattaaactgaatatagaaacaaatgctaccacattattattggaaaacacaacttttgtaaccttcaaagcatcaagacattcagtttcaccagatttaaaatatgtccttctggcatatgatgtcaaacagatttttcattattcgtatactgcttcatatgtgatttacaacatacacactagggaagtttgggagttaaatcctccagaagtagaggactccgtcttgcagtacgcggcctggggtgtccaagggcagcagctgatttatatttttgaaaataatatctactatcaacctgatataaagagcagttcattgcgactgacatcttctggaaaagaagaaataatttttaatgggattgctgactggttatatgaagaggaactcctgcattctcacatcgcccactggtggtcaccagatggagaaagacttgccttcctgatgataaatgactctttggtacccaccatggttatccctcggtttactggagcgttgtatcccaaaggaaagcagtatccgtatcctaaggcaggtcaagtgaacccaacaataaaattatatgttgtaaacctgtatggaccaactcacactttggagctcatgccacctgacagctttaaatcaagagaatactatatcactatggttaaatgggtaagcaataccaagactgtggtaagatggttaaaccgagctcagaacatctccatcctcacagtctgtgagaccactacaggtgcttgtagtaaaaaatatgagatgacatcagatacgtggctctctcagcagaatgaggagcccgtgttttctagagacggcagcaaattctttatgacagtgcctgttaagcaagggggacgtggagaatttcaccacgtagctatgttcctcatccagagtaaaagtgagcaaattaccgtgcggcatctgacatcaggaaactgggaagtgataaagatcttggcatacgatgaaactactcaaaaaatttactttctgagcactgaatcttctcccagaggaaggcagctgtacagtgcttctactgaaggattattgaatcgccaatgcatttcatgtaatttcatgaaagaacaatgtacatattttgatgccagttttagtcccatgaatcaacatttcttattattctgtgaaggtccaagggtcccagtggtcagcctacatagtacggacaacccagcaaaatattttatattggaaagcaattctatgctgaaggaagctatcctgaagaagaagataggaaagccagaaattaaaatccttcatattgacgactatgaacttcctttacagttgtcccttcccaaagattttatggaccgaaaccagtatgctcttctgttaataatggatgaagaaccaggaggccagctggttacagataagttccatattgactgggattccgtactcattgacatggataatgtcattgtagcaagatttgatggcagaggaagtggattccagggtctgaaaattttgcaggagattcatcgaagattaggttcagtagaagtaaaggaccaaataacagctgtgaaatttttgctgaaactgccttacattgactccaaaagattaagcatttttggaaagggttatggtggctatattgcatcaatgatcttaaaatcagatgaaaagctttttaaatgtggatccgtggttgcacctatcacagacttgaaattgtatgcctcagctttctctgaaagataccttgggatgccatctaaggaagaaagcacttaccaggcagccagtgtgctacataatgttcatggcttgaaagaagaaaatatattaataattcatggaactgctgacacaaaagttcatttccaacactcagcagaattaatcaagcacctaataaaagctggagtgaattatactatgcaggtctacccagatgaaggtcataacgtatctgagaagagcaagtatcatctctacagcacaatcctcaaattcttcagtgattgtttgaaggaagaaatatctgtgctaccacaggaaccagaagaagatgaataatggactgtatttatacagaactgaagggaatattgaggctcaatgaaacctgacaaagagactgtaatattgtagttgctccagaatgtcaagggcagcttacggagatgtcactggagcagcacgctcagagacagtgaactagcatttgaatacacaagtccaagtctactgtgttgctaggggtgcagaacccgtttctttgtatgagagaggtcaaagggttggtttcctgggagaaattagttttgcattaaagtaggagtagtgcatgttttcttctgttatccccctgtttgttctgtaactagttgctctcattttaatttcactggccaccatcatctttgcatataatgcacaatctatcatctgtcctacagtccctgatctttcatggctgagctgcaatctaacactttactgtacctttataataagtgcaattctttcattgtctattattatgcttaagaaaatattcagttaataaaaaacagagtattttatgtaatttctgtttttaaaaagacattattaaatgggtcaaaggacatatagaaatgtggatttcagcaccttccaaagttcagccagttatcagtagatacaatatctttaaatgaacacacgagtgtatgtctcacaatatatatacacaagtgtgcatatacagttaatgaaactatctttaaatgttattcatgctataaagagtaaacgtttgatgaattagaagagatgctcttttccaagctataatggatgctttgtttaatgagccaaatatgatgaaacattttttccaattcaaattctagctattgctttcctataaatgtttgggttgtgtttggtattgtttttagtggttaatagttttccagttgcatttaattttttgaatatgataccttgtcacatgtaaattagatacttaaatattaaattatagtttctgataaagaaattttgttaacaa

SEQ ID NO: 8434 - DNA, 1389 bp, Homo sapiens
  source 1..1389: mol_type = unassigned DNA
gcgaacggagcagctgctgcagcagggcccatggcggacacccagtacatcctgcccaatgacatcggcgtgtctagcctggactgccgtgaggccttccgcctgctgtcacccacagagcgcctctatgcctaccacctgtcccgtgccgcctggtacggaggcctggctgtgctgcttcagacctcccctgaggccccctacatctatgctctgctcagccgcctcttccgcgcccaggaccccgaccagctgcgccaacatgccctggctgaaggccttaccgaggaggagtatcaggcgttcctggtctatgccgcgggtgtttactccaacatgggcaactacaagtcctttggtgacaccaagtttgttcccaacttgcccaaggaaaagctggaacgggtgatcctagggagtgaggctgctcagcagcacccagaagaagtcaggggcctctggcagacctgcggggagcttatgttctctctggagccaaggcttcgacacctcggactggggaaggagggaatcaccacctatttctctgggaattgtaccatggaagatgcccgggtccgcctcgaccgcagcaagatccggtctgtgggcaagcctgctctagagcgcttcctgcggagacttcaggtgctgaagtccacaggggatgtggccggagggcgggccctgtacgaggggtatgcaacagtcactgatgcgccccccgagtgcttcctcaccctcagggacacggtgctgctgcgtaaggaatctcggaagctcattgttcagcccaacactcgccttgaaggctcagacgtgcagcttctggaatacgaggcgtcagctgctggcctcatccgatccttctctgagcgtttcccagaggatggacccgagttggaggagatcctcacacagctggccacagccgatgcccgattctggaagggccccagtgaggccccatctggccaagcttgaggaagatgtgtggccttgcccccaattccatcagaccaaggctgcaagtggccctccattcgtgtgtgtatttaggggctggggagggggaggggcaggagcttggaccttggtactacctcagctgagggtggtgacacaaccccttccatttgtcagcactttccagcctgccaattgcttcccctctgtgatctcatttcatctgcactgccatacgtggagtgagcaagacagggcttaccatcctgtctaccagatgaggaaatggcagttctgagaagtcactggtctagatcccgcaggtggcacgtgacagctagggttcaaaacgttctcaccaaatccaatgctcctcacatattaattttataaccagacaaataaatattagagacaaccacc

SEQ ID NO: 8435 - DNA, 2687 bp, Homo sapiens
  source 1..2687: mol_type = unassigned DNA
aatgaatgggggagccggaagcaggaagtgagtttgcgaacggagcagctgctgcagcagggcccatggcggacacccagtacatcctgcccaatgacatcggcgtgtctagcctggactgccgtgaggccttccgcctgctgtcacccacagagcgcctctatgcctaccacctgtcccgtgccgcctggtacggaggcctggctgtgctgcttcagacctcccctgaggccccctacatctatgctctgctcagccgcctcttccgcgcccaggaccccgaccagctgcgccaacatgccctggctgaaggccttaccgaggaggagtatcaggcgttcctggtctatgccgcgggtgtttactccaacatgggcaactacaagtcctttggtgacaccaagtttgttcccaacttgcccaaggaaaagctggaacgggtgatcctagggagtgaggctgctcagcagcacccagaagaagtcaggggcctctggcagacctgcggggagcttatgttctctctggagccaaggcttcgacacctcggactggggaaggagggaatcaccacctatttctctgggaattgtaccatggaagatgccaaattggcccaggactttctggactcacagaacctcagtgcctacaacacccggctcttcaaagaggtcgatggagaagggaagccctactacgaggtgcggctggcttctgtgcttggctcagagccttccctggactctgaggtgacttccaagctgaagagctatgaattccggggaagccctttccaggtgacccggggggactacgcgcccatcctccagaaggtggtggagcagctggagaaagccaaggcctatgcagccaacagccaccaggggcagatgctggcccagtatatagagagcttcacccagggctccatcgaggcccacaagaggggctcccgcttctggatccaggacaaaggccccatcgtggagagttacatcgggttcatcgagagctaccgcgacccctttggttcccgaggagaatttgaaggtttcgtagctgtggtgaacaaggccatgagtgccaagtttgagcggctggtggcgagcgcagagcagctgctgaaggagctgccctggcccccaacctttgagaaggacaagttcctcacccctgacttcacctccctggatgttctcaccttcgctggctccggcatccctgccggcatcaacatccccaactacgatgatctgaggcagacggaaggctttaagaacgtgtcgctggggaatgtgctggctgtggcctacgccacgcagcgggagaagcttacctttctggaggaggatgacaaggacctgtacatcctctggaaggggccctccttcgatgtgcaggtgggcctgcacgagctgctgggccatggcagtggcaagctcttcgtacaggacgaaaaaggagcattcaactttgaccaggaaacagtgatcaacccagagacgggcgagcagattcagagctggtatcggagcggggagacctgggatagcaagttcagcaccatcgcctccagctacgaagagtgccgggctgagagcgtgggtctctacctctgtctccacccgcaagtgctggagatctttggctttgagggggctgatgcggaggacgtgatctacgtgaactggctcaacatggttcgggccgggctgctcgctctggagttctacacacctgaggccttcaactggcgacaggcccatatgcaggcccggtttgtgatcctgagagtcttgctggaggctggcgagggactcgttaccatcactcccaccacaggctccgatgggcgcccagatgcccgggtccgcctcgaccgcagcaagatccggtctgtgggcaagcctgctctagagcgcttcctgcggagacttcaggtgctgaagtccacaggggatgtggccggagggcgggccctgtacgaggggtatgcaacagtcactgatgcgccccccgagtgcttcctcaccctcagggacacggtgctgctgcgtaaggaatctcggaagctcattgttcagcccaacactcgccttgaaggctcagacgtgcagcttctggaatacgaggcgtcagctgctggcctcatccgatccttctctgagcgtttcccagaggatggacccgagttggaggagatcctcacacagctggccacagccgatgcccgattctggaagggccccagtgaggccccatctggccaagcttgaggaagatgtgtggccttgcccccaattccatcagaccaaggctgcaagtggccctccattcgtgtgtgtatttaggggctggggagggggaggggcaggagcttggaccttggtactacctcagctgagggtggtgacacaaccccttccatttgtcagcactttccagcctgccaattgcttcccctctgtgatctcatttcatctgcactgccatacgtggagtgagcaagacagggcttaccatcctgtctaccagatgaggaaatggcagttctgagaagtcactggtctagatcccgcaggtggcacgtgacagctagggttcaaaacgttctcaccaaatccaatgctcctcacatattaattttataaccagacaaataaatattagagacaaccaccatc

SEQ ID NO: 8436 - DNA, 2684 bp, Homo sapiens
  source 1..2684: mol_type = unassigned DNA
aatgaatgggggagccggaagcaggaagtgagtttgcgaacggagcagctgctgcagggcccatggcggacacccagtacatcctgcccaatgacatcggcgtgtctagcctggactgccgtgaggccttccgcctgctgtcacccacagagcgcctctatgcctaccacctgtcccgtgccgcctggtacggaggcctggctgtgctgcttcagacctcccctgaggccccctacatctatgctctgctcagccgcctcttccgcgcccaggaccccgaccagctgcgccaacatgccctggctgaaggccttaccgaggaggagtatcaggcgttcctggtctatgccgcgggtgtttactccaacatgggcaactacaagtcctttggtgacaccaagtttgttcccaacttgcccaaggaaaagctggaacgggtgatcctagggagtgaggctgctcagcagcacccagaagaagtcaggggcctctggcagacctgcggggagcttatgttctctctggagccaaggcttcgacacctcggactggggaaggagggaatcaccacctatttctctgggaattgtaccatggaagatgccaaattggcccaggactttctggactcacagaacctcagtgcctacaacacccggctcttcaaagaggtcgatggagaagggaagccctactacgaggtgcggctggcttctgtgcttggctcagagccttccctggactctgaggtgacttccaagctgaagagctatgaattccggggaagccctttccaggtgacccggggggactacgcgcccatcctccagaaggtggtggagcagctggagaaagccaaggcctatgcagccaacagccaccaggggcagatgctggcccagtatatagagagcttcacccagggctccatcgaggcccacaagaggggctcccgcttctggatccaggacaaaggccccatcgtggagagttacatcgggttcatcgagagctaccgcgacccctttggttcccgaggagaatttgaaggtttcgtagctgtggtgaacaaggccatgagtgccaagtttgagcggctggtggcgagcgcagagcagctgctgaaggagctgccctggcccccaacctttgagaaggacaagttcctcacccctgacttcacctccctggatgttctcaccttcgctggctccggcatccctgccggcatcaacatccccaactacgatgatctgaggcagacggaaggctttaagaacgtgtcgctggggaatgtgctggctgtggcctacgccacgcagcgggagaagcttacctttctggaggaggatgacaaggacctgtacatcctctggaaggggccctccttcgatgtgcaggtgggcctgcacgagctgctgggccatggcagtggcaagctcttcgtacaggacgaaaaaggagcattcaactttgaccaggaaacagtgatcaacccagagacgggcgagcagattcagagctggtatcggagcggggagacctgggatagcaagttcagcaccatcgcctccagctacgaagagtgccgggctgagagcgtgggtctctacctctgtctccacccgcaagtgctggagatctttggctttgagggggctgatgcggaggacgtgatctacgtgaactggctcaacatggttcgggccgggctgctcgctctggagttctacacacctgaggccttcaactggcgacaggcccatatgcaggcccggtttgtgatcctgagagtcttgctggaggctggcgagggactcgttaccatcactcccaccacaggctccgatgggcgcccagatgcccgggtccgcctcgaccgcagcaagatccggtctgtgggcaagcctgctctagagcgcttcctgcggagacttcaggtgctgaagtccacaggggatgtggccggagggcgggccctgtacgaggggtatgcaacagtcactgatgcgccccccgagtgcttcctcaccctcagggacacggtgctgctgcgtaaggaatctcggaagctcattgttcagcccaacactcgccttgaaggctcagacgtgcagcttctggaatacgaggcgtcagctgctggcctcatccgatccttctctgagcgtttcccagaggatggacccgagttggaggagatcctcacacagctggccacagccgatgcccgattctggaagggccccagtgaggccccatctggccaagcttgaggaagatgtgtggccttgcccccaattccatcagaccaaggctgcaagtggccctccattcgtgtgtgtatttaggggctggggagggggaggggcaggagcttggaccttggtactacctcagctgagggtggtgacacaaccccttccatttgtcagcactttccagcctgccaattgcttcccctctgtgatctcatttcatctgcactgccatacgtggagtgagcaagacagggcttaccatcctgtctaccagatgaggaaatggcagttctgagaagtcactggtctagatcccgcaggtggcacgtgacagctagggttcaaaacgttctcaccaaatccaatgctcctcacatattaattttataaccagacaaataaatattagagacaaccaccatc

SEQ ID NO: 8437 - DNA, 563 bp, Homo sapiens
  source 1..563: mol_type = unassigned DNA
gagaatgccccgggttggggaatccccgggttccaacggggctgtcagaccttcagtaaattgttgccctttccaagcctcagtttccctatctgtaaaatgggctttcttctggttgtgaacttctgtggcttccctggtggagcacagggagcgagcaggagaatggagggccaaggaaaaggcatttagagggatgagaatgggacagtttcaagcaaaatcatttattgctgtggatactttccgtccagggcgacttcatctgattagcgcacccacctgcagggcccatggcggacacccagtacatcctgcccaatgacatcggcgtgtctagcctggactgccgtgaggccttccgcctgctgtcacccacagagcgcctctatgcctaccacctgtcccgtgccgcctggtacggaggcctggctgtgctgcttcagacctcccctgaggccccctacatctatgctctgctcagccgcctcttccgcgcccaggaccccgaccagctgcgccaacatgccctggctgaaggccttaccgaggaggagtatcag

SEQ ID NO: 8438 - DNA, 733 bp, Homo sapiens
  source 1..733: mol_type = unassigned DNA
tacaatagtattcccttccacatgggcttttgggaggattaaatgagatcataagagttcagagccaggtatgcaattggtatggggtaaacaacagctgtgatgacagtgatggttctcagcagggcccatggcggacacccagtacatcctgcccaatgacatcggcgtgtctagcctggactgccgtgaggccttccgcctgctgtcacccacagagcgcctctatgcctaccacctgtcccgtgccgcctggtacggaggcctggctgtgctgcttcagacctcccctgaggccccctacatctatgctctgctcagccgcctcttccgcgcccaggaccccgaccagctgcgccaacatgccctggctgaaggccttaccgaggaggagtatcaggcgttcctggtctatgccgcgggtgtttactccaacatgggcaactacaagtcctttggtgacaccaagtttgttcccaacttgcccaaggaaaagctggaacgggtgatcctagggagtgaggctgctcagcagcacccagaagaagtcaggggcctctggcagacctgcggggagcttatgttctctctggagccaaggcttcgacacctcggactggggaaggagggaatcaccacctatttctctgggaattgtaccatggaagatgccaaattggcccaggactttctggactcacagaacctcagtgcctacaacacccggctcttc

SEQ ID NO: 8439 - DNA, 2974 bp, Homo sapiens
  source 1..2974: mol_type = unassigned DNA
attactcctattgtgtaggttcccacctgcaagagtgctgtcgggtcctctgaggtgaaaccccaaaggaaagcgggatcgggactgggggagggggattcccaagtccctgacacccgcgccgtctcggcctgggcttggtgacctcgtcagtcccgtctgccgggactaggccgcggccaggccgggcacagcggtacccggtccggcgcgtgtgcggcctgctgacaaaaggccgagcccgcagggccaatccgcgcgccaccccgtagcgcctgggggcgggagcgggcgagccgagaagctcgtcttggcgcgtctattggctggtactgacgcccatccggaccccgaggccaggcagttggccaaggggggcggggttcgcagagccccaatgaatgggggagccggaagcaggaagtgagtttgcgaacggagcagctgctgcagcagggcccatggcggacacccagtacatcctgcccaatgacatcggcgtgtctagcctggactgccgtgaggccttccgcctgctgtcacccacagagcgcctctatgcctaccacctgtcccgtgccgcctggtacggaggcctggctgtgctgcttcagacctcccctgaggccccctacatctatgctctgctcagccgcctcttccgcgcccaggaccccgaccagctgcgccaacatgccctggctgaaggccttaccgaggaggagtatcaggcgttcctggtctatgccgcgggtgtttactccaacatgggcaactacaagtcctttggtgacaccaagtttgttcccaacttgcccaaggaaaagctggaacgggtgatcctagggagtgaggctgctcagcagcacccagaagaagtcaggggcctctggcagacctgcggggagcttatgttctctctggagccaaggcttcgacacctcggactggggaaggagggaatcaccacctatttctctgggaattgtaccatggaagatgccaaattggcccaggactttctggactcacagaacctcagtgcctacaacacccggctcttcaaagaggtcgatggagaagggaagccctactacgaggtgcggctggcttctgtgcttggctcagagccttccctggactctgaggtgacttccaagctgaagagctatgaattccggggaagccctttccaggtgacccggggggactacgcgcccatcctccagaaggtggtggagcagctggagaaagccaaggcctatgcagccaacagccaccaggggcagatgctggcccagtatatagagagcttcacccagggctccatcgaggcccacaagaggggctcccgcttctggatccaggacaaaggccccatcgtggagagttacatcgggttcatcgagagctaccgcgacccctttggttcccgaggagaatttgaaggtttcgtagctgtggtgaacaaggccatgagtgccaagtttgagcggctggtggcgagcgcagagcagctgctgaaggagctgccctggcccccaacctttgagaaggacaagttcctcacccctgacttcacctccctggatgttctcaccttcgctggctccggcatccctgccggcatcaacatccccaactacgatgatctgaggcagacggaaggctttaagaacgtgtcgctggggaatgtgctggctgtggcctacgccacgcagcgggagaagcttacctttctggaggaggatgacaaggacctgtacatcctctggaaggggccctccttcgatgtgcaggtgggcctgcacgagctgctgggccatggcagtggcaagctcttcgtacaggacgaaaaaggagcattcaactttgaccaggaaacagtgatcaacccagagacgggcgagcagattcagagctggtatcggagcggggagacctgggatagcaagttcagcaccatcgcctccagctacgaagagtgccgggctgagagcgtgggtctctacctctgtctccacccgcaagtgctggagatctttggctttgagggggctgatgcggaggacgtgatctacgtgaactggctcaacatggttcgggccgggctgctcgctctggagttctacacacctgaggccttcaactggcgacaggcccatatgcaggcccggtttgtgatcctgagagtcttgctggaggctggcgagggactcgttaccatcactcccaccacaggctccgatgggcgcccagatgcccgggtccgcctcgaccgcagcaagatccggtctgtgggcaagcctgctctagagcgcttcctgcggagacttcaggtgctgaagtccacaggggatgtggccggagggcgggccctgtacgaggggtatgcaacagtcactgatgcgccccccgagtgcttcctcaccctcagggacacggtgctgctgcgtaaggaatctcggaagctcattgttcagcccaacactcgccttgaaggctcagacgtgcagcttctggaatacgaggcgtcagctgctggcctcatccgatccttctctgagcgtttcccagaggatggacccgagttggaggagatcctcacacagctggccacagccgatgcccgattctggaagggccccagtgaggccccatctggccaagcttgaggaagatgtgtggccttgcccccaattccatcagaccaaggctgcaagtggccctccattcgtgtgtgtatttaggggctggggagggggaggggcaggagcttggaccttggtactacctcagctgagggtggtgacacaaccccttccatttgtcagcactttccagcctgccaattgcttcccctctgtgatctcatttcatctgcactgccatacgtggagtgagcaagacagggcttaccatcctgtctaccagatgaggaaatggcagttctgagaagtcactggtctagatc

SEQ ID NO: 8440 - DNA, 3078 bp, Homo sapiens
  source 1..3078: mol_type = unassigned DNA
attactcctattgtgtaggttcccacctgcaagagtgctgtcgggtcctctgaggtgaaaccccaaaggaaagcgggatcgggactgggggagggggattcccaagtccctgacacccgcgccgtctcggcctgggcttggtgacctcgtcagtcccgtctgccgggactaggccgcggccaggccgggcacagcggtacccggtccggcgcgtgtgcggcctgctgacaaaaggccgagcccgcagggccaatccgcgcgccaccccgtagcgcctgggggcgggagcgggcgagccgagaagctcgtcttggcgcgtctattggctggtactgacgcccatccggaccccgaggccaggcagttggccaaggggggcggggttcgcagagccccaatgaatgggggagccggaagcaggaagtgagtttgcgaacggagcagctgctgcagggcccatggcggacacccagtacatcctgcccaatgacatcggcgtgtctagcctggactgccgtgaggccttccgcctgctgtcacccacagagcgcctctatgcctaccacctgtcccgtgccgcctggtacggaggcctggctgtgctgcttcagacctcccctgaggccccctacatctatgctctgctcagccgcctcttccgcgcccaggaccccgaccagctgcgccaacatgccctggctgaaggccttaccgaggaggagtatcaggcgttcctggtctatgccgcgggtgtttactccaacatgggcaactacaagtcctttggtgacaccaagtttgttcccaacttgcccaaggaaaagctggaacgggtgatcctagggagtgaggctgctcagcagcacccagaagaagtcaggggcctctggcagacctgcggggagcttatgttctctctggagccaaggcttcgacacctcggactggggaaggagggaatcaccacctatttctctgggaattgtaccatggaagatgccaaattggcccaggactttctggactcacagaacctcagtgcctacaacacccggctcttcaaagaggtcgatggagaagggaagccctactacgaggtgcggctggcttctgtgcttggctcagagccttccctggactctgaggtgacttccaagctgaagagctatgaattccggggaagccctttccaggtgacccggggggactacgcgcccatcctccagaaggtggtggagcagctggagaaagccaaggcctatgcagccaacagccaccaggggcagatgctggcccagtatatagagagcttcacccagggctccatcgaggcccacaagaggggctcccgcttctggatccaggacaaaggccccatcgtggagagttacatcgggttcatcgagagctaccgcgacccctttggttcccgaggagaatttgaaggtttcgtagctgtggtgaacaaggccatgagtgccaagtttgagcggctggtggcgagcgcagagcagctgctgaaggagctgccctggcccccaacctttgagaaggacaagttcctcacccctgacttcacctccctggatgttctcaccttcgctggctccggcatccctgccggcatcaacatccccaactacgatgatctgaggcagacggaaggctttaagaacgtgtcgctggggaatgtgctggctgtggcctacgccacgcagcgggagaagcttacctttctggaggaggatgacaaggacctgtacatcctctggaaggggccctccttcgatgtgcaggtgggcctgcacgagctgctgggccatggcagtggcaagctcttcgtacaggacgaaaaaggagcattcaactttgaccaggaaacagtgatcaacccagagacgggcgagcagattcagagctggtatcggagcggggagacctgggatagcaagttcagcaccatcgcctccagctacgaagagtgccgggctgagagcgtgggtctctacctctgtctccacccgcaagtgctggagatctttggctttgagggggctgatgcggaggacgtgatctacgtgaactggctcaacatggttcgggccgggctgctcgctctggagttctacacacctgaggccttcaactggcgacaggcccatatgcaggcccggtttgtgatcctgagagtcttgctggaggctggcgagggactcgttaccatcactcccaccacaggctccgatgggcgcccagatgcccgggtccgcctcgaccgcagcaagatccggtctgtgggcaagcctgctctagagcgcttcctgcggagacttcaggtgctgaagtccacaggggatgtggccggagggcgggccctgtacgaggggtatgcaacagtcactgatgcgccccccgagtgcttcctcaccctcagggacacggtgctgctgcgtaaggaatctcggaagctcattgttcagcccaacactcgccttgaaggctcagacgtgcagcttctggaatacgaggcgtcagctgctggcctcatccgatccttctctgagcgtttcccagaggatggacccgagttggaggagatcctcacacagctggccacagccgatgcccgattctggaagggccccagtgaggccccatctggccaagcttgaggaagatgtgtggccttgcccccaattccatcagaccaaggctgcaagtggccctccattcgtgtgtgtatttaggggctggggagggggaggggcaggagcttggaccttggtactacctcagctgagggtggtgacacaaccccttccatttgtcagcactttccagcctgccaattgcttcccctctgtgatctcatttcatctgcactgccatacgtggagtgagcaagacagggcttaccatcctgtctaccagatgaggaaatggcagttctgagaagtcactggtctagatcccgcaggtggcacgtgacagctagggttcaaaacgttctcaccaaatccaatgctcctcacatattaattttataaccagacaaataaatattagagacaaccacca

SEQ ID NO: 8441 - DNA, 2676 bp, Homo sapiens
  source 1..2676: mol_type = unassigned DNA
aggaagtgagtttgcgaacggagcagctgctgcagtgatggttctcagcagggcccatggcggacacccagtacatcctgcccaatgacatcggcgtgtctagcctggactgccgtgaggccttccgcctgctgtcacccacagagcgcctctatgcctaccacctgtcccgtgccgcctggtacggaggcctggctgtgctgcttcagacctcccctgaggccccctacatctatgctctgctcagccgcctcttccgcgcccaggaccccgaccagctgcgccaacatgccctggctgaaggccttaccgaggaggagtatcaggcgttcctggtctatgccgcgggtgtttactccaacatgggcaactacaagtcctttggtgacaccaagtttgttcccaacttgcccaaggaaaagctggaacgggtgatcctagggagtgaggctgctcagcagcacccagaagaagtcaggggcctctggcagacctgcggggagcttatgttctctctggagccaaggcttcgacacctcggactggggaaggagggaatcaccacctatttctctgggaattgtaccatggaagatgccaaattggcccaggactttctggactcacagaacctcagtgcctacaacacccggctcttcaaagaggtcgatggagaagggaagccctactacgaggtgcggctggcttctgtgcttggctcagagccttccctggactctgaggtgacttccaagctgaagagctatgaattccggggaagccctttccaggtgacccggggggactacgcgcccatcctccagaaggtggtggagcagctggagaaagccaaggcctatgcagccaacagccaccaggggcagatgctggcccagtatatagagagcttcacccagggctccatcgaggcccacaagaggggctcccgcttctggatccaggacaaaggccccatcgtggagagttacatcgggttcatcgagagctaccgcgacccctttggttcccgaggagaatttgaaggtttcgtagctgtggtgaacaaggccatgagtgccaagtttgagcggctggtggcgagcgcagagcagctgctgaaggagctgccctggcccccaacctttgagaaggacaagttcctcacccctgacttcacctccctggatgttctcaccttcgctggctccggcatccctgccggcatcaacatccccaactacgatgatctgaggcagacggaaggctttaagaacgtgtcgctggggaatgtgctggctgtggcctacgccacgcagcgggagaagcttacctttctggaggaggatgacaaggacctgtacatcctctggaaggggccctccttcgatgtgcaggtgggcctgcacgagctgctgggccatggcagtggcaagctcttcgtacaggacgaaaaaggagcattcaactttgaccaggaaacagtgatcaacccagagacgggcgagcagattcagagctggtatcggagcggggagacctgggatagcaagttcagcaccatcgcctccagctacgaagagtgccgggctgagagcgtgggtctctacctctgtctccacccgcaagtgctggagatctttggctttgagggggctgatgcggaggacgtgatctacgtgaactggctcaacatggttcgggccgggctgctcgctctggagttctacacacctgaggccttcaactggcgacaggcccatatgcaggcccggtttgtgatcctgagagtcttgctggaggctggcgagggactcgttaccatcactcccaccacaggctccgatgggcgcccagatgcccgggtccgcctcgaccgcagcaagatccggtctgtgggcaagcctgctctagagcgcttcctgcggagacttcaggtgctgaagtccacaggggatgtggccggagggcgggccctgtacgaggggtatgcaacagtcactgatgcgccccccgagtgcttcctcaccctcagggacacggtgctgctgcgtaaggaatctcggaagctcattgttcagcccaacactcgccttgaaggctcagacgtgcagcttctggaatacgaggcgtcagctgctggcctcatccgatccttctctgagcgtttcccagaggatggacccgagttggaggagatcctcacacagctggccacagccgatgcccgattctggaagggccccagtgaggccccatctggccaagcttgaggaagatgtgtggccttgcccccaattccatcagaccaaggctgcaagtggccctccattcgtgtgtgtatttaggggctggggagggggaggggcaggagcttggaccttggtactacctcagctgagggtggtgacacaaccccttccatttgtcagcactttccagcctgccaattgcttcccctctgtgatctcatttcatctgcactgccatacgtggagtgagcaagacagggcttaccatcctgtctaccagatgaggaaatggcagttctgagaagtcactggtctagatcccgcaggtggcacgtgacagctagggttcaaaacgttctcaccaaatccaatgctcctcacatattaattttataaccagacaaataaatattagagacaaccacca

SEQ ID NO: 8442 - DNA, 2403 bp, Homo sapiens
  source 1..2403: mol_type = unassigned DNA
agtttgcgaacggagcagctgctgcagggcccatggcggacacccagtacatcctgcccaatgacatcggcgtgtctagcctggactgccgtgaggccttccgcctgctgtcacccacagagcgcctctatgcctaccacctgtcccgtgccgcctcttccgcgcccaggaccccgaccagctgcgccaacatgccctggctgaaggccttaccgaggaggagtatcaggcgttcctggtctatgccgcgggtgtttactccaacatgggcaactacaagtcctttggtgacaccaagtttgttcccaacttgcccaaggaaaagctggaacgggtgatcctagggagtgaggctgctcagcagcacccagaagaagtcaggggcctctggcagacctgcggggagcttatgttctctctggagccaaggcttcgacacctcggactggggaaggagggaatcaccacctatttctctgggaattgtaccatggaagatgccaaattggcccaggactttctggactcacagaacctcagtgcctacaacacccggctcttcaaagaggtcgatggagaagggaagccctactacgaggtgcggctggcttctgtgcttggctcagagccttccctggactctgaggtgacttccaagctgaagagctatgaattccggggaagccctttccaggtgacccggggggactacgcgcccatcctccagaaggtggtggagcagctggagaaagccaaggcctatgcagccaacagccaccaggggcagatgctggcccagtatatagagagcttcacccagggctccatcgaggcccacaagaggggctcccgcttctggatccaggacaaaggccccatcgtggagagttacatcgggttcatcgagagctaccgcgacccctttggttcccgaggagaatttgaaggtttcgtagctgtggtgaacaaggccatgagtgccaagtttgagcggctggtggcgagcgcagagcagctgctgaaggagctgccctggcccccaacctttgagaaggacaagttcctcacccctgacttcacctccctggatgttctcaccttcgctggctccggcatccctgccggcatcaacatccccaactacgatgatctgaggcagacggaaggctttaagaacgtgtcgctggggaatgtgctggctgtggcctacgccacgcagcgggagaagcttacctttctggaggaggatgacaaggacctgtacatcctctggaaggggccctccttcgatgtgcaggtgggcctgcacgagctgctgggccatggcagtggcaagctcttcgtacaggacgaaaaaggagcattcaactttgaccaggaaacagtgatcaacccagagacgggcgagcagattcagagctggtatcggagcggggagacctgggatagcaagttcagcaccatcgcctccagctacgaagagtgccgggctgagagcgtgggtctctacctctgtctccacccgcaagtgctggagatctttggctttgagggggctgatgcggaggacgtgatctacgtgaactggctcaacatggttcgggccgggctgctcgctctggagttctacacacctgaggccttcaactggcgacaggcccatatgcaggcccggtttgtgatcctgagagtcttgctggaggctggcgagggactcgttaccatcactcccaccacaggctccgatgggcgcccagatgcccgggtccgcctcgaccgcagcaagatccggtctgtgggcaagcctgctctagagcgcttcctgcggagacttcaggtgctgaagtccacaggggatgtggccggagggcgggccctgtacgaggggtatgcaacagtcactgatgcgccccccgagtgcttcctcaccctcagggacacggtgctgctgcgtaaggaatctcggaagctcattgttcagcccaacactcgccttgaaggctcagacgtgcagcttctggaatacgaggcgtcagctgctggcctcatccgatccttctctgagcgtttcccagaggatggacccgagttggaggagatcctcacacagctggccacagccgatgcccgattctggaagggccccagtgaggccccatctggccaagcttgaggaagatgtgtggccttgcccccaattccatcagaccaaggctgcaagtggccctccattcgtgtgtgtatttaggggctggggagggggaggggcaggagcttggaccttggtactacctcagctgagggtggtgacacaaccccttccatttgtcagcactttccagcctgccaattgcttcccctctgtgatctcatttcatctgcactgccatacgtggagtgagc

SEQ ID NO: 8443 - DNA, 3768 bp, Homo sapiens
  source 1..3768: mol_type = unassigned DNA
tgcgccgtgggcgccgggccgggaggcgggcgaggaggcagcgcgcatcactcgggtccccttcctgcacccagccgccacttgccggttgctaagcagttatcattgtttctgtggcgattgcagaggctgttgctaattggagaagccccactaagcagcggcagcttcctgcttcggatcctctctctgctgcttgcatttaaagagcaaactcgtcttgtctacccaccctccctcccccatcctccccaaaatagccttgtgatttcggaagtatggactaaaatcacactcctccttaccttaccgcttggactctggtggctcccaactcgccgtcagaccccacctgccccggtggtgggaagcgcctggacagaccatgaccacagccaaggagccaagcgcttcggggaaatccgtgcagcagcaggaacaggagctggtggggagtaaccctccgcagaggaattggaaaggaatagcaattgcactgcttgtcattctggtcatctgctccttgatcgtcacctcggtcatacttctgacaccagcggaagataatagtctgtctcaaaagaagaaggtcactgtagaagatctcttcagtgaagacttcaaaattcatgaccccgaggctaagtggataagtgatacagaattcatctacagagaacagaaaggaacagtgagactgtggaatgttgaaacaaatacttctactgtcttaatagaaggcaaaaaaattgaatcattaagagccatcagatatgaaatatctccagatagagagtatgcacttttttcatacaatgtggaacccatatatcaacactcgtatactggatattacgtcctgagcaaaattcctcatggggatcctcaaagtctggacccaccagaagtcagcaatgcaaaacttcagtatgcaggatggggccctaaaggccaacagctgatatttatttttgaaaacaatatctactactgtgcacatgtcgggaaacaggccatccgtgtggtctccactggcaaggaaggtgtgatttacaatggcctcagtgactggctgtatgaagaggagattttgaagacacacatcgcacactggtggtctccggatggcacgagactcgcctacgccgccatcaatgattcccgtgtccccatcatggagctcccaacttacaccggctccatctaccccaccgtgaagccctaccactatcccaaggctggaagtgagaaccccagcatttccctacacgttattggcttaaatggacccacccatgatctggagatgatgccgcctgatgatccacggatgagggagtactacatcaccatggtgaagtgggccaccagcaccaaggtcgccgtgacctggctgaaccgggcgcagaacgtgtccatcctcaccctctgcgacgccaccacgggggtctgcacgaagaaacacgaggatgaaagtgaggcctggctccacagacagaatgaagaacctgtgttctccaaggatggccgaaagtttttcttcatcagagccatcccccagggaggacgagggaaattctatcacatcacggtgtcctcgtcccagcccaacagcagcaacgacaacatccagtccatcacctccggggactgggacgtgaccaagatcctagcctacgatgagaaggggaataagatctacttcctgagcacggaggacctgcctcggagacgacaactctacagtgccaacacggtgggcaacttcaacaggcagtgcctctcctgtgacctggttgagaactgcacctacttcagcgcttccttcagccatagcatggacttcttcctgctcaagtgcgaaggtcctggtgttcctatggtgacggtgcacaacacaacagataagaaaaaaatgtttgacctagaaacaaatgaacatgtcaagaaggccataaatgaccgacagatgcctaaagtggaatacagggacattgagattgatgattacaacctgcccatgcagatactgaagccagcaaccttcaccgacaccacccactaccctctgctcctggtggtggatggcaccccaggcagccagagtgtggctgagaagttcgaggtgagctgggagacggtgatggtgagcagccacggcgcggtggtggtaaagtgtgacggccgtggcagcggcttccaagggaccaagctcctgcacgaagtgaggcggcggctgggcttgctggaggagaaggaccagatggaggccgtgcggacgatgctgaaggagcagtacattgacaggacgcgcgtggccgtgtttgggaaggattacggtggctacctgagcacctacatcctcccagcaaagggagaaaatcaaggccagacattcacctgcggctctgctctctctccaataacagacttcaaactctatgcctctgcgttttccgagaggtacttgggcctccatggacttgacaacagagcatacgagatgaccaaggtagcccatcgagtctccgcgctggaagaacagcagttcctgatcattcatcccactgccgatgaaaaaattcatttccagcacacagcagaactcattacacaactaattaggggaaaggctaattacagcttacagatttacccggacgaaagccattactttaccagctccagcctcaaacagcatctgtaccggtccatcatcaacttcttcgtggaatgcttcaggatccaggacaaactgctgacagtcacagcgaaagaggacgaggaggaggactaagctcaggtcgctctaagcacaaacgtggctctttctacaaccagatgcaaccgagggatttccctgccctccctcttccctcggaggggcggggcggggcggggccgggtgttccatagcatgtgtgtctcggatgcggaaggcagttttgcttgggaaacaagctccttccccggggtcatcactcacggcctccatggcaccagggacaacgctgtccccgcagcagcgcctcctcccggcgcccgagagaccggcacgccacggcccctcccccaaggaacagagcaaaggatggtggccgcaggccccacgcgagcccacaggacaccggcccctagattccagccaccaagcggaagcatgagacccgcccacactagcctctgtgttcccgttagggacatcacaccctgtctcacgtcgcagtgccatggacgcagcagttacagcaccattgttttagcagtgcgtgttcatatatgggcttgctacttcctgtaatgaggacgttcaacatggtgaggggctacaagaaaacgcttttctgtacagagtcttactgtagctacgctaatggttaacctgatagaattaactcgtatttttctatggttttaacctgatgctccactgtctccgtcatggggttgttttgctgtttggggttgggccttgtttccctttcctttctccagtccacgtgtagactttgcgcttgatgaagaagcagatcggaagtaactgctccctcctcaaggttgtcttcagacgtcttggggacgttcctaaacactgagggggaagacagccaatagcacccattaaaagaaatacctaaataaaacctctctcccactcagctatgctagggcttggctgtaggtgtgcactgtctatttacatccgtccttacaaccatccttgtcctccttggtaccgtatcaagctctttcccatgacatttggtt

SEQ ID NO: 8444 - DNA, 3710 bp, Homo sapiens
  source 1..3710: mol_type = unassigned DNA
gcttgccttgctgctgctgctgctgctgcctccccaccgcctttttttttttttaatctggagcggggtggggagtgggaaccggagagaaagcaaaatattaaaaagccccaaagacagccagcaggagcgcggtgcccgatggcttcgctgtaccagaggttcactggcaagatcaacacctcgaggtccttccccgcgcccccggaggcgagtcacctcctgggcggccaggggcccgaggaggacggcggcgcaggagccaagcccctcggcccgcgggcgcaggcggcggcgccccgggagcgcggcggcggcggcggcggcgcgggtggccggccccggttccagtaccaggcgcggagcgatggtgacgaggaggacgagctggtggggagtaaccctccgcagaggaattggaaaggaatagcaattgcactgcttgtcattctggtcatctgctccttgatcgtcacctcggtcatacttctgacaccagcggaagataatagtctgtctcaaaagaagaaggtcactgtagaagatctcttcagtgaagacttcaaaattcatgaccccgaggctaagtggataagtgatacagaattcatctacagagaacagaaaggaacagtgagactgtggaatgttgaaacaaatacttctactgtcttaatagaaggcaaaaaaattgaatcattaagagccatcagatatgaaatatctccagatagagagtatgcacttttttcatacaatgtggaacccatatatcaacactcgtatactggatattacgtcctgagcaaaattcctcatggggatcctcaaagtctggacccaccagaagtcagcaatgcaaaacttcagtatgcaggatggggccctaaaggccaacagctgatatttatttttgaaaacaatatctactactgtgcacatgtcgggaaacaggccatccgtgtggtctccactggcaaggaaggtgtgatttacaatggcctcagtgactggctgtatgaagaggagattttgaagacacacatcgcacactggtggtctccggatggcacgagactcgcctacgccgccatcaatgattcccgtgtccccatcatggagctcccaacttacaccggctccatctaccccaccgtgaagccctaccactatcccaaggctggaagtgagaaccccagcatttccctacacgttattggcttaaatggacccacccatgatctggagatgatgccgcctgatgatccacggatgagggagtactacatcaccatggtgaagtgggccaccagcaccaaggtcgccgtgacctggctgaaccgggcgcagaacgtgtccatcctcaccctctgcgacgccaccacgggggtctgcacgaagaaacacgaggatgaaagtgaggcctggctccacagacagaatgaagaacctgtgttctccaaggatggccgaaagtttttcttcatcagagccatcccccagggaggacgagggaaattctatcacatcacggtgtcctcgtcccagcccaacagcagcaacgacaacatccagtccatcacctccggggactgggacgtgaccaagatcctagcctacgatgagaaggggaataagatctacttcctgagcacggaggacctgcctcggagacgacaactctacagtgccaacacggtgggcaacttcaacaggcagtgcctctcctgtgacctggttgagaactgcacctacttcagcgcttccttcagccatagcatggacttcttcctgctcaagtgcgaaggtcctggtgttcctatggtgacggtgcacaacacaacagataagaaaaaaatgtttgacctagaaacaaatgaacatgtcaagaaggccataaatgaccgacagatgcctaaagtggaatacagggacattgagattgatgattacaacctgcccatgcagatactgaagccagcaaccttcaccgacaccacccactaccctctgctcctggtggtggatggcaccccaggcagccagagtgtggctgagaagttcgaggtgagctgggagacggtgatggtgagcagccacggcgcggtggtggtaaagtgtgacggccgtggcagcggcttccaagggaccaagctcctgcacgaagtgaggcggcggctgggcttgctggaggagaaggaccagatggaggccgtgcggacgatgctgaaggagcagtacattgacaggacgcgcgtggccgtgtttgggaaggattacggtggctacctgagcacctacatcctcccagcaaagggagaaaatcaaggccagacattcacctgcggctctgctctctctccaataacagacttcaaactctatgcctctgcgttttccgagaggtacttgggcctccatggacttgacaacagagcatacgagatgaccaaggtagcccatcgagtctccgcgctggaagaacagcagttcctgatcattcatcccactgccgatgaaaaaattcatttccagcacacagcagaactcattacacaactaattaggggaaaggctaattacagcttacagatttacccggacgaaagccattactttaccagctccagcctcaaacagcatctgtaccggtccatcatcaacttcttcgtggaatgcttcaggatccaggacaaactgctgacagtcacagcgaaagaggacgaggaggaggactaagctcaggtcgctctaagcacaaacgtggctctttctacaaccagatgcaaccgagggatttccctgccctccctcttccctcggaggggcggggcggggcggggccgggtgttccatagcatgtgtgtctcggatgcggaaggcagttttgcttgggaaacaagctccttccccggggtcatcactcacggcctccatggcaccagggacaacgctgtccccgcagcagcgcctcctcccggcgcccgagagaccggcacgccacggcccctcccccaaggaacagagcaaaggatggtggccgcaggccccacgcgagcccacaggacaccggcccctagattccagccaccaagcggaagcatgagacccgcccacactagcctctgtgttcccgttagggacatcacaccctgtctcacgtcgcagtgccatggacgcagcagttacagcaccattgttttagcagtgcgtgttcatatatgggcttgctacttcctgtaatgaggacgttcaacatggtgaggggctacaagaaaacgcttttctgtacagagtcttactgtagctacgctaatggttaacctgatagaattaactcgtatttttctatggttttaacctgatgctccactgtctccgtcatggggttgttttgctgtttggggttgggccttgtttccctttcctttctccagtccacgtgtagactttgcgcttgatgaagaagcagatcggaagtaactgctccctcctcaaggttgtcttcagacgtcttggggacgttcctaaacactgagggggaagacagccaatagcacccattaaaagaaatacctaaataaaacctctctcccactcagctatgctagggcttggctgtaggtgtgcactgtctatttacatccgtccttacaaccatccttgtcctccttggtaccgtatcaagctctttcccatgacatttggtt

SEQ ID NO: 8445 - DNA, 4798 bp, Homo sapiens
  source 1..4798: mol_type = unassigned DNA
agttcagacagaaaacctggcgcgcgcgcgcgcacacacacacgcctcccctggcgtcgccgcccggccgggtccctgcccttagggaccagagcggcgaccgctgcaccccgcaccgcctgctggaggagcccccggagccggggccgagccgccggcgtccccgagtgcgccccctgtgcgtgccgccgcgctgttgctcgcagtgtgctggcgccgagctcggtggacacgcgcgcagtcagagctgcctctcgccctcgctagctgggctcgcagcctcttcctccctccctggctcctggctttttgtttaaagcaacacccaccctccatccaggctttttttctttctttctttattggtagcggccaaaaagagttgattgctattgggatccgctgagtaaagacacgggcaggggtgcgcggaggtgagaaaactgaagacctggaagatttttttttccttcaaaaacccgtttccatccagtcttcagccagtccagtctactttaatcctcaccaggacaatggattaagtttctcttccctggaccagaagtcgggttcggacttggggcaaaatgaaggaaaaggccatgatcaagaccgctaagatgcaggggaacgtgatggagctggtggggagtaaccctccgcagaggaattggaaaggaatagcaattgcactgcttgtcattctggtcatctgctccttgatcgtcacctcggtcatacttctgacaccagcggaagataatagtctgtctcaaaagaagaaggtcactgtagaagatctcttcagtgaagacttcaaaattcatgaccccgaggctaagtggataagtgatacagaattcatctacagagaacagaaaggaacagtgagactgtggaatgttgaaacaaatacttctactgtcttaatagaaggcaaaaaaattgaatcattaagagccatcagatatgaaatatctccagatagagagtatgcacttttttcatacaatgtggaacccatatatcaacactcgtatactggatattacgtcctgagcaaaattcctcatggggatcctcaaagtctggacccaccagaagtcagcaatgcaaaacttcagtatgcaggatggggccctaaaggccaacagctgatatttatttttgaaaacaatatctactactgtgcacatgtcgggaaacaggccatccgtgtggtctccactggcaaggaaggtgtgatttacaatggcctcagtgactggctgtatgaagaggagattttgaagacacacatcgcacactggtggtctccggatggcacgagactcgcctacgccgccatcaatgattcccgtgtccccatcatggagctcccaacttacaccggctccatctaccccaccgtgaagccctaccactatcccaaggctggaagtgagaaccccagcatttccctacacgttattggcttaaatggacccacccatgatctggagatgatgccgcctgatgatccacggatgagggagtactacatcaccatggtgaagtgggccaccagcaccaaggtcgccgtgacctggctgaaccgggcgcagaacgtgtccatcctcaccctctgcgacgccaccacgggggtctgcacgaagaaacacgaggatgaaagtgaggcctggctccacagacagaatgaagaacctgtgttctccaaggatggccgaaagtttttcttcatcagagccatcccccagggaggacgagggaaattctatcacatcacggtgtcctcgtcccagcccaacagcagcaacgacaacatccagtccatcacctccggggactgggacgtgaccaagatcctagcctacgatgagaaggggaataagatctacttcctgagcacggaggacctgcctcggagacgacaactctacagtgccaacacggtgggcaacttcaacaggcagtgcctctcctgtgacctggttgagaactgcacctacttcagcgcttccttcagccatagcatggacttcttcctgctcaagtgcgaaggtcctggtgttcctatggtgacggtgcacaacacaacagataagaaaaaaatgtttgacctagaaacaaatgaacatgtcaagaaggccataaatgaccgacagatgcctaaagtggaatacagggacattgagattgatgattacaacctgcccatgcagatactgaagccagcaaccttcaccgacaccacccactaccctctgctcctggtggtggatggcaccccaggcagccagagtgtggctgagaagttcgaggtgagctgggagacggtgatggtgagcagccacggcgcggtggtggtaaagtgtgacggccgtggcagcggcttccaagggaccaagctcctgcacgaagtgaggcggcggctgggcttgctggaggagaaggaccagatggaggccgtgcggacgatgctgaaggagcagtacattgacaggacgcgcgtggccgtgtttgggaaggattacggtggctacctgagcacctacatcctcccagcaaagggagaaaatcaaggccagacattcacctgcggctctgctctctctccaataacagacttcaaactctatgcctctgcgttttccgagaggtacttgggcctccatggacttgacaacagagcatacgagatgaccaaggtagcccatcgagtctccgcgctggaagaacagcagttcctgatcattcatcccactgccgatgaaaaaattcatttccagcacacagcagaactcattacacaactaattaggggaaaggctaattacagcttacagatttacccggacgaaagccattactttaccagctccagcctcaaacagcatctgtaccggtccatcatcaacttcttcgtggaatgcttcaggatccaggacaaactgctgacagtcacagcgaaagaggacgaggaggaggactaagctcaggtcgctctaagcacaaacgtggctctttctacaaccagatgcaaccgagggatttccctgccctccctcttccctcggaggggcggggcggggcggggccgggtgttccatagcatgtgtgtctcggatgcggaaggcagttttgcttgggaaacaagctccttccccggggtcatcactcacggcctccatggcaccagggacaacgctgtccccgcagcagcgcctcctcccggcgcccgagagaccggcacgccacggcccctcccccaaggaacagagcaaaggatggtggccgcaggccccacgcgagcccacaggacaccggcccctagattccagccaccaagcggaagcatgagacccgcccacactagcctctgtgttcccgttagggacatcacaccctgtctcacgtcgcagtgccatggacgcagcagttacagcaccattgttttagcagtgcgtgttcatatatgggcttgctacttcctgtaatgaggacgttcaacatggtgaggggctacaagaaaacgcttttctgtacagagtcttactgtagctacgctaatggttaacctgatagaattaactcgtatttttctatggttttaacctgatgctccactgtctccgtcatggggttgttttgctgtttggggttgggccttgtttccctttcctttctccagtccacgtgtagactttgcgcttgatgaagaagcagatcggaagtaactgctccctcctcaaggttgtcttcagacgtcttggggacgttcctaaacactgagggggaagacagccaatagcacccattaaaagaaatacctaaataaaacctctctcccactcagctatgctagggcttggctgtaggtgtgcactgtctatttacatccgtccttacaaccatccttgtcctccttggtaccgtatcaagctctttcccatgacatttggtttaaaaaaaaaaaaaaaaaaaaaaaaaaaacagaaaaaagacaaagcgtcaactccacccacaggcccgctgtgtgtgctcgggccacgggagtcctgagggttctgtgggcctgcgcgcatccctctcccatcgtgggggtggctccgtgaccttcctgccacgagcaggaggttgatgatgtgctacgttagccttgtaagatacacccccaccaaatgtgcagccggtgttcccagtgtatatttcattctcttgtatataaaggaagcaatgtgtgtcaggcctctgtgcagtcaacccagcctcctcccgccagtgctaaccccgtgttgagcctgcatgctgacactgtggccgatctggactctagaagtgctagtttgaaatatatccattactgtcatttccttttgagcttgtggacaagctgaatgtcaggactgacttcgccagctcccagccctgcgggggtgtccttggcatcccatcagcagaggagatgcgtccctgttgcattttggcgtttggggctttgggtttatccacatgagctctgaacgtccgttatagttagggtgattggaaggtctccatcactgggtgttttaaaggtgattcaccaccatttgtgaaaggaccaacgtgctgataaacaggaccgatccgagtgctacatgactgtgcgtttgctatttcaatgggcctgaacgactacaaagccagctaggtctggaaggggaagccagctctggccacgacatctggtcggagggaagtggggatgtggcatggtagcgtctgttcatccatggaataaaacattattttacca

SEQ ID NO: 8446 - DNA, 2388 bp, Homo sapiens
  source 1..2388: mol_type = unassigned DNA
aactcgccgtcagaccccacctgccccggtggtgggaagcgcctggacagaccatgaccacagccaaggagccaagcgcttcggggaaatccgtgcagcagcaggaacaggagctggtggggagtaaccctccgcagaggaattggaaaggaatagcaattgcactgcttgtcattctggtcatctgctccttgatcgtcacctcggtcatacttctgacaccagcggaagataatagtctgtctcaaaagaagaaggtcactgtagaagatctcttcagtgaagacttcaaaattcatgaccccgaggctaagtggataagtgatacagaattcatctacagagaacagaaaggaacagtgagactgtggaatgttgaaacaaatacttctactgtcttaatagaaggcaaaaaaattgaatcattaagagccatcagatatgaaatatctccagatagagagtatgcacttttttcatacaatgtggaacccatatttatttttgaaaacaatatctactactgtgcacatgtcgggaaacaggccatccgtgtggtctccactggcaaggaaggtgtgatttacaatggcctcagtgactggctgtatgaagaggagattttgaagacacacatcgcacactggtggtctccggatggcacgagactcgcctacgccgccatcaatgattcccgtgtccccatcatggagctcccaacttacaccggctccatctaccccaccgtgaagccctaccactatcccaaggctggaagtgagaaccccagcatttccctacacgttattggcttaaatggacccacccatgatctggagatgatgccgcctgatgatccacggatgagggagtactacatcaccatggtgaagtgggccaccagcaccaaggtcgccgtgacctggctgaaccgggcgcagaacgtgtccatcctcaccctctgcgacgccaccacgggggtctgcacgaagaaacacgaggatgaaagtgaggcctggctccacagacagaatgaagaacctgtgttctccaaggatggccgaaagtttttcttcatcagagccatcccccagggaggacgagggaaattctatcacatcacggtgtcctcgtcccagcccaacagcagcaacgacaacatccagtccatcacctccggggactgggacgtgaccaagatcctagcctacgatgagaaggggaataagatctacttcctgagcacggaggacctgcctcggagacgacaactctacagtgccaacacggtgggcaacttcaacaggcagtgcctctcctgtgacctggttgagaactgcacctacttcagcgcttccttcagccatagcatggacttcttcctgctcaagtgcgaaggtcctggtgttcctatggtgacggtgcacaacacaacagataagaaaaaaatgtttgacctagaaacaaatgaacatgtcaagaaggccataaatgaccgacagatgcctaaagtggaatacagggacattgagattgatgattacaacctgcccatgcagatactgaagccagcaaccttcaccgacaccacccactaccctctgctcctggtggtggatggcaccccaggcagccagagtgtggctgagaagttcgaggtgagctgggagacggtgatggtgagcagccacggcgcggtggtggtaaagtgtgacggccgtggcagcggcttccaagggaccaagctcctgcacgaagtgaggcggcggctgggcttgctggaggagaaggaccagatggaggccgtgcggacgatgctgaaggagcagtacattgacaggacgcgcgtggccgtgtttgggaaggattacggtggctacctgagcacctacatcctcccagcaaagggagaaaatcaaggccagacattcacctgcggctctgctctctctccaataacagacttcaaactctatgcctctgcgttttccgagaggtacttgggcctccatggacttgacaacagagcatacgagatgaccaaggtagcccatcgagtctccgcgctggaagaacagcagttcctgatcattcatcccactgccgatgaaaaaattcatttccagcacacagcagaactcattacacaactaattaggggaaaggctaattacagcttacagatttacccggacgaaagccattactttaccagctccagcctcaaacagcatctgtaccggtccatcatcaacttcttcgtggaatgcttcaggatccaggacaaactgctgacagtcacagcgaaagaggacgaggaggaggactaagctcaggtcgctctaagcacaaacgtggctctttctacaaccagatgcaaccgaggga

SEQ ID NO: 8447 - DNA, 3139 bp, Homo sapiens
  source 1..3139: mol_type = unassigned DNA
gcaacgaaccggaagtgctaaagcctccgaggccaaggccgctgctactgccgccgctgcttcttagtgccgcgttcgccgcctgggttgtcaccggcgccgccgccgaggaagccactgcaaccaggaccggagtggaggcggcgcagcatgaagcggcgcaggcccgctccatagcgcacgtcgggacggtccgggcggggccggggggaaggaaaatgcaacatggcagcagcaatggaaacagaacagctgggtgttgagatatttgaaactgcggactgtgaggagaatattgaatcacaggatcggcctaaattggagcctttttatgttgagcggtattcctggagtcagcttaaaaagctgcttgccgataccagaaaatatcatggctacatgatggctaaggcaccacatgatttcatgtttgtgaagaggaatgatccagatggacctcattcagacagaatctattaccttgccatgtctggtgagaacagagaaaatacactgttttattctgaaattcccaaaactatcaatagagcagcagtcttaatgctctcttggaagcctcttttggatctttttcaggcaacactggactatggaatgtattctcgagaagaagaactattaagagaaagaaaacgcattggaacagtcggaattgcttcttacgattatcaccaaggaagtggaacatttctgtttcaagccggtagtggaatttatcacgtaaaagatggagggccacaaggatttacgcaacaacctttaaggcccaatctagtggaaactagttgtcccaacatacggatggatccaaaattatgccctgctgatccagactggattgcttttatacatagcaacgatatttggatatctaacatcgtaaccagagaagaaaggagactcacttatgtgcacaatgagctagccaacatggaagaagatgccagatcagctggagtcgctacctttgttctccaagaagaatttgatagatattctggctattggtggtgtccaaaagctgaaacaactcccagtggtggtaaaattcttagaattctatatgaagaaaatgatgaatctgaggtggaaattattcatgttacatcccctatgttggaaacaaggagggcagattcattccgttatcctaaaacaggtacagcaaatcctaaagtcacttttaagatgtcagaaataatgattgatgctgaaggaaggatcatagatgtcatagataaggaactaattcaaccttttgagattctatttgaaggagttgaatatattgccagagctggatggactcctgagggaaaatatgcttggtccatcctactagatcgctcccagactcgcctacagatagtgttgatctcacctgaattatttatcccagtagaagatgatgttatggaaaggcagagactcattgagtcagtgcctgattctgtgacgccactaattatctatgaagaaacaacagacatctggataaatatccatgacatctttcatgtttttccccaaagtcacgaagaggaaattgagtttatttttgcctctgaatgcaaaacaggtttccgtcatttatacaaaattacatctattttaaaggaaagcaaatataaacgatccagtggtgggctgcctgctccaagtgatttcaagtgtcctatcaaagaggagatagcaattaccagtggtgaatgggaagttcttggccggcatggatctaatatccaagttgatgaagtcagaaggctggtatattttgaaggcaccaaagactcccctttagagcatcacctgtacgtagtcagttacgtaaatcctggagaggtgacaaggctgactgaccgtggctactcacattcttgctgcatcagtcagcactgtgacttctttataagtaagtatagtaaccagaagaatccacactgtgtgtccctttacaagctatcaagtcctgaagatgacccaacttgcaaaacaaaggaattttgggccaccattttggattcagcaggtcctcttcctgactatactcctccagaaattttctcttttgaaagtactactggatttacattgtatgggatgctctacaagcctcatgatctacagcctggaaagaaatatcctactgtgctgttcatatatggtggtcctcaggtgcagttggtgaataatcggtttaaaggagtcaagtatttccgcttgaataccctagcctctctaggttatgtggttgtagtgatagacaacaggggatcctgtcaccgagggcttaaatttgaaggcgcctttaaatataaaatgggtcaaatagaaattgacgatcaggtggaaggactccaatatctagcttctcgatatgatttcattgacttagatcgtgtgggcatccacggctggtcctatggaggatacctctccctgatggcattaatgcagaggtcagatatcttcagggttgctattgctggggccccagtcactctgtggatcttctatgatacaggatacacggaacgttatatgggtcaccctgaccagaatgaacagggctattacttaggatctgtggccatgcaagcagaaaagttcccctctgaaccaaatcgtttactgctcttacatggtttcctggatgagaatgtccattttgcacataccagtatattactgagttttttagtgagggctggaaagccatatgatttacagatctatcctcaggagagacacagcataagagttcctgaatcgggagaacattatgaactgcatcttttgcactaccttcaagaaaaccttggatcacgtattgctgctctaaaagtgatataattttgacctgtgtagaactctctggtatacactggctatttaaccaaatgaggaggtttaatcaacagaaaacacagaattgatcatcacattttgatacctgccatgtaacatctactcctgaaaataaatgtggtgccatgcaggggtctacggtttgtggtagtaatctaataccttaaccccacatgctcaaaatcaaatgatacatattcctgagagacccagcaataccataagaattactaaaaaaaaaaaaaaaaaa

SEQ ID NO: 8448 - DNA, 3099 bp, Homo sapiens
  source 1..3099: mol_type = unassigned DNA
gaagtgctaaagcctccgaggccaaggccgctgctactgccgccgctgcttcttagtgccgcgttcgccgcctgggttgtcaccggcgccgccgccgaggaagccactgcaaccaggaccggagtggaggcggcgcagcatgaagcggcgcaggcccgctccatagcgcacgtcgggacggtccgggcggggccggggggaaggctttgatggtgaggaaaggaaagattcctgtgagaagagcaggatgagcagagggattctatgcttgaagtcgagtcacttgaaaaagatctctttgaatgtggaagagatctgagcagatgaaaataaaatcaggaaaatgcaacatggcagcagcaatggaaacagaacagctgggtgttgagatatttgaaactgcggactgtgaggagaatattgaatcacaggatcggcctaaattggagcctttttatgttgagcggtattcctggagtcagcttaaaaagctgcttgccgataccagaaaatatcatggctacatgatggctaaggcaccacatgatttcatgtttgtgaagaggaatgatccagatggacctcattcagacagaatctattaccttgccatgtctggtgagaacagagaaaatacactgttttattctgaaattcccaaaactatcaatagagcagcagtcttaatgctctcttggaagcctcttttggatctttttcaggcaacactggactatggaatgtattctcgagaagaagaactattaagagaaagaaaacgcattggaacagtcggaattgcttcttacgattatcaccaaggaagtggaacatttctgtttcaagccggtagtggaatttatcacgtaaaagatggagggccacaaggatttacgcaacaacctttaaggcccaatctagtggaaactagttgtcccaacatacggatggatccaaaattatgccctgctgatccagactggattgcttttatacatagcaacgatatttggatatctaacatcgtaaccagagaagaaaggagactcacttatgtgcacaatgagctagccaacatggaagaagatgccagatcagctggagtcgctacctttgttctccaagaagaatttgatagatattctggctattggtggtgtccaaaagctgaaacaactcccagtggtggtaaaattcttagaattctatatgaagaaaatgatgaatctgaggtggaaattattcatgttacatcccctatgttggaaacaaggagggcagattcattccgttatcctaaaacaggtacagcaaatcctaaagtcacttttaagatgtcagaaataatgattgatgctgaaggaaggatcatagatgtcatagataaggaactaattcaaccttttgagattctatttgaaggagttgaatatattgccagagctggatggactcctgagggaaaatatgcttggtccatcctactagatcgctcccagactcgcctacagatagtgttgatctcacctgaattatttatcccagtagaagatgatgttatggaaaggcagagactcattgagtcagtgcctgattctgtgacgccactaattatctatgaagaaacaacagacatctggataaatatccatgacatctttcatgtttttccccaaagtcacgaagaggaaattgagtttatttttgcctctgaatgcaaaacaggtttccgtcatttatacaaaattacatctattttaaaggaaagcaaatataaacgatccagtggtgggctgcctgctccaagtgatttcaagtgtcctatcaaagaggagatagcaattaccagtggtgaatgggaagttcttggccggcatggatctaatatccaagttgatgaagtcagaaggctggtatattttgaaggcaccaaagactcccctttagagcatcacctgtacgtagtcagttacgtaaatcctggagaggtgacaaggctgactgaccgtggctactcacattcttgctgcatcagtcagcactgtgacttctttataagtaagtatagtaaccagaagaatccacactgtgtgtccctttacaagctatcaagtcctgaagatgacccaacttgcaaaacaaaggaattttgggccaccattttggattcagcaggtcctcttcctgactatactcctccagaaattttctcttttgaaagtactactggatttacattgtatgggatgctctacaagcctcatgatctacagcctggaaagaaatatcctactgtgctgttcatatatggtggtcctcagggtcaaatagaaattgacgatcaggtggaaggactccaatatctagcttctcgatatgatttcattgacttagatcgtgtgggcatccacggctggtcctatggaggatacctctccctgatggcattaatgcagaggtcagatatcttcagggttgctattgctggggccccagtcactctgtggatcttctatgatacaggatacacggaacgttatatgggtcaccctgaccagaatgaacagggctattacttaggatctgtggccatgcaagcagaaaagttcccctctgaaccaaatcgtttactgctcttacatggtttcctggatgagaatgtccattttgcacataccagtatattactgagttttttagtgagggctggaaagccatatgatttacagatctatcctcaggagagacacagcataagagttcctgaatcgggagaacattatgaactgcatcttttgcactaccttcaagaaaaccttggatcacgtattgctgctctaaaagtgatataattttgacctgtgtagaactctctggtatacactggctatttaaccaaatgaggaggtttaatcaacagaaaacacagaattgatcatcacattttgatacctgccatgtaacatctactcctgaaaataaatgtggtgccatgcaggggtctacggtttgtggtagtaatctaataccttaaccccacatgctcaaaatcaaatgatacatattcctgagagacccagcaataccataagaattact

SEQ ID NO: 8449 - DNA, 3125 bp, Homo sapiens
  source 1..3125: mol_type = unassigned DNA
ggatcgcaacgaaccggaagtgctaaagcctccgaggccaaggccgctgctactgccgccgctgcttcttagtgccgcgttcgccgcctgggttgtcaccggcgccgccgccgaggaagccactgcaaccaggaccggagtggaggcggcgcagcatgaagcggcgcaggcccgctccatagcgcacgtcgggacggtccgggcggggccggggggaaggctttgatggtgaggaaaggaaagattcctgtgagaagagcaggatgagcagagggattctatgcttgaagtcgagtcacttgaaaaagatctctttgaatgtggaagagatctgagcagatgaaaataaaatcaggaaaatgcaacatggcagcagcaatggaaacagaacagctgggtgttgagatatttgaaactgcggactgtgaggagaatattgaatcacaggatcggcctaaattggagcctttttatgttgagcggtattcctggagtcagcttaaaaagctgcttgccgataccagaaaatatcatggctacatgatggctaaggcaccacatgatttcatgtttgtgaagaggaatgatccagatggacctcattcagacagaatctattaccttgccatgtctggtgagaacagagaaaatacactgttttattctgaaattcccaaaactatcaatagagcagcagtcttaatgctctcttggaagcctcttttggatctttttcaggcaacactggactatggaatgtattctcgagaagaagaactattaagagaaagaaaacgcattggaacagtcggaattgcttcttacgattatcaccaaggaagtggaacatttctgtttcaagccggtagtggaatttatcacgtaaaagatggagggccacaaggatttacgcaacaacctttaaggcccaatctagtggaaactagttgtcccaacatacggatggatccaaaattatgccctgctgatccagactggattgcttttatacatagcaacgatatttggatatctaacatcgtaaccagagaagaaaggagactcacttatgtgcacaatgagctagccaacatggaagaagatgccagatcagctggagtcgctacctttgttctccaagaagaatttgatagatattctggctattggtggtgtccaaaagctgaaacaactcccagtggtggtaaaattcttagaattctatatgaagaaaatgatgaatctgaggtggaaattattcatgttacatcccctatgttggaaacaaggagggcagattcattccgttatcctaaaacaggtacagcaaatcctaaagtcacttttaagatgtcagaaataatgattgatgctgaaggaaggatcatagatgtcatagataaggaactaattcaaccttttgagattctatttgaaggagttgaatatattgccagagctggatggactcctgagggaaaatatgcttggtccatcctactagatcgctcccagactcgcctacagatagtgttgatctcacctgaattatttatcccagtagaagatgatgttatggaaaggcagagactcattgagtcagtgcctgattctgtgacgccactaattatctatgaagaaacaacagacatctggataaatatccatgacatctttcatgtttttccccaaagtcacgaagaggaaattgagtttatttttgcctctgaatgcaaaacaggtttccgtcatttatacaaaattacatctattttaaaggaaagcaaatataaacgatccagtggtgggctgcctgctccaagtgatttcaagtgtcctatcaaagaggagatagcaattaccagtggtgaatgggaagttcttggccggcatggatctaatatccaagttgatgaagtcagaaggctggtatattttgaaggcaccaaagactcccctttagagcatcacctgtacgtagtcagttacgtaaatcctggagaggtgacaaggctgactgaccgtggctactcacattcttgctgcatcagtcagcactgtgacttctttataagtaagtatagtaaccagaagaatccacactgtgtgtccctttacaagctatcaagtcctgaagatgacccaacttgcaaaacaaaggaattttgggccaccattttggattcagcaggtcctcttcctgactatactcctccagaaattttctcttttgaaagtactactggatttacattgtatgggatgctctacaagcctcatgatctacagcctggaaagaaatatcctactgtgctgttcatatatggtggtcctcaggtgcagttggtgaataatcggtttaaaggagtcaagtatttccgcttgaataccctagcctctctaggttatgtggttgtagtgatagacaacaggggatcctgtcaccgagggcttaaatttgaaggcgcctttaaatataaaatggttgctattgctggggccccagtcactctgtggatcttctatgatacaggatacacggaacgttatatgggtcaccctgaccagaatgaacagggctattacttaggatctgtggccatgcaagcagaaaagttcccctctgaaccaaatcgtttactgctcttacatggtttcctggatgagaatgtccattttgcacataccagtatattactgagttttttagtgagggctggaaagccatatgatttacagatctatcctcaggagagacacagcataagagttcctgaatcgggagaacattatgaactgcatcttttgcactaccttcaagaaaaccttggatcacgtattgctgctctaaaagtgatataattttgacctgtgtagaactctctggtatacactggctatttaaccaaatgaggaggtttaatcaacagaaaacacagaattgatcatcacattttgatacctgccatgtaacatctactcctgaaaataaatgtggtgccatgcaggggtctacggtttgtggtagtaatctaataccttaaccccacatgctcaaaatcaaatgatacatattcctgagagacccagcaataccataagaattactaaaaaaaaaaaaaaaa

SEQ ID NO: 8450 - DNA, 2727 bp, Homo sapiens
  source 1..2727: mol_type = unassigned DNA
gaagtgctaaagcctccgaggccaaggccgctgctactgccgccgctgcttcttagtgccgcgttcgccgcctgggttgtcaccggcgccgccgccgaggaagccactgcaaccaggaccggagtggaggcggcgcagcatgaagcggcgcaggcccgctccatagcgcacgtcgggacggtccgggcggggccggggggaaggctttgatggtgaggaaaggaaagattcctgtgagaagagcaggatgagcagagggattctatgcttgaagtcgagtcacttgaaaaagatctctttgaatgtggaagagatctgagcagatgaaaataaaatcaggaaaatgcaacatggcagcagcaatggaaacagaacagctgggtgttgagatatttgaaactgcggactgtgaggagaatattgaatcacaggatcggcctaaattggagcctttttatgttgagcggtattcctggagtcagcttaaaaagctgcttgccgataccagaaaatatcatggctacatgatggctaaggcaccacatgatttcatgtttgtgaagaggaatgatccagatggacctcattcagacagaatctattaccttgccatgtctggtgagaacagagaaaatacactgttttattctgaaattcccaaaactatcaatagagcagcagtcttaatgctctcttggaagcctcttttggatctttttcaggcaacactggactatggaatgtattctcgagaagaagaactattaagagaaagaaaacgcattggaacagtcggaattgcttcttacgattatcaccaaggaagtggaacatttctgtttcaagccggtagtggaatttatcacgtaaaagatggagggccacaaggatttacgcaacaacctttaaggcccaatctagtggaaactagttgtcccaacatacggatggatccaaaattatgccctgctgatccagactggattgcttttatacatagcaacgatatttggatatctaacatcgtaaccagagaagaaaggagactcacttatgtgcacaatgagctagccaacatggaagaagatgccagatcagctggagtcgctacctttgttctccaagaagaatttgatagatattctggctattggtggtgtccaaaagctgaaacaactcccagtggtggtaaaattcttagaattctatatgaagaaaatgatgaatctgaggtggaaattattcatgttacatcccctatgttggaaacaaggagggcagattcattccgttatcctaaaacaggtacagcaaatcctaaagtcacttttaagatgtcagaaataatgattgatgctgaaggaaggatccaagttgatgaagtcagaaggctggtatattttgaaggcaccaaagactcccctttagagcatcacctgtacgtagtcagttacgtaaatcctggagaggtgacaaggctgactgaccgtggctactcacattcttgctgcatcagtcagcactgtgacttctttataagtaagtatagtaaccagaagaatccacactgtgtgtccctttacaagctatcaagtcctgaagatgacccaacttgcaaaacaaaggaattttgggccaccattttggattcagcaggtcctcttcctgactatactcctccagaaattttctcttttgaaagtactactggatttacattgtatgggatgctctacaagcctcatgatctacagcctggaaagaaatatcctactgtgctgttcatatatggtggtcctcaggtgcagttggtgaataatcggtttaaaggagtcaagtatttccgcttgaataccctagcctctctaggttatgtggttgtagtgatagacaacaggggatcctgtcaccgagggcttaaatttgaaggcgcctttaaatataaaatgggtcaaatagaaattgacgatcaggtggaaggactccaatatctagcttctcgatatgatttcattgacttagatcgtgtgggcatccacggctggtcctatggaggatacctctccctgatggcattaatgcagaggtcagatatcttcagggttgctattgctggggccccagtcactctgtggatcttctatgatacaggatacacggaacgttatatgggtcaccctgaccagaatgaacagggctattacttaggatctgtggccatgcaagcagaaaagttcccctctgaaccaaatcgtttactgctcttacatggtttcctggatgagaatgtccattttgcacataccagtatattactgagttttttagtgagggctggaaagccatatgatttacagatctatcctcaggagagacacagcataagagttcctgaatcgggagaacattatgaactgcatcttttgcactaccttcaagaaaaccttggatcacgtattgctgctctaaaagtgatataattttgacctgtgtagaactctctggtatacactggctatttaaccaaatgaggaggtttaatcaacagaaaacacagaattgatcatcacattttgatacctgccatgtaacatctactcctgaaaataaatgtggtgccatgcaggggtctacggtttgtggtagtaatctaataccttaaccccacatgctcaaaatcaaatgatacatattcctgagagacccagcaataccataagaattact

SEQ ID NO: 8451 - DNA, 8699 bp, Homo sapiens
  source 1..8699: mol_type = unassigned DNA
agattccgagtcaaccaccgttcactgggcgccccttgagctctgggcgctggcctcctggcttccacgtccgttatcttaattgagtctcgctggggttgggaggccgggtattgtcagcgcttacagatgaggaaacggaagcccacagaggcgaagggattttccttaagtccgacttggcagatgggcttcggcctcagattttctggtttttcagctggtggtcttttttctctcctgcctcatgctaggtcgattccctccctgctcactgccctctcccattctgttccacccactcgcagcaggacactttcctttcctgccacacctgtcttctcacacacttttcttctaagacttggcattcctcccatctctcttctcaatattctctgctatgcctctcctcttgttcctcattcatagtttttcaaggtctttgccccctctgtgctattgaatctctcaactaggtgtggaccctaaagaatgagatagctaggcttcagtgaggctttaggtgtttaagtggacggctgtttggcccttgagttaaaaattaaggaatttcacttgagtggatccaaactcaagagtcctaaagctattttctgagtcaacatgctctatttctgagtgaggggcttagtgctatgaggtgtcttgacatcttagtccattgttgctgtgctggcataacctcgctgtttttcctgcacttgccacttagcttttcccaccccatcccttcatcacctacttgggctatgggagcccaaaattaaaacttatagagtaacagatgtaatagcagaccttcctttttttttttttcctaagccagaatttcaacaagtttaatgcttctttttccagaaaagttacctatttaaattattctcagagtaatgcagcaagaaaatggaatgcacttaagatgaatagaaaattgtttatctcgtgaaaagtcttaagttattaaattcaagttaattccctttctgcaaaaatggcctgtaactcttactggctatcctcctgagttaattctatctccatccagcttgatatgacattattatgtaaaagaggaacaggaataggcacataaaaataaattttattaatcatatgccgtttttgatgatttgcaatagtcactgagtaacttcacatctgtatgccttttgtaactttttaaagcctttccatggttttcctttgtctggacaccaaagtttgctatgttaggatattcttttgactatattgggctacacatctctgaaataaaataattcttgaattctgataacataaaacgcagatacaaaataatgtaggcattatatattgccccaaaaagtgatattttggtatcagttttaactactattttggggcttctctttttggccacatatggtccatcttaatgatcaaagtcttatcttatttcattatcctggtgagcaggctttgatggtgaggaaaggaaagattcctgtgagaagagcaggatgagcagagggattctatgcttgaagtcgagtcacttgaaaaagatctctttgaatgtggaagagatctgagcagatgaaaataaaatcaggaaaatgcaacatggcagcagcaatggaaacagaacagctgggtgttgagatatttgaaactgcggactgtgaggagaatattgaatcacaggatcggcctaaattggagcctttttatgttgagcggtattcctggagtcagcttaaaaagctgcttgccgataccagaaaatatcatggctacatgatggctaaggcaccacatgatttcatgtttgtgaagaggaatgatccagatggacctcattcagacagaatctattaccttgccatgtctggtgagaacagagaaaatacactgttttattctgaaattcccaaaactatcaatagagcagcagtcttaatgctctcttggaagcctcttttggatctttttcaggcaacactggactatggaatgtattctcgagaagaagaactattaagagaaagaaaacgcattggaacagtcggaattgcttcttacgattatcaccaaggaagtggaacatttctgtttcaagccggtagtggaatttatcacgtaaaagatggagggccacaaggatttacgcaacaacctttaaggcccaatctagtggaaactagttgtcccaacatacggatggatccaaaattatgccctgctgatccagactggattgcttttatacatagcaacgatatttggatatctaacatcgtaaccagagaagaaaggagactcacttatgtgcacaatgagctagccaacatggaagaagatgccagatcagctggagtcgctacctttgttctccaagaagaatttgatagatattctggctattggtggtgtccaaaagctgaaacaactcccagtggtggtaaaattcttagaattctatatgaagaaaatgatgaatctgaggtggaaattattcatgttacatcccctatgttggaaacaaggagggcagattcattccgttatcctaaaacaggtacagcaaatcctaaagtcacttttaagatgtcagaaataatgattgatgctgaaggaaggatcatagatgtcatagataaggaactaattcaaccttttgagattctatttgaaggagttgaatatattgccagagctggatggactcctgagggaaaatatgcttggtccatcctactagatcgctcccagactcgcctacagatagtgttgatctcacctgaattatttatcccagtagaagatgatgttatggaaaggcagagactcattgagtcagtgcctgattctgtgacgccactaattatctatgaagaaacaacagacatctggataaatatccatgacatctttcatgtttttccccaaagtcacgaagaggaaattgagtttatttttgcctctgaatgcaaaacaggtttccgtcatttatacaaaattacatctattttaaaggaaagcaaatataaacgatccagtggtgggctgcctgctccaagtgatttcaagtgtcctatcaaagaggagatagcaattaccagtggtgaatgggaagttcttggccggcatggatctaatatccaagttgatgaagtcagaaggctggtatattttgaaggcaccaaagactcccctttagagcatcacctgtacgtagtcagttacgtaaatcctggagaggtgacaaggctgactgaccgtggctactcacattcttgctgcatcagtcagcactgtgacttctttataagtaagtatagtaaccagaagaatccacactgtgtgtccctttacaagctatcaagtcctgaagatgacccaacttgcaaaacaaaggaattttgggccaccattttggattcagcaggtcctcttcctgactatactcctccagaaattttctcttttgaaagtactactggatttacattgtatgggatgctctacaagcctcatgatctacagcctggaaagaaatatcctactgtgctgttcatatatggtggtcctcaggtgcagttggtgaataatcggtttaaaggagtcaagtatttccgcttgaataccctagcctctctaggttatgtggttgtagtgatagacaacaggggatcctgtcaccgagggcttaaatttgaaggcgcctttaaatataaaatgggtcaaatagaaattgacgatcaggtggaaggactccaatatctagcttctcgatatgatttcattgacttagatcgtgtgggcatccacggctggtcctatggaggatacctctccctgatggcattaatgcagaggtcagatatcttcagggttgctattgctggggccccagtcactctgtggatcttctatgatacaggatacacggaacgttatatgggtcaccctgaccagaatgaacagggctattacttaggatctgtggccatgcaagcagaaaagttcccctctgaaccaaatcgtttactgctcttacatggtttcctggatgagaatgtccattttgcacataccagtatattactgagttttttagtgagggctggaaagccatatgatttacagatctatcctcaggagagacacagcataagagttcctgaatcgggagaacattatgaactgcatcttttgcactaccttcaagaaaaccttggatcacgtattgctgctctaaaagtgatataattttgacctgtgtagaactctctggtatacactggctatttaaccaaatgaggaggtttaatcaacagaaaacacagaattgatcatcacattttgatacctgccatgtaacatctactcctgaaaataaatgtggtgccatgcaggggtctacggtttgtggtagtaatctaataccttaaccccacatgctcaaaatcaaatgatacatattcctgagagacccagcaataccataagaattactaaaaaaaaaaaaaaaaaaaagacattagcaccatgtattcatactaccctattttcacttttaatagtattataaacttcatgaacttaattagtgtatttttacagtatacttttgagtttgttaaaatatgatgatattagtgattggtttggttcagttccagaatctttgactagttacagatttgatagcacttaaatgtaattgaatagcttatgcttcattgcttgggcatatccagcatgttatgaactaataactattaaacttgacttaaccagtcattcattaataatttttcaaggataacttagtggcctcctaaagacacttgttttggcactgaccagtttttagccaatttaatctgtatctagtataaataattctcatttttctttgatgatattaacagagtgggcttttccttttgcataaaggctagtaactgtatatgtagcatggatttaattagtcatgatattgataattacaggcagaaaatttttaatcaaatgattagagcttaaatatttgcaggcaagtttttttttttcctttaagaaaaggaaaaagtacacattcactagaattcttcagaaaatttagtggtgccagtttccatttggtatttccttattaaaatattctagaattttaaggagattgaagggaatcacagtggggtggggagacctgggtttggggaatgacagagagaagaggtggtgagggcctgattaaaaactaagcagaagtagttttaacaaaaatactcatgaaaatgtttggaaactgaaatttaaacaactgtaatattaaggaaaccagaatcaataaatcactgtcttgccagcacagctacagagtaacatgattcaggggaggaaaagttccttagagttacttttataattctttttttttttcctcttaggtttagaaatcttacaaatttaaactttatccttttaaaattatttgaacataatttagatattgtaagcttaaaatacaaatgtttatagataacctctttaccataaactaatccctggcaagccatggctctctttttttttttggtgtttaaagcctgtaaacagtttttctgaatgatcatgaacttttcttggtttagcactaggatttagctatgaagagagctcataggctttcaggtgctaattgagatctgccctgttagagtcttggggtgctagattggtcacattgacaccagtggcagggaaggcatctatgagtttgatgctttttatcacacacttcagtgtttagaaagttattaccaatacttttaaacaacactccaagaaaatttgctatatttctttctcatcactacagagagagtagatttccccatagagagcacagcctccattagtaaggttggtgactattggtaagaggtggacttcattgacaccaagtgggaggtagggaaagcccagaaatggcaggatgatatggtggttctgtcgttgggaaaggtattgggttttgctgtttgtatttatactgtataatagataccacgctttttcttattatctgtatatgtattgcttttcatgtttgatattttcccatgccaagatttgtttatatatattttcaatgttaaattaaattgatttgggtaactttcttccccaagaaagtattttcccccttaagtatatatctgactgtggagggtgttttgttttgttttgttttgttttgtttggactaactggcctcgaaggatctatccttataatatatgcaaagtagaaatggtatacagtagcttttaagcagctactccattgaaacctctcacccattaaggctgtttcttcaaagtggcatctcttattttaccgaaacaaacttagaaaacttcatgtactctggagttcacaggtgttttccttttgcatgttgccttctcctttcctcctatcacaaagaatgcttctattatcactcccagtcacttaaatgccattctgcttctttagcaggaaaaaatacctgaatgaattctcttacagaaagacagtttgactgaatttgctttttacaatcagtgtggaaaatatcatagtcaattgaggcaatcagtagaaatctcactaaaagtttgtaccccctgagtatgggtaacagcttaaacggcaagaatatataaaagtagcaacagtttagtgggagccaaaaagcactaggttaaatatcatactacgtttttaaagacttgataaatgtgtacacttgaacaaccatccagagggatagttacttgagcattacagagtagtggaactcaaaatctaagattcatctgggatacttctaaaagaaatgtagagttttgaatctcactcttaaaaatgtgtattcccaggctaggcatggtggctcacgcctgtaatcctagcactttgggaggccaaggcgggtgaatcacttgaagtcaggagatcaagaccagcttggtcgacatggtgaaaccccgtctctactaaaagtacaaaaaaattagctgggcatgatggcgtgtgcctataatcccacctactcgggaggctgaggcaggagaatcgcttgaacctgggaggcggaagttgcagtgagccgagatggcgccactgtagtccagtctgggcgacagagtgagattctgcctcaaaataaataaataaataaaaatttgtattccattgatttgggtagacaccaggaatgtgcatttctaacaagctttccaggcgatcctatagtaagtcatctgtggactactttaagaaactcttctatagagaatggagttggattaataataggtgattttttacactggactgattcacaagaacctaaacagtagtccatgaagctgctcatctgtggtaactatttggccccgtctcactctgaaagcagcaggagatgttgtttactttgtttctatcccctttgtctggagattaattttggaatgaaagtttttctctctatgccattcctggttcttttccaaagcctcatacaagaggattaggtcacaatgcatgcattaccttttaaaagaatgcgatattgataccgatgcttacttttttttttttactacttgttttattcctt[450 bp omitted]cttccttggtatagtggaggatttgaggattggaatatagagtagagtgcttgcttaagcctgggagcccatctttatagctatttgatgtaagaaaagagacatggccatttctaaactatataaggtgagtgtgtctattcccagcagatataaaggaaaaaggaaacttttttgattcccaccttcccagcctcacctagccatcttccagcctcaaatatagagatgttagtgcaaggtcctgggctctaggtgatcatttcataagtcctttacagataaagaaaaagtagtgtttgtatgtttgtttttaagtaaccccaaaacaaatttatattgtattcagcaaaattggaattcaggtgtttaattttagaacatgaagtgcctgctgttttaagcattgacttgtataaaaagaattgcatgtctccagtaagcttatgggttttctcatttttaggtatatggcttttaatcatgtaaagtgaaacattagttttcttgcattttattacaggttctttgttgcaataaagatgctgctgaaattaattga

SEQ ID NO: 8452 - DNA, 2822 bp, Homo sapiens
  source 1..2822: mol_type = unassigned DNA
aaagcctccgaggccaaggccgctgctactgccgccgctgcttcttagtgccgcgttcgccgcctgggttgtcaccggcgccgccgccgaggaagccactgcaaccaggaccggagtggaggcggcgcagcatgaagcggcgcaggcccgctccatagcgcacgtcgggacggtccgggcggggccggggggaaggaaaatgcaacatggcagcagcaatggaaacagaacagctgggtgttgagatatttgaaactgcggactgtgaggagaatattgaatcacaggatcggcctaaattggagcctttttatgttgagcggtattcctggagtcagcttaaaaagctgcttgccgataccagaaaatatcatggctacatgatggctaaggcaccacatgatttcatgtttgtgaagaggaatgatccagatggacctcattcagacagaatctattaccttgccatgtctggtgagaacagagaaaatacactgttttattctgaaattcccaaaactatcaatagagcagcagtcttaatgctctcttggaagcctcttttggatctttttcaggcaacactggactatggaatgtattctcgagaagaagaactattaagagaaagaaaacgcattggaacagtcggaattgcttcttacgattatcaccaaggaagtggaacatttctgtttcaagccggtagtggaatttatcacgtaaaagatggagggccacaaggatttacgcaacaacctttaaggcccaatctagtggaaactagttgtcccaacatacggatggatccaaaattatgccctgctgatccagactggattgcttttatacatagcaacgatatttggatatctaacatcgtaaccagagaagaaaggagactcacttatgtgcacaatgagctagccaacatggaagaagatgccagatcagctggagtcgctacctttgttctccaagaagaatttgatagatattctggctattggtggtgtccaaaagctgaaacaactcccagtggtggtaaaattcttagaattctatatgaagaaaatgatgaatctgaggtggaaattattcatgttacatcccctatgttggaaacaaggagggcagattcattccgttatcctaaaacaggtacagcaaatcctaaagtcacttttaagatgtcagaaataatgattgatgctgaaggaaggatcatagatgtcatagataaggaactaattcaaccttttgagattctatttgaaggagttgaatatattgccagagctggatggactcctgagggaaaatatgcttggtccatcctactagatcgctcccagactcgcctacagatagtgttgatctcacctgaattatttatcccagtagaagatgatgttatggaaaggcagagactcattgagtcagtgcctgattctgtgacgccactaattatctatgaagaaacaacagacatctggataaatatccatgacatctttcatgtttttccccaaagtcacgaagaggaaattgagtttatttttgcctctgaatgcaaaacaggtttccgtcatttatacaaaattacatctattttaaaggaaagcaaatataaacgatccagtggtgggctgcctgctccaagtgatttcaagtgtcctatcaaagaggagatagcaattaccagtggtgaatgggaagttcttggccggcatggatctaatatccaagttgatgaagtcagaaggctggtatattttgaaggcaccaaagactcccctttagagcatcacctgtacgtagtcagttacgtaaatcctggagaggtgacaaggctgactgaccgtggctactcacattcttgctgcatcagtcagcactgtgacttctttataagtaagtatagtaaccagaagaatccacactgtgtgtccctttacaagctatcaagtcctgaagatgacccaacttgcaaaacaaaggaattttgggccaccattttggattcagcaggtcctcttcctgactatactcctccagaaattttctcttttgaaagtactactggatttacattgtatgggatgctctacaagcctcatgatctacagcctggaaagaaatatcctactgtgctgttcatatatggtggtcctcaggttgctattgctggggccccagtcactctgtggatcttctatgatacaggatacacggaacgttatatgggtcaccctgaccagaatgaacagggctattacttaggatctgtggccatgcaagcagaaaagttcccctctgaaccaaatcgtttactgctcttacatggtttcctggatgagaatgtccattttgcacataccagtatattactgagttttttagtgagggctggaaagccatatgatttacagatctatcctcaggagagacacagcataagagttcctgaatcgggagaacattatgaactgcatcttttgcactaccttcaagaaaaccttggatcacgtattgctgctctaaaagtgatataattttgacctgtgtagaactctctggtatacactggctatttaaccaaatgaggaggtttaatcaacagaaaacacagaattgatcatcacattttgatacctgccatgtaacatctactcctgaaaataaatgtggtgccatgcaggggtctacggtttgtggtagtaatctaataccttaaccccacatgctcaaaatcaaatgatacatattcctgagagacccagcaataccataagaattactaaaaaaaaaaaaaaaaaaaa

SEQ ID NO: 8453 - DNA, 2953 bp, Homo sapiens
  source 1..2953: mol_type = unassigned DNA
tcctggtgagcaggctttgatggtgaggaaaggaaagattcctgtgagaagagcaggatgagcagagggattctatgcttgaagtcgagtcacttgaaaaagatctctttgaatgtggaagagatctgagcagatgaaaataaaatcaggaaaatgcaacatggcagcagcaatggaaacagaacagctgggtgttgagatatttgaaactgcggactgtgaggagaatattgaatcacaggatcggcctaaattggagcctttttatgttgagcggtattcctggagtcagcttaaaaagctgcttgccgataccagaaaatatcatggctacatgatggctaaggcaccacatgatttcatgtttgtgaagaggaatgatccagatggacctcattcagacagaatctattaccttgccatgtctggtgagaacagagaaaatacactgttttattctgaaattcccaaaactatcaatagagcagcagtcttaatgctctcttggaagcctcttttggatctttttcaggcaacactggactatggaatgtattctcgagaagaagaactattaagagaaagaaaacgcattggaacagtcggaattgcttcttacgattatcaccaaggaagtggaacatttctgtttcaagccggtagtggaatttatcacgtaaaagatggagggccacaaggatttacgcaacaacctttaaggcccaatctagtggaaactagttgtcccaacatacggatggatccaaaattatgccctgctgatccagactggattgcttttatacatagcaacgatatttggatatctaacatcgtaaccagagaagaaaggagactcacttatgtgcacaatgagctagccaacatggaagaagatgccagatcagctggagtcgctacctttgttctccaagaagaatttgatagatattctggctattggtggtgtccaaaagctgaaacaactcccagtggtggtaaaattcttagaattctatatgaagaaaatgatgaatctgaggtggaaattattcatgttacatcccctatgttggaaacaaggagggcagattcattccgttatcctaaaacaggtacagcaaatcctaaagtcacttttaagatgtcagaaataatgattgatgctgaaggaaggatcatagatgtcatagataaggaactaattcaaccttttgagattctatttgaaggagttgaatatattgccagagctggatggactcctgagggaaaatatgcttggtccatcctactagatcgctcccagactcgcctacagatagtgttgatctcacctgaattatttatcccagtagaagatgatgttatggaaaggcagagactcattgagtcagtgcctgattctgtgacgccactaattatctatgaagaaacaacagacatctggataaatatccatgacatctttcatgtttttccccaaagtcacgaagaggaaattgagtttatttttgcctctgaatgcaaaacaggtttccgtcatttatacaaaattacatctattttaaaggaaagcaaatataaacgatccagtggtgggctgcctgctccaagtgatttcaagtgtcctatcaaagaggagatagcaattaccagtggtgaatgggaagttcttggccggcatggatctaatatccaagttgatgaagtcagaaggctggtatattttgaaggcaccaaagactcccctttagagcatcacctgtacgtagtcagttacgtaaatcctggagaggtgacaaggctgactgaccgtggctactcacattcttgctgcatcagtcagcactgtgacttctttataagtaagtatagtaaccagaagaatccacactgtgtgtccctttacaagctatcaagtcctgaagatgacccaacttgcaaaacaaaggaattttgggccaccattttggattcagcaggtcctcttcctgactatactcctccagaaattttctcttttgaaagtactactggatttacattgtatgggatgctctacaagcctcatgatctacagcctggaaagaaatatcctactgtgctgttcatatatggtggtcctcaggtgcagttggtgaataatcggtttaaaggagtcaagtatttccgcttgaataccctagcctctctaggttatgtggttgtagtgatagacaacaggggatcctgtcaccgagggcttaaatttgaaggcgcctttaaatataaaatgggtcaaatagaaattgacgatcaggtggaaggactccaatatctagcttctcgatatgatttcattgacttagatcgtgtgggcatccacggctggtcctatggaggatacctctccctgatggcattaatgcagaggtcagatatcttcagggttgctattgctggggccccagtcactctgtggatcttctatgatacaggatacacggaacgttatatgggtcaccctgaccagaatgaacagggctattacttaggatctgtggccatgcaagcagaaaagttcccctctgaaccaaatcgtttactgctcttacatggtttcctggatgagaatgtccattttgcacataccagtatattactgagttttttagtgagggctggaaagccatatgatttacagatctatcctcaggagagacacagcataagagttcctgaatcgggagaacattatgaactgcatcttttgcactaccttcaagaaaaccttggatcacgtattgctgctctaaaagtgatataattttgacctgtgtagaactctctggtatacactggctatttaaccaaatgaggaggtttaatcaacagaaaacacagaattgatcatcacattttgatacctgccatgtaacatctactcctgaaaataaatgtggtgccatgc

SEQ ID NO: 8454 - DNA, 5817 bp, Homo sapiens
  source 1..5817: mol_type = unassigned DNA
gactgatcatttggctcttgccggaaatcgttccgcccggtgaggtttcggcgtgagacccgaggagggcggggaagaggcgtgacggagattcctgaggtgtagtagcctgaggttcccttatgtggccctatagctgttactgaaggaagtagcctacgtccacgcctacaactgaagtctcttgacaaacacctcacccctgcctccgggatgaaagggggtaacctagacctgaatgggcttgaccatctcacaactgctcgcgtgacgaccgcattcgtggcaggtaagaagattgctgtatcaactcaagaaagcagtaacttcactgtctttgtattttgaattgcaacaacaactttgatatcaacaatgaagcaatgatatctaagaacaaaagagtatttgccaacagtcatcataatatcaagtgattgtataagcagaaacaagctgtcacagacctgtgcgtcagctaatatatggagaatgctttcttctgatactatttacttagaggcagttttaatataaatcatttcaattatatctacatcaaataaaataaaaatgagtgaagcccccagattcttcgttggaccagaagatacagaaataaatcctggaaattatcgacatttcttccaccatgcagatgaagacgatgaggaggaagatgattctccaccagaaaggcagattgtggttggaatatgttccatggcaaagaaatccaaatccaaaccaatgaaggaaattcttgaacggatctccttatttaaatatatcacagtagtagtatttgaagaggaggttattttgaatgaaccagtggaaaactggcctttatgtgattgtcttatttctttccattctaaaggatttccactggacaaagcggttgcctatgcaaaactcaggaatccatttgtaatcaatgacttgaatatgcagtatctcatacaagataggagagaagtatatagtattcttcaagctgaaggtattttacttcctcgttatgctattttgaaccgtgacccaaataatcccaaagaatgtaatctgattgaaggggaagatcatgtagaagtaaatggggaagtttttcaaaagccatttgtagaaaagccagtcagtgcagaagatcacaatgtttacatttattacccaacttctgctggtggtggaagtcaaagactctttagaaagattggcagtagaagtagtgtttattctccagaaagcaatgtacgaaaaacaggctcatatatatatgaagagtttatgcccacagatggtactgatgttaaggtttatacagtgggtccagattatgcccatgctgaagctcgaaaatctccagcacttgatggcaaggtggaacgagacagtgaaggaaaagaagtaagataccctgttattctcaatgcacgagagaaattaattgcttggaaagtctgccttgcttttaagcaaacagtttgtggctttgatttgttacgggccaatggacagtcctatgtctgtgatgtcaatggcttcagttttgtgaaaaattccatgaagtattatgatgactgtgcaaaaatacttggaaatattgtaatgcgagaacttgctccacaatttcatattccatggtcaatacccttagaagctgaagatatcccaattgtaccaactacatctggaactatgatggaacttagatgtgtcatagctgttatacgtcatggggatcgaacaccaaaacaaaaaatgaaaatggaagtgagacatcagaaattttttgatctttttgaaaagtgtgatggatataaatcagggaaattaaaactcaaaaaaccaaaacagttacaggaagtgctagatattgcacgacagcttcttatggagctagggcaaaataatgattctgaaattgaagaaaacaagccaaaacttgaacaacttaagactgtattagagatgtatggtcatttttctggaataaatcgtaaggttcagttgacctatctccctcatggttgtcctaaaacatctagtgaagaggaggacagccgaagagaagaaccatctttacttttggttctaaaatggggaggtgaattaactcctgcaggcagggtccaggctgaagaacttggaagagccttcaggtgtatgtatcctggaggtcaaggagattatgcaggatttcctggttgtggtttacttagattacatagcacctacagacatgacctcaaaatatatgcctctgatgaaggacgagtccagatgactgcagctgcttttgcaaaggggcttttagctttggaaggagagcttacacccattcttgttcaaatggtgaaaagtgcaaatatgaacggtcttttggatagtgatagtgactctctgagcagttgtcagcaacgtgtgaaggcaaggcttcatgaaatacttcagaaagacagagattttactgctgaagattatgaaaagcttactccatctggaagcatttctcttatcaaatcaatgcatttaattaaaaaccctgtgaagacctgtgataaagtttattccttaattcagagtttgacttctcaaatcagacatcgaatggaagatcctaaatcatcagatattcagctttaccatagtgaaacattggagcttatgctacgtagatggtccaagttagagaaagactttaaaacaaagaatggaagatatgatattagtaaaatccctgacatatatgactgtataaaatatgatgtccagcataatggttccttgaaattagaaaacacaatggaattatataggctttcgaaggcattagcagatattgttatccctcaggaatatggtataactaaagctgaaaaactggagattgccaaaggctactgtactcctctggttagaaaaattcgctcagaccttcagaggacacaagatgatgacactgtaaataaacttcatcctgtgtattctagaggtgttctgtctcctgaacgtcatgttcgtactagattatattttaccagtgaaagtcatgtacattctttgctgtctattcttcgctatggtgccttatgcaatgaatcaaaggatgaacagtggaaacgagctatggattatttaaacgttgtcaatgagctcaactacatgactcagattgttatcatgctttatgaggatcctaataaggatctttcctcagaagaacgctttcatgttgaattacactttagtccgggagccaaaggttgtgaagaagacaaaaatttgccatctggctatggatatagaccagcttccagagagaatgaaggcaggagaccttttaaaattgataatgatgatgaaccacatacttctaaaagagatgaagttgatcgagctgtgatattgtttaaaccaatggtatcagagccaattcatatacacaggaagtctccacttccaagatctaggaagacggctacaaatgatgaagagagccccctgagtgtgtctagcccagagggtactggtacctggctgcattataccagtggtgtgggtactgggcgtcgaagacgcagatcaggggaacaaatcacttcttcccctgtctcccccaaatcattggctttcacatccagtatttttggctcatggcaacaggttgtatctgaaaatgctaattacctgagaacaccaagaactcttgtggaacagaagcagaatcctactgtagggtctcactgtgcgggcctgtttagcacctcggtgctcgggggttcttcaagcgcacctaacctacaggattatgctcgtactcatcgtaaaaagctgacctcttctggctgcatagatggctttgaattgtattccatggtgccatctatttgtcctctagaaactcttcataatgccctatctttaaagcaagtggatgaatttcttgcttccattgcttctccatcatctgacgttccacggaagaccgctgaaatttcctctacagctttacgttccagtccaataatgagaaaaaaagtatctttaaatacgtatacacctgcaaagatcctcccaacaccaccagctaccttaaagagcactaaagcaagcagcaaaccagctacaagtggaccttctagtgcagttgttcctaatacctcatctcggaaaaagaatataactagcaaaacagaaacgcatgaacacaaaaaaaacactgggaaaaagaaatgaaatcttagcagaagctggaactttttatacttataaaaatagtatgttcttatgtttctccttatgcatttatgtgttcacttaaaaatgtttttaaatctaaggttttctttgtttatgttcaggtaaggaactgttgtcatgatctggaaatgtttaaaacaatgtttgttagcattctgtgagcagcaaaacttatagtgataaaaatcgattgttgttaatatgatgtttaccatgtgcacatagtaatgaaaaggaacataaaagcccagcaggctcgtaccaaagtcacagcagtaatgctatgtactgcagagtctgatgagctggcctttgtgcacacttttattttcatgggattgcatcttagctgttaaaacttctagattgaaatttgacagccagggttacatattggggacttttaaagtgtctttccaaagagatttcattaaccgtttagattagaatatctttcccaattgttacagtgacatatatgctgcaatatttaacaactggagtattagccacatgggttattttttcaatctgtgttttgaatttttttattgtgtgttatttaaaatattacatatgcagctgggagaactacacctttgtgcacatagatttatatattaatttgtagaaaatattttctttatatatttccttaccatacaaggtgccttgttcatcaggaaaacttttgttttgtattttgacaagaaaggcaccttcagagtttctttttaagtatagttgacaagtgtataaatgttacacttactttcagagttctttttagatctaaagaagtcagttcaaaaatggaaatcaacaatgttaggagaaatctgaattctgttaagttagtaagtattatgtatagcatctgtttttaaccatttccattcttatccctagtgtatcagttgatcacactaagaaagcttaaagattgagcatttgaaataaatgctctttataaatgattagatttttgaagggatattgaaatcattgcgctgtgatttcatctgtgatgtgaaaaatcaatttattatccttggtgctttcccccccaccaatgcacaaataattgtgaacagcttgaaatgacttaaactgtaatccaaatgggacaatctgataagaatttcatgcattggtagttaaataacttaaattgctaaagctttagcttgaaatttatgtttagaaaaactattgatttcccatggtatgaatataactattgtaattcttcaaatgagactcttctcaccttaaatagtcatatattaattaacttataggaaataagcatactatatgttagctgttttaaaaggtaccagatgtaagagtcataaatatatgcaattaaagaagttcatagatttcacatgaatgtaaatgtgttatatggagacatgtcttgtaaacagttgaatgtatgtaagttttctgtttgtgaaaatgtagttaatgtactcactgtggaggtcataaggaagctactttttttttaaagtggaacctaattaaaatatttccagaatcaaa

SEQ ID NO: 8455 - DNA, 5813 bp, Homo sapiens
  source 1..5813: mol_type = unassigned DNA
gagggcggggaagaggcgtgacggagattcctgaggtgtagtagcctgaggttcccttatgtggccctatagctgttactgaaggaagtagcctacgtccacgcctacaactgaagtctcttgacaaacacctcacccctgcctccgggatgaaagggggtaacctagacctgaatgggcttgaccatctcacaactgctcgcgtgacgaccgcattcgtggcaggtaagaagattgctgtatcaactcaagaaagcagtaacttcactgtctttgtattttgaattgcaacaacaactttgatatcaacaatgaagcaatgatatctaagaacaaaagagtatttgccaacagtcatcataatatcaagtgattgtataagcagaaacaagctgtcacagacctgtgcgtcagctaatatatggagaatgctttcttctgatactatttacttagaggcagttttaatataaatcatttcaattatatctacatcaaataaaataaaaatgagtgaagcccccagattcttcgttggaccagaagatacagaaataaatcctggaaattatcgacatttcttccaccatgcagatgaagacgatgaggaggaagatgattctccaccagaaaggcagattgtggttggaatatgttccatggcaaagaaatccaaatccaaaccaatgaaggaaattcttgaacggatctccttatttaaatatatcacagtagtagtatttgaagaggaggttattttgaatgaaccagtggaaaactggcctttatgtgattgtcttatttctttccattctaaaggatttccactggacaaagcggttgcctatgcaaaactcaggaatccatttgtaatcaatgacttgaatatgcagtatctcatacaagataggagagaagtatatagtattcttcaagctgaaggtattttacttcctcgttatgctattttgaaccgtgacccaaataatcccaaagaatgtaatctgattgaaggggaagatcatgtagaagtaaatggggaagtttttcaaaagccatttgtagaaaagccagtcagtgcagaagatcacaatgtttacatttattacccaacttctgctggtggtggaagtcaaagactctttagaaagattggcagtagaagtagtgtttattctccagaaagcaatgtacgaaaaacaggctcatatatatatgaagagtttatgcccacagatggtactgatgttaaggtttatacagtgggtccagattatgcccatgctgaagctcgaaaatctccagcacttgatggcaaggtggaacgagacagtgaaggaaaagaagtaagataccctgttattctcaatgcacgagagaaattaattgcttggaaagtctgccttgcttttaagcaaacagtttgtggctttgatttgttacgggccaatggacagtcctatgtctgtgatgtcaatggcttcagttttgtgaaaaattccatgaagtattatgatgactgtgcaaaaatacttggaaatattgtaatgcgagaacttgctccacaatttcatattccatggtcaatacccttagaagctgaagatatcccaattgtaccaactacatctggaactatgatggaacttagatgtgtcatagctgttatacgtcatggggatcgaacaccaaaacaaaaaatgaaaatggaagtgagacatcagaaattttttgatctttttgaaaagtgtgatggatataaatcagggaaattaaaactcaaaaaaccaaaacagttacaggaagtgctagatattgcacgacagcttcttatggagctagggcaaaataatgattctgaaattgaagaaaacaagccaaaacttgaacaacttaagactgtattagagatgtatggtcatttttctggaataaatcgtaaggttcagttgacctatctccctcatggttgtcctaaaacatctagtgaagaggaggacagccgaagagaagaaccatctttacttttggttctaaaatggggaggtgaattaactcctgcaggcagggtccaggctgaagaacttggaagagccttcaggtgtatgtatcctggaggtcaaggagattatgcaggatttcctggttgtggtttacttagattacatagcacctacagacatgacctcaaaatatatgcctctgatgaaggacgagtccagatgactgcagctgcttttgcaaaggggcttttagctttggaaggagagcttacacccattcttgttcaaatggtgaaaagtgcaaatatgaacggtcttttggatagtgatagtgactctctgagcagttgtcagcaacgtgtgaaggcaaggcttcatgaaatacttcagaaagacagagattttactgctgaagattatgaaaagcttactccatctggaagcatttctcttatcaaatcaatgcatttaattaaaaaccctgtgaagacctgtgataaagtttattccttaattcagagtttgacttctcaaatcagacatcgaatggaagatcctaaatcatcagatattcagctttaccatagtgaaacattggagcttatgctacgtagatggtccaagttagagaaagactttaaaacaaagaatggaagatatgatattagtaaaatccctgacatatatgactgtataaaatatgatgtccagcataatggttccttgaaattagaaaacacaatggaattatataggctttcgaaggcattagcagatattgttatccctcaggaatatggtataactaaagctgaaaaactggagattgccaaaggctactgtactcctctggttagaaaaattcgctcagaccttcagaggacacaagatgatgacactgtaaataaacttcatcctgtgtattctagaggtgttctgtctcctgaacgtcatgttcgtactagattatattttaccagtgaaagtcatgtacattctttgctgtctattcttcgctatggtgccttatgcaatgaatcaaaggatgaacagtggaaacgagctatggattatttaaacgttgtcaatgagctcaactacatgactcagattgttatcatgctttatgaggatcctaataaggatctttcctcagaagaacgctttcatgttgaattacactttagtccgggagccaaaggttgtgaagaagacaaaaatttgccatctggctatggatatagaccagcttccagagagaatgaaggcaggagaccttttaaaattgataatgatgatgaaccacatacttctaaaagagatgaagttgatcgagctgtgatattgtttaaaccaatggtatcagagccaattcatatacacaggaagtctccacttccaagatctaggaagacggctacaaatgatgaagagagccccctgagtgtgtctagcccagagggtactggtacctggctgcattataccagtggtgtgggtactgggcgtcgaagacgcagatcaggggaacaaatcacttcttcccctgtctcccccaaatcattggctttcacatccagtatttttggctcatggcaacaggttgtatctgaaaatgctaattacctgagaacaccaagaactcttgtggaacagaagcagaatcctactgtagggtctcactgtgcgggcctgtttagcacctcggtgctcgggggttcttcaagcgcacctaacctacaggattatgctcgtactcatcgtaaaaagctgacctcttctggctgcatagatgacgccacacgcggttctgctgttaaaaggttttctatctcatttgctcgacacccaaccaatggctttgaattgtattccatggtgccatctatttgtcctctagaaactcttcataatgccctatctttaaagcaagtggatgaatttcttgcttccattgcttctccatcatctgacgttccacggaagaccgctgaaatttcctctacagctttacgttccagtccaataatgagaaaaaaagtatctttaaatacgtatacacctgcaaagatcctcccaacaccaccagctaccttaaagagcactaaagcaagcagcaaaccagctacaagtggaccttctagtgcagttgttcctaatacctcatctcggaaaaagaatataactagcaaaacagaaacgcatgaacacaaaaaaaacactgggaaaaagaaatgaaatcttagcagaagctggaactttttatacttataaaaatagtatgttcttatgtttctccttatgcatttatgtgttcacttaaaaatgtttttaaatctaaggttttctttgtttatgttcaggtaaggaactgttgtcatgatctggaaatgtttaaaacaatgtttgttagcattctgtgagcagcaaaacttatagtgataaaaatcgattgttgttaatatgatgtttaccatgtgcacatagtaatgaaaaggaacataaaagcccagcaggctcgtaccaaagtcacagcagtaatgctatgtactgcagagtctgatgagctggcctttgtgcacacttttattttcatgggattgcatcttagctgttaaaacttctagattgaaatttgacagccagggttacatattggggacttttaaagtgtctttccaaagagatttcattaaccgtttagattagaatatctttcccaattgttacagtgacatatatgctgcaatatttaacaactggagtattagccacatgggttattttttcaatctgtgttttgaatttttttattgtgtgttatttaaaatattacatatgcagctgggagaactacacctttgtgcacatagatttatatattaatttgtagaaaatattttctttatatatttccttaccatacaaggtgccttgttcatcaggaaaacttttgttttgtattttgacaagaaaggcaccttcagagtttctttttaagtatagttgacaagtgtataaatgttacacttactttcagagttctttttagatctaaagaagtcagttcaaaaatggaaatcaacaatgttaggagaaatctgaattctgttaagttagtaagtattatgtatagcatctgtttttaaccatttccattcttatccctagtgtatcagttgatcacactaagaaagcttaaagattgagcatttgaaataaatgctctttataaatgattagatttttgaagggatattgaaatcattgcgctgtgatttcatctgtgatgtgaaaaatcaatttattatccttggtgctttcccccccaccaatgcacaaataattgtgaacagcttgaaatgacttaaactgtaatccaaatgggacaatctgataagaatttcatgcattggtagttaaataacttaaattgctaaagctttagcttgaaatttatgtttagaaaaactattgatttcccatggtatgaatataactattgtaattcttcaaatgagactcttctcaccttaaatagtcatatattaattaacttataggaaataagcatactatatgttagctgttttaaaaggtaccagatgtaagagtcataaatatatgcaattaaagaagttcatagatttcacatgaatgtaaatgtgttatatggagacatgtcttgtaaacagttgaatgtatgtaagttttctgtttgtgaaaatgtagttaatgtactcactgtggaggtcataaggaagctactttttttttaaagtggaacctaattaaaatatttccagaatc

SEQ ID NO: 8456 - DNA, 5278 bp, Homo sapiens
  source 1..5278: mol_type = unassigned DNA
aatcatttcaattatatctacatcaaataaaataaaaatgagtgaagcccccagattcttcgttggaccagaagatacagaaataaatcctggaaattatcgacatttcttccaccatgcagatgaagacgatgaggaggaagatgattctccaccagaaaggcagattgtggttggaatatgttccatggcaaagaaatccaaatccaaaccaatgaaggaaattcttgaacggatctccttatttaaatatatcacagtagtagtatttgaagaggaggttattttgaatgaaccagtggaaaactggcctttatgtgattgtcttatttctttccattctaaaggatttccactggacaaagcggttgcctatgcaaaactcaggaatccatttgtaatcaatgacttgaatatgcagtatctcatacaagataggagagaagtatatagtattcttcaagctgaaggtattttacttcctcgttatgctattttgaaccgtgacccaaataatcccaaagaatgtaatctgattgaaggggaagatcatgtagaagtaaatggggaagtttttcaaaagccatttgtagaaaagccagtcagtgcagaagatcacaatgtttacatttattacccaacttctgctggtggtggaagtcaaagactctttagaaagattggcagtagaagtagtgtttattctccagaaagcaatgtacgaaaaacaggctcatatatatatgaagagtttatgcccacagatggtactgatgttaaggtttatacagtgggtccagattatgcccatgctgaagctcgaaaatctccagcacttgatggcaaggtggaacgagacagtgaaggaaaagaagtaagataccctgttattctcaatgcacgagagaaattaattgcttggaaagtctgccttgcttttaagcaaacagtttgtggctttgatttgttacgggccaatggacagtcctatgtctgtgatgtcaatggcttcagttttgtgaaaaattccatgaagtattatgatgactgtgcaaaaatacttggaaatattgtaatgcgagaacttgctccacaatttcatattccatggtcaatacccttagaagctgaagatatcccaattgtaccaactacatctggaactatgatggaacttagatgtgtcatagctgttatacgtcatggggatcgaacaccaaaacaaaaaatgaaaatggaagtgagacatcagaaattttttgatctttttgaaaagtgtgatggatataaatcagggaaattaaaactcaaaaaaccaaaacagttacaggaagtgctagatattgcacgacagcttcttatggagctagggcaaaataatgattctgaaattgaagaaaacaagccaaaacttgaacaacttaagactgtattagagatgtatggtcatttttctggaataaatcgtaaggttcagttgacctatctccctcatggttgtcctaaaacatctagtgaagaggaggacagccgaagagaagaaccatctttacttttggttctaaaatggggaggtgaattaactcctgcaggcagggtccaggctgaagaacttggaagagccttcaggtgtatgtatcctggaggtcaaggagattatgcaggatttcctggttgtggtttacttagattacatagcacctacagacatgacctcaaaatatatgcctctgatgaaggacgagtccagatgactgcagctgcttttgcaaaggggcttttagctttggaaggagagcttacacccattcttgttcaaatggtgaaaagtgcaaatatgaacggtcttttggatagtgatagtgactctctgagcagttgtcagcaacgtgtgaaggcaaggcttcatgaaatacttcagaaagacagagattttactgctgaagattatgaaaagcttactccatctggaagcatttctcttatcaaatcaatgcatttaattaaaaaccctgtgaagacctgtgataaagtttattccttaattcagagtttgacttctcaaatcagacatcgaatggaagatcctaaatcatcagatattcagctttaccatagtgaaacattggagcttatgctacgtagatggtccaagttagagaaagactttaaaacaaagaatggaagatatgatattagtaaaatccctgacatatatgactgtataaaatatgatgtccagcataatggttccttgaaattagaaaacacaatggaattatataggctttcgaaggcattagcagatattgttatccctcaggaatatggtataactaaagctgaaaaactggagattgccaaaggctactgtactcctctggttagaaaaattcgctcagaccttcagaggacacaagatgatgacactgtaaataaacttcatcctgtgtattctagaggtgttctgtctcctgaacgtcatgttcgtactagattatattttaccagtgaaagtcatgtacattctttgctgtctattcttcgctatggtgccttatgcaatgaatcaaaggatgaacagtggaaacgagctatggattatttaaacgttgtcaatgagctcaactacatgactcagattgttatcatgctttatgaggatcctaataaggatctttcctcagaagaacgctttcatgttgaattacactttagtccgggagccaaaggttgtgaagaagacaaaaatttgccatctggctatggatatagaccagcttccagagagaatgaaggcaggagaccttttaaaattgataatgatgatgaaccacatacttctaaaagagatgaagttgatcgagctgtgatattgtttaaaccaatggtatcagagccaattcatatacacaggaagtctccacttccaagatctaggaagacggctacaaatgatgaagagagccccctgagtgtgtctagcccagagggtactggtacctggctgcattataccagtggtgtgggtactgggcgtcgaagacgcagatcaggggaacaaatcacttcttcccctgtctcccccaaatcattggctttcacatccagtatttttggctcatggcaacaggttgtatctgaaaatgctaattacctgagaacaccaagaactcttgtggaacagaagcagaatcctactgtagggtctcactgtgcgggcctgtttagcacctcggtgctcgggggttcttcaagcgcacctaacctacaggattatgctcgtactcatcgtaaaaagctgacctcttctggctgcatagatggctttgaattgtattccatggtgccatctatttgtcctctagaaactcttcataatgccctatctttaaagcaagtggatgaatttcttgcttccattgcttctccatcatctgacgttccacggaagaccgctgaaatttcctctacagctttacgttccagtccaataatgagaaaaaaagtatctttaaatacgtatacacctgcaaagatcctcccaacaccaccagctaccttaaagagcactaaagcaagcagcaaaccagctacaagtggaccttctagtgcagttgttcctaatacctcatctcggaaaaagaatataactagcaaaacagaaacgcatgaacacaaaaaaaacactgggaaaaagaaatgaaatcttagcagaagctggaactttttatacttataaaaatagtatgttcttatgtttctccttatgcatttatgtgttcacttaaaaatgtttttaaatctaaggttttctttgtttatgttcaggtaaggaactgttgtcatgatctggaaatgtttaaaacaatgtttgttagcattctgtgagcagcaaaacttatagtgataaaaatcgattgttgttaatatgatgtttaccatgtgcacatagtaatgaaaaggaacataaaagcccagcaggctcgtaccaaagtcacagcagtaatgctatgtactgcagagtctgatgagctggcctttgtgcacacttttattttcatgggattgcatcttagctgttaaaacttctagattgaaatttgacagccagggttacatattggggacttttaaagtgtctttccaaagagatttcattaaccgtttagattagaatatctttcccaattgttacagtgacatatatgctgcaatatttaacaactggagtattagccacatgggttattttttcaatctgtgttttgaatttttttattgtgtgttatttaaaatattacatatgcagctgggagaactacacctttgtgcacatagatttatatattaatttgtagaaaatattttctttatatatttccttaccatacaaggtgccttgttcatcaggaaaacttttgttttgtattttgacaagaaaggcaccttcagagtttctttttaagtatagttgacaagtgtataaatgttacacttactttcagagttctttttagatctaaagaagtcagttcaaaaatggaaatcaacaatgttaggagaaatctgaattctgttaagttagtaagtattatgtatagcatctgtttttaaccatttccattcttatccctagtgtatcagttgatcacactaagaaagcttaaagattgagcatttgaaataaatgctctttataaatgattagatttttgaagggatattgaaatcattgcgctgtgatttcatctgtgatgtgaaaaatcaatttattatccttggtgctttcccccccaccaatgcacaaataattgtgaacagcttgaaatgacttaaactgtaatccaaatgggacaatctgataagaatttcatgcattggtagttaaataacttaaattgctaaagctttagcttgaaatttatgtttagaaaaactattgatttcccatggtatgaatataactattgtaattcttcaaatgagactcttctcaccttaaatagtcatatattaattaacttataggaaataagcatactatatgttagctgttttaaaaggtaccagatgtaagagtcataaatatatgcaattaaagaagttcatagatttcacatgaatgtaaatgtgttatatggagacatgtcttgtaaacagttgaatgtatgtaagttttctgtttgtgaaaatgtagttaatgtactcactgtggaggtcataaggaagctactttttttttaaagtggaacctaattaaaatatttccagaatc

SEQ ID NO: 8457 - DNA, 5918 bp, Homo sapiens
  source 1..5918: mol_type = unassigned DNA
gagggcggggaagaggcgtgacggagattcctgaggtgtagtagcctgaggttcccttatgtggccctatagctgttactgaaggaagtagcctacgtccacgcctacaactgaagtctcttgacaaacacctcacccctgcctccgggatgaaagggggtaacctagacctgaatgggcttgaccatctcacaactgctcgcgtgacgaccgcattcgtggcaggtaagaagattgctgtatcaactcaagaaagcagtaacttcactgtctttgtattttgaattgcaacaacaactttgatatcaacaatgaagcaatgatatctaagaacaaaagagtatttgccaacagtcatcataatatcaagtgattgtataagcagaaacaagctgtcacagacctgtgcgtcagctaatatatggagaatgctttcttctgatactatttacttagaggcagttttaatataaatcatttcaattatatctacatcaaataaaataaaaatgagtgaagcccccagattcttcgttggaccagaagatacagaaataaatcctggaaattatcgacatttcttccaccatgcagatgaagacgatgaggaggaagatgattctccaccagaaaggcagattgtggttggaatatgttccatggcaaagaaatccaaatccaaaccaatgaaggaaattcttgaacggatctccttatttaaatatatcacagtagtagtatttgaagaggaggttattttgaatgaaccagtggaaaactggcctttatgtgattgtcttatttctttccattctaaaggatttccactggacaaagcggttgcctatgcaaaactcaggaatccatttgtaatcaatgacttgaatatgcagtatctcatacaagataggagagaagtatatagtattcttcaagctgaaggtattttacttcctcgttatgctattttgaaccgtgacccaaataatcccaaagaatgtaatctgattgaaggggaagatcatgtagaagtaaatggggaagtttttcaaaagccatttgtagaaaagccagtcagtgcagaagatcacaatgtttacatttattacccaacttctgctggtggtggaagtcaaagactctttagaaagattggcagtagaagtagtgtttattctccagaaagcaatgtacgaaaaacaggctcatatatatatgaagagtttatgcccacagatggtactgatgttaaggtttatacagtgggtccagattatgcccatgctgaagctcgaaaatctccagcacttgatggcaaggtggaacgagacagtgaaggaaaagaagtaagataccctgttattctcaatgcacgagagaaattaattgcttggaaagtctgccttgcttttaagcaaacagtttgtggctttgatttgttacgggccaatggacagtcctatgtctgtgatgtcaatggcttcagttttgtgaaaaattccatgaagtattatgatgactgtgcaaaaatacttggaaatattgtaatgcgagaacttgctccacaatttcatattccatggtcaatacccttagaagctgaagatatcccaattgtaccaactacatctggaactatgatggaacttagatgtgtcatagctgttatacgtcatggggatcgaacaccaaaacaaaaaatgaaaatggaagtgagacatcagaaattttttgatctttttgaaaagtgtgatggatataaatcagggaaattaaaactcaaaaaaccaaaacagttacaggaagtgctagatattgcacgacagcttcttatggagctagggcaaaataatgattctgaaattgaagaaaacaagccaaaacttgaacaacttaagactgtattagagatgtatggtcatttttctggaataaatcgtaaggttcagttgacctatctccctcatggttgtcctaaaacatctagtgaagaggaggacagccgaagagaagaaccatctttacttttggttctaaaatggggaggtgaattaactcctgcaggcagggtccaggctgaagaacttggaagagccttcaggtgtatgtatcctggaggtcaaggagattatgcaggatttcctggttgtggtttacttagattacatagcacctacagacatgacctcaaaatatatgcctctgatgaaggacgagtccagatgactgcagctgcttttgcaaaggggcttttagctttggaaggagagcttacacccattcttgttcaaatggtgaaaagtgcaaatatgaacggtcttttggatagtgatagtgactctctgagcagttgtcagcaacgtgtgaaggcaaggcttcatgaaatacttcagaaagacagagattttactgctgaagattatgaaaagcttactccatctggaagcatttctcttatcaaatcaatgcatttaattaaaaaccctgtgaagacctgtgataaagtttattccttaattcagagtttgacttctcaaatcagacatcgaatggaagatcctaaatcatcagatattcagctttaccatagtgaaacattggagcttatgctacgtagatggtccaagttagagaaagactttaaaacaaagaatggaagatatgatattagtaaaatccctgacatatatgactgtataaaatatgatgtccagcataatggttccttgaaattagaaaacacaatggaattatataggctttcgaaggcattagcagatattgttatccctcaggaatatggtataactaaagctgaaaaactggagattgccaaaggctactgtactcctctggttagaaaaattcgctcagaccttcagaggacacaagatgatgacactgtaaataaacttcatcctgtgtattctagaggtgttctgtctcctgaacgtcatgttcgtactagattatattttaccagtgaaagtcatgtacattctttgctgtctattcttcgctatggtgccttatgcaatgaccatgattctcagaatgaagatggaggaatggtgaaggagatggaatcaaaggatgaacagtggaaacgagctatggattatttaaacgttgtcaatgagctcaactacatgactcagattgttatcatgctttatgaggatcctaataaggatctttcctcagaagaacgctttcatgttgaattacactttagtccgggagccaaaggttgtgaagaagacaaaaatttgccatctggctatggatatagaccagcttccagagagaatgaaggcaggagaccttttaaaattgataatgatgatgaaccacatacttctaaaagagatgaagttgatcgagctgtgatattgtttaaaccaatggtatcagagccaattcatatacacaggaagtctccacttccaagatctaggaagacggctacaaatgatgaagagagccccctgagtgtgtctagcccagagggtactggtacctggctgcattataccagtggtgtgggtactgggcgtcgaagacgcagatcaggggaacaaatcacttcttcccctgtctcccccaaatcattggctttcacatccagtatttttggctcatggcaacaggttgtatctgaaaatgctaattacctgagaacaccaagaactcttgtggaacagaagcagaatcctactgtagggtctcactgtgcgggcctgtttagcacctcggtgctcgggggttcttcaagcgcacctaacctacaggattatgctcgtactcatcgtaaaaagctgacctcttctggctgcatagatgacgccacacgcggttctgctgttaaaaggttttctatctcatttgctcgacacccaaccaatgaacacctacacctctataggtgctggtccgtttcctctgtggaatttctaggctccagtggctttgaattgtattccatggtgccatctatttgtcctctagaaactcttcataatgccctatctttaaagcaagtggatgaatttcttgcttccattgcttctccatcatctgacgttccacggaagaccgctgaaatttcctctacagctttacgttccagtccaataatgagaaaaaaagtatctttaaatacgtatacacctgcaaagatcctcccaacaccaccagctaccttaaagagcactaaagcaagcagcaaaccagctacaagtggaccttctagtgcagttgttcctaatacctcatctcggaaaaagaatataactagcaaaacagaaacgcatgaacacaaaaaaaacactgggaaaaagaaatgaaatcttagcagaagctggaactttttatacttataaaaatagtatgttcttatgtttctccttatgcatttatgtgttcacttaaaaatgtttttaaatctaaggttttctttgtttatgttcaggtaaggaactgttgtcatgatctggaaatgtttaaaacaatgtttgttagcattctgtgagcagcaaaacttatagtgataaaaatcgattgttgttaatatgatgtttaccatgtgcacatagtaatgaaaaggaacataaaagcccagcaggctcgtaccaaagtcacagcagtaatgctatgtactgcagagtctgatgagctggcctttgtgcacacttttattttcatgggattgcatcttagctgttaaaacttctagattgaaatttgacagccagggttacatattggggacttttaaagtgtctttccaaagagatttcattaaccgtttagattagaatatctttcccaattgttacagtgacatatatgctgcaatatttaacaactggagtattagccacatgggttattttttcaatctgtgttttgaatttttttattgtgtgttatttaaaatattacatatgcagctgggagaactacacctttgtgcacatagatttatatattaatttgtagaaaatattttctttatatatttccttaccatacaaggtgccttgttcatcaggaaaacttttgttttgtattttgacaagaaaggcaccttcagagtttctttttaagtatagttgacaagtgtataaatgttacacttactttcagagttctttttagatctaaagaagtcagttcaaaaatggaaatcaacaatgttaggagaaatctgaattctgttaagttagtaagtattatgtatagcatctgtttttaaccatttccattcttatccctagtgtatcagttgatcacactaagaaagcttaaagattgagcatttgaaataaatgctctttataaatgattagatttttgaagggatattgaaatcattgcgctgtgatttcatctgtgatgtgaaaaatcaatttattatccttggtgctttcccccccaccaatgcacaaataattgtgaacagcttgaaatgacttaaactgtaatccaaatgggacaatctgataagaatttcatgcattggtagttaaataacttaaattgctaaagctttagcttgaaatttatgtttagaaaaactattgatttcccatggtatgaatataactattgtaattcttcaaatgagactcttctcaccttaaatagtcatatattaattaacttataggaaataagcatactatatgttagctgttttaaaaggtaccagatgtaagagtcataaatatatgcaattaaagaagttcatagatttcacatgaatgtaaatgtgttatatggagacatgtcttgtaaacagttgaatgtatgtaagttttctgtttgtgaaaatgtagttaatgtactcactgtggaggtcataaggaagctactttttttttaaagtggaacctaattaaaatatttccagaatc

SEQ ID NO: 8458 - DNA, 505 bp, Homo sapiens
  source 1..505: mol_type = unassigned DNA
tttagagggcagtcctttggggaaccttggaaccacggtcagaaaggtaagaagattgctgtatcaactcaagaaagcagtaacttcactgtctttgtattttgaattgcaacaacaactttgatatcaacaatgaagcaatgatatctaagaacaaaagagtatttgccaacagtcatcataatatcaagtgattgtataagcagaaacaagctgtcacagacctgtgcgtcagctaatatatggagaatgctttcttctgatactatttacttagaggcagttttaatataaatcatttcaattatatctacatcaaataaaataaaaatgagtgaagcccccagattcttcgttggaccagaagatacagaaataaatcctggaaattatcgacatttcttccaccatgcagatgaagacgatgaggaggaagatgattctccaccagaaaggcagattgtggttggaatatgttccatggcaaagaaatccaaatccaaac

SEQ ID NO: 8459 - DNA, 7371 bp, Homo sapiens
  source 1..7371: mol_type = unassigned DNA
ggaatggaaagggaagaacctccggggttaggcgtattctagattgacgccttttgctggaagagcgctgctggggttaggattctgcgcggcgaggcaagatgctcaagtccaagacgttcttaaaaaagacccgggcgggcggcgtgatgaagatcgtgcgcgagcactacctgcgagacgacatcggctgcggtgcgcccgggtgcgcagcgtgtggaggggcgcacgaggggccggccctggagccgcagccccaggacccggcgagcagcgtctgcccgcaaccgcactacttgctgcccgacactaatgtgttactgcaccagattgatgttcttgaggaccctgccatcaggaatgtaattgtgctacaaacagttcttcaagaagtgagaaatcgcagtgcccccgtatataaacgcatccgagatgtgactaataaccaagagaagcatttctatactttcactaatgagcaccatagagaaacctatgtagaacaagaacagggagaaaatgctaatgacaggaatgatagagcgattcgagtagcagcaaaatggtacaatgaacatttgaaaaaaatgtcagcagacaaccagctgcaagttatcttcataacaaatgacaggagaaacaaagagaaagccatagaagaaggaataccagctttcacttgtgaagaatatgtaaagagcctaactgctaaccccgaactcatagatcgtcttgcttgtttgtctgaagaagggaatgaaatagaaagtggaaaaataatattttcagagcatcttcccttaagtaagctacagcaaggcataaaatctggtacataccttcaaggaacatttagagctagcagggaaaattacttggaagctacagtatggattcatggcgacaatgaagaaaataaagagataatcttacagggacttaaacatttaaacagagctgttcacgaagatattgtggctgtggagcttctccccaagagtcagtgggtagcaccatcttctgtggttttacatgatgaaggtcaaaatgaagaagatgtggagaaagaagaagagacagaacgaatgcttaagactgctgtaagcgagaaaatgttgaagcctacaggtagagttgtaggaataataaaaaggaattggagaccatattgtggcatgctttccaagtctgacattaaggagtcaagaagacatctctttacacctgctgataagagaatccctcgaattcgcatagaaaccagacaggcttccacattagaaggacggagaattattgttgctattgatggttggcccagaaattccagatatccaaatggacactttgtgagaaatttaggtgatgttggagagaaagagactgaaacagaagttttgttacttgaacacgatgttccccatcagcctttttcacaggctgttcttagttttctgccaaagatgccctggagcattactgaaaaggacatgaaaaaccgagaagacctgaggcatctgtgtatttgtagtgtagacccaccaggatgtactgatatagacgatgctctacattgtcgagaactcgaaaatggaaatttggaggttggtgttcatattgctgatgtgagccattttattaggccaggaaatgccttggatcaagaatcagccagaagaggaacaactgtgtatctttgtgaaaagaggattgacatggttccagagttgcttagctctaacttgtgttccttaaaatgtgacgtggacaggctggcattttcatgtatttgggaaatgaatcacaatgctgaaatcttaaaaacgaagtttaccaaaagtgttattaattcaaaggcatctctgacgtatgctgaagctcagttgagaattgattcagcaaacatgaatgatgatattaccactagtctccgtggactgaataaactagccaaaattctgaagaaaagaaggattgaaaaaggggctttgactctatcctctcctgaagttcgattccacatggacagtgaaactcacgatcctatagatctgcagaccaaggaacttagggaaacaaattccatggttgaagaatttatgttacttgccaatatttctgttgcaaaaaaaattcatgaggaattttctgaacatgctctgcttcgaaaacatcctgctccacctccatcaaattatgaaattcttgttaaggcagccaggtcaaggaatttggaaattaagactgatacagccaagtctttggctgagtctttggatcaggccgaatctcctacttttccatatctaaacactctgttgagaatattagccactcgctgtatgatgcaagctgtgtacttctgttctggaatggataatgattttcatcactatggcttagcgtctccaatatacacacattttacttcacccattagaagatacgcagatgtcattgttcatcggcttttggctgtggctattggggctgactgtacttatccagagttgacagacaaacacaagcttgcagatatatgtaaaaatctaaatttccggcacaaaatggctcaatatgcccaacgtgcatcagtggcttttcatacccagttattcttcaaaagcaaaggaatagtaagtgaagaagcctatattttatttgtaagaaagaatgccattgtggtattaattccaaagtatggtttagaagggacagtcttttttgaagaaaaggacaaaccaaacccacagcttatttatgatgatgagataccctcacttaaaatagaagatacagtgttccatgtatttgataaagttaaagtgaaaatcatgttagactcatctaatcttcaacatcagaagatccgaatgtccctggtagaaccacagataccaggaataagcattcctactgatacttcaaacatggaccttaatggaccaaagaaaaagaagatgaagcttggaaaatagctatattcaacaaaaatcttcaaagactggtttcttttttaaaagaaaaaacttgaaagaacacttctaagcctaagtgtgtgatacagtttgttacttttaagtacattttaataatttcagacatctgcatttttattgaacagttgactgtatctgacccatcatactactatacttctgggttgaacagaattatttatgcagaataattcaattgaatatccatcacttaaatacagtgacaggacagcaacttcagggatctgtaaagatcatttaaatggagtgctcatctcattgaggagcagattaattttgcgtaagtactttgattatttaatatttgtaagaaaaaactttcattttcctacagaggaaaatagaacaattttagaagcaaggaacaatctcttttctaagtcttggaagctgtcagtgttgaggatgtaatctcctttgccatctttaattcacctaacttacactaggtgttctcttactgtctttaaaagcttcctgtattttattagtggtccttgaaaaactgtgaatgtttgggaattggtagaaaggcaaaaagtaggatattttgacctgactggaaagatggttgtgtttttattgccaggtaataagtgtgatcattgttgaacttcagctccagtgtctctccagaataagacattggcattcaaatgtctatatcttgttacttacaaaataaaaaacagattaattagtggcttttaaattgtagttatatcagtgtatatacacgaggggaactgtataaagacatactaaagggaacagattaaaataagtattattaataaaatttggtgtgccagactgactacttcccttgctaatcacagagattagtaatgattaaattaatatcttcaggaatattttgggatagggttgccttaaaacattttacttggcttattcaatttctaaagcacttacgttgtgccaggttccactcaagtaaattatctctgccttcaaggagcttgcagtatagtgagaaaagcctgccaagtaaatcagcaggtatactaaataggtagtcatttaggcactcaataaatgttgactaatttttccagtttcctattactgaggaaaacctccatacactgaggcagaaacttgtgtcagttggaggaaaatagacttgagtagtctttggtccaggtaaaatgggtcagtgacactgaaacagtagagtaggagtcaaaaaaccttttctgtgaagtgctagaacattttagactttgttggctatggtctgtattgcaactatagtacacaactctgccgttgatagtgtgtaaggagccatatacaatatgtaaacaaatcaacatgactgtgtttcaacaaggcctgatttgttaagtttcatatatagtcatatgtcacttaatgacagggatatgttctgagacatgtcacttggcaatttcatcattgtgtgaaaatcatgatgtagttacacaaacctagatggtataccctatggtatcctatatgggatagcctattgctcctaacctacaaacctgtatggcatattactgtactgattactgtaggcggttgtaacacagtgctaagtatttgtgtatctaaacatatctaaacatagaaaaggtacagtaaaaatatatatatagatatatataagatataaaatggtacacctatttaggacatttaccatgaacaagttggcaggactggaagctggctctgggtgagtcagtaagtggttagtgaatgtgaaggccatgatattactgtgcactactgtagacttttataaacactatatacttaggctacataaagtaatttcactatgatgttaccatggctgtgtccccaggcaataggaatttttcagctccattgtaatcttacgggatcatcatcgtatatttggccattgttgaccaaaagttatgcagcacatcattataattttgatgtgtcacaaaacattactcatttgatttcccccacccccgccaaccatttaaaaaagtttgccggctaggtgcggtggctcatgcctgtaatcctagcattttgggaggacgaggcgggtggatcactcgatgtcaggagtttgagaccagcctggccaacatggtaaaacgccgtctctactaaaaatacaaaaacttagctgggtgtaacggcggatgcctgtaatcccagctacttgggaggctgaggcaggagaatcgcttgaacctgggaggcggaagttgcagtgagccgagattgcaccactgcagttcagcctggatgatgagagtgagactccatcgcaaaaaaaaaaaaaaaaaaagaaaagaaaattagccaggtgtggtggcaagtgcctttaatcccacctcaggaggctgaggcaggagaatcgcttgaacctgggaggcagaggttgcagtgagccaagatcgcgccactgcactccagcctgggtgacagaacaagactgtctcaaaaaaaaaaaaagagaagaaaaactgcctacaggccatagttaacctgcaatagagaagaaagggaagtagggcagtgcatgactggccttaggttttttctttccaagtttattttcttgtgcttcagctactagaaaggtttaattcagggataagtcccaattgagtagttcaagatgatcagagactttgctattttcccctaagttctattccataatctaaaatgttctgtttctagtgccagttcttatgctaagcaggttacgtggaatatatcacttaactcaaaaagccctgttaagccaggactgttatctccatttaacagatgagaaaatggaggtttatggtctgttctcacactgctacgaagaaataccccaaactgggtaattattataaaggaaagaggtttaatggactcagttccgcattgctggtgaggcctcaggacacttacacaatcatggcagaaaaaggagaagcaggcacctttttcacagggcggcaggatgaaaatgactgccagcagtggaaatgccagacgcttataaaaccttcagatctcatgagaccggctcactatcacaggaacagcatggaggaaaccgcccccatgatccagttacctccacctggtcccacccttgacacgtggggattgctacaattcaaggttagatttgggtgaggacacagagccataccatatcagcccagatcaagtagtgacagagtagggatttgaatacaggttatagtcactattgtgttatttcttgacttttgtactattaaaaaactgtagccagtgaggcttctacccttagtacccagaactccttttaggtatagcaattgtttttaggtaaatttatattgagtttaacacctgtgtgattaaagacaactttccaatgtagtatctgtagccatgtcccctaatggctattagtgttcatggttagtgtgttgaagatgagccaggtacataacgcggcacattttctgcaggtcagcagtaaggtttcaaggtacagttatggaggaaagaagaaaatgacacattgataacacaggtctttattcccttttgaatgagacagtttttaaaagttgatttataaatacaaaaatacattctccaaagatagtatttccaaactgttatatacccatctactcccaacatggatataagttttttaaaaaaatagttgtatataacatacatatctgccccagtgttacttcacaggcctatgccctacgggaactccactctcccagccccactttttctcttggttctcccacattcttattctcccacatccctacccacgtttgagctggaaaggatgtccctaccctaggcatgaggtatattttattctgggcaccacacatttgccccatagataacaatacacgtgatgatgtcactagtactacctttctagtatttacatacttaaaagtagtaactagaacagttatcactggaactaagaattttccccacagaggtgaacagaccaagaactaaaatttcaggaaacctgtttaatttcttttgtatctttgaaaagttagttttatatctaagatttcttcacataggttataattcatctgtatgttcaagcttttatgtaaaaatatatagtgccttcagttttaacatagtttcacatgttctcagaactgctaaattcagtgctaccagtaaggcttaataagtagttcattgaccctgtaagataggagcactcagctctgtcacaatttgttgttaaacacatcactcaatgtaagtataaaaatatttattgataaaaaataaacttataattcagcaa

SEQ ID NO: 8460 - DNA, 3651 bp, Homo sapiens
  source 1..3651: mol_type = unassigned DNA
gtgaggtggcgtccagaaggaagccccgcctaggccacgggcggaaatggctcctcgccttgctttgccgcccctccccactctcgcccaatccccgcggccgtcagagagccaaccaatgtttatctcggcattttcccgcgagaagtgttactaatatccgggaatggaaagggaagaacctccggggttaggcgtattctagattgacgccttttgctggaagagcgctgctggggttaggattctgcgcggcgaggcaagatgctcaagtccaagacgttcttaaaaaagacccgggcgggcggcgtgatgaagatcgtgcgcgagcactacctgcgagacgacatcggctgcggtgcgcccgggtgcgcagcgtgtggaggggcgcacgaggggccggccctggagccgcagccccaggacccggcgagcagcgtctgcccgcaaccgcactacttgctgcccgacactaatgtgttactgcaccagattgtaagtgcctggaggccggggacctgggcttctgtggcctccagcctgcgactcccaggcagcttattgatgttcttgaggaccctgccatcaggaatgtaattgtgctacaaacagttcttcaagaagtgagaaatcgcagtgcccccgtatataaacgcatccgagatgtgactaataaccaagagaagcatttctatactttcactaatgagcaccatagagaaacctatgtagaacaagaacagggagaaaatgctaatgacaggaatgatagagcgattcgagtagcagcaaaatggtacaatgaacatttgaaaaaaatgtcagcagacaaccagctgcaagttatcttcataacaaatgacaggagaaacaaagagaaagccatagaagaaggaataccagctttcacttgtgaagaatatgtaaagagcctaactgctaaccccgaactcatagatcgtcttgcttgtttgtctgaagaagggaatgaaatagaaagtggaaaaataatattttcagagcatcttcccttaagtaagctacagcaaggcataaaatctggtacataccttcaaggaacatttagagctagcagggaaaattacttggaagctacagtatggattcatggcgacaatgaagaaaataaagagataatcttacagggacttaaacatttaaacagagctgttcacgaagatattgtggctgtggagcttctccccaagagtcagtgggtagcaccatcttctgtggttttacatgatgaaggtcaaaatgaagaagatgtggagaaagaagaagagacagaacgaatgcttaagactgctgtaagcgagaaaatgttgaagcctacaggtagagttgtaggaataataaaaaggaattggagaccatattgtggcatgctttccaagtctgacattaaggagtcaagaagacatctctttacacctgctgataagagaatccctcgaattcgcatagaaaccagacaggcttccacattagaaggacggagaattattgttgctattgatggttggcccagaaattccagatatccaaatggacactttgtgagaaatttaggtgatgttggagagaaagagactgaaacagaagttttgttacttgaacacgatgttccccatcagcctttttcacaggctgttcttagttttctgccaaagatgccctggagcattactgaaaaggacatgaaaaaccgagaagacctgaggcatctgtgtatttgtagtgtagacccaccaggatgtactgatatagacgatgctctacattgtcgagaactcgaaaatggaaatttggaggttggtgttcatattgctgatgtgagccattttattaggccaggaaatgccttggatcaagaatcagccagaagaggaacaactgtgtatctttgtgaaaagaggattgacatggttccagagttgcttagctctaacttgtgttccttaaaatgtgacgtggacaggctggcattttcatgtatttgggaaatgaatcacaatgctgaaatcttaaaaacgaagtttaccaaaagtgttattaattcaaaggcatctctgacgtatgctgaagctcagttgagaattgattcagcaaacatgaatgatgatattaccactagtctccgtggactgaataaactagccaaaattctgaagaaaagaaggattgaaaaaggggctttgactctatcctctcctgaagttcgattccacatggacagtgaaactcacgatcctatagatctgcagaccaaggaacttagggaaacaaattccatggttgaagaatttatgttacttgccaatatttctgttgcaaaaaaaattcatgaggaattttctgaacatgctctgcttcgaaaacatcctgctccacctccatcaaattatgaaattcttgttaaggcagccaggtcaaggaatttggaaattaagactgatacagccaagtctttggctgagtctttggatcaggccgaatctcctacttttccatatctaaacactctgttgagaatattagccactcgctgtatgatgcaagctgtgtacttctgttctggaatggataatgattttcatcactatggcttagcgtctccaatatacacacattttacttcacccattagaagatacgcagatgtcattgttcatcggcttttggctgtggctattggggctgactgtacttatccagagttgacagacaaacacaagcttgcagatatatgtaaaaatctaaatttccggcacaaaatggctcaatatgcccaacgtgcatcagtggcttttcatacccagttattcttcaaaagcaaaggaatagtaagtgaagaagcctatattttatttgtaagaaagaatgccattgtggtattaattccaaagtatggtttagaagggacagtcttttttgaagaaaaggacaaaccaaacccacagcttatttatgatgatgagataccctcacttaaaatagaagatacagtgttccatgtatttgataaagttaaagtgaaaatcatgttagactcatctaatcttcaacatcagaagatccgaatgtccctggtagaaccacagataccaggaataagcattcctactgatacttcaaacatggaccttaatggaccaaagaaaaagaagatgaagcttggaaaatagctatattcaacaaaaatcttcaaagactggtttcttttttaaaagaaaaaacttgaaagaacacttctaagcctaagtgtgtgatacagtttgttacttttaagtacattttaataatttcagacatctgcatttttattgaacagttgactgtatctgacccatcatactactatacttctgggttgaacagaattatttatgcagaataattcaattgaatatccatcacttaaatacagtgacaggacagcaacttcagggatctgtaaagatcatttaaatggagtgctcatctcattgaggagcagattaattttgcgtaataagtgtgatcattgttgaacttcagctccagtgtctctccagaataagacattggcattcaaatgtctatatcttgttacttacaaaataaaaaacagattaattagtggctttt

SEQ ID NO: 8461 - DNA, 5232 bp, Homo sapiens
  source 1..5232: mol_type = unassigned DNA
aagggaagaacctccggggttaggcgtattctagattgacgccttttgctggaagagcgctgctggggttaggattctgcgcggcgaggcaagatgctcaagtccaagacgttcttaaaaaagacccgggcgggcggcgtgatgaagatcgtgcgcgagcactacctgcgagacgacatcggctgcggtgcgcccgggtgcgcagcgtgtggaggggcgcacgaggggccggccctggagccgcagccccaggacccggcgagcagcgtctgcccgcaaccgcactacttgctgcccgacactaatgtgttactgcaccagattgtaagtgcctggaggccggggacctgggcttctgtggcctccagcctgcgactcccaggcagcttagaaacctatgtagaacaagaacagggagaaaatgctaatgacaggaatgatagagcgattcgagtagcagcaaaatggtacaatgaacatttgaaaaaaatgtcagcagacaaccagctgcaagttatcttcataacaaatgacaggagaaacaaagagaaagccatagaagaaggaataccagctttcacttgtgaagaatatgtaaagagcctaactgctaaccccgaactcatagatcgtcttgcttgtttgtctgaagaagggaatgaaatagaaagtggaaaaataatattttcagagcatcttcccttaagtaagctacagcaaggcataaaatctggtacataccttcaaggaacatttagagctagcagggaaaattacttggaagctacagtatggattcatggcgacaatgaagaaaataaagagataatcttacagggacttaaacatttaaacagagctgttcacgaagatattgtggctgtggagcttctccccaagagtcagtgggtagcaccatcttctgtggttttacatgatgaaggtcaaaatgaagaagatgtggagaaagaagaagagacagaacgaatgcttaagactgctgtaagcgagaaaatgttgaagcctacaggtagagttgtaggaataataaaaaggaattggagaccatattgtggcatgctttccaagtctgacattaaggagtcaagaagacatctctttacacctgctgataagagaatccctcgaattcgcatagaaaccagacaggcttccacattagaaggacggagaattattgttgctattgatggttggcccagaaattccagatatccaaatggacactttgtgagaaatttaggtgatgttggagagaaagagactgaaacagaagttttgttacttgaacacgatgttccccatcagcctttttcacaggctgttcttagttttctgccaaagatgccctggagcattactgaaaaggacatgaaaaaccgagaagacctgaggcatctgtgtatttgtagtgtagacccaccaggatgtactgatatagacgatgctctacattgtcgagaactcgaaaatggaaatttggaggttggtgttcatattgctgatgtgagccattttattaggccaggaaatgccttggatcaagaatcagccagaagaggaacaactgtgtatctttgtgaaaagaggattgacatggttccagagttgcttagctctaacttgtgttccttaaaatgtgacgtggacaggctggcattttcatgtatttgggaaatgaatcacaatgctgaaatcttaaaaacgaagtttaccaaaagtgttattaattcaaaggcatctctgacgtatgctgaagctcagttgagaattgattcagcaaacatgaatgatgatattaccactagtctccgtggactgaataaactagccaaaattctgaagaaaagaaggattgaaaaaggggctttgactctatcctctcctgaagttcgattccacatggacagtgaaactcacgatcctatagatctgcagaccaaggaacttagggaaacaaattccatggttgaagaatttatgttacttgccaatatttctgttgcaaaaaaaattcatgaggaattttctgaacatgctctgcttcgaaaacatcctgctccacctccatcaaattatgaaattcttgttaaggcagccaggtcaaggaatttggaaattaagactgatacagccaagtctttggctgagtctttggatcaggccgaatctcctacttttccatatctaaacactctgttgagaatattagccactcgctgtatgatgcaagctgtgtacttctgttctggaatggataatgattttcatcactatggcttagcgtctccaatatacacacattttacttcacccattagaagatacgcagatgtcattgttcatcggcttttggctgtggctattggggctgactgtacttatccagagttgacagacaaacacaagcttgcagatatatgtaaaaatctaaatttccggcacaaaatggctcaatatgcccaacgtgcatcagtggcttttcatacccagttattcttcaaaagcaaaggaatagtaagtgaagaagcctatattttatttgtaagaaagaatgccattgtggtattaattccaaagtatggtttagaagggacagtcttttttgaagaaaaggacaaaccaaacccacagcttatttatgatgatgagataccctcacttaaaatagaagatacagtgttccatgtatttgataaagttaaagtgaaaatcatgttagactcatctaatcttcaacatcagaagatccgaatgtccctggtagaaccacagataccaggaataagcattcctactgatacttcaaacatggaccttaatggaccaaagaaaaagaagatgaagcttggaaaatagctatattcaacaaaaatcttcaaagactggtttcttttttaaaagaaaaaacttgaaagaacacttctaagcctaagtgtgtgatacagtttgttacttttaagtacattttaataatttcagacatctgcatttttattgaacagttgactgtatctgacccatcatactactatacttctgggttgaacagaattatttatgcagaataattcaattgaatatccatcacttaaatacagtgacaggacagcaacttcagggatctgtaaagatcatttaaatggagtgctcatctcattgaggagcagattaattttgcgtaagtactttgattatttaatatttgtaagaaaaaactttcattttcctacagaggaaaatagaacaattttagaagcaaggaacaatctcttttctaagtcttggaagctgtcagtgttgaggatgtaatctcctttgccatctttaattcacctaacttacactaggtgttctcttactgtctttaaaagcttcctgtattttattagtggtccttgaaaaactgtgaatgtttgggaattggtagaaaggcaaaaagtaggatattttgacctgactggaaagatggttgtgtttttattgccaggtaataagtgtgatcattgttgaacttcagctccagtgtctctccagaataagacattggcattcaaatgtctatatcttgttacttacaaaataaaaaacagattaattagtggcttttaaattgtagttatatcagtgtatatacacgaggggaactgtataaagacatactaaagggaacagattaaaataagtattattaataaaatttggtgtgccagactgactacttcccttgctaatcacagagattagtaatgattaaattaatatcttcaggaatattttgggatagggttgccttaaaacattttacttggcttattcaatttctaaagcacttacgttgtgccaggttccactcaagtaaattatctctgccttcaaggagcttgcagtatagtgagaaaagcctgccaagtaaatcagcaggtatactaaataggtagtcatttaggcactcaataaatgttgactaatttttccagtttcctattactgaggaaaacctccatacactgaggcagaaacttgtgtcagttggaggaaaatagacttgagtagtctttggtccaggtaaaatgggtcagtgacactgaaacagtagagtaggagtcaaaaaaccttttctgtgaagtgctagaacattttagactttgttggctatggtctgtattgcaactatagtacacaactctgccgttgatagtgtgtaaggagccatatacaatatgtaaacaaatcaacatgactgtgtttcaacaaggcctgatttgttaagtttcatatatagtcatatgtcacttaatgacagggatatgttctgagacatgtcacttggcaatttcatcattgtgtgaaaatcatgatgtagttacacaaacctagatggtataccctatggtatcctatatgggatagcctattgctcctaacctacaaacctgtatggcatattactgtactgattactgtaggcggttgtaacacagtgctaagtatttgtgtatctaaacatatctaaacatagaaaaggtacagtaaaaatatatatatagatatatataagatataaaatggtacacctatttaggacatttaccatgaacaagttggcaggactggaagctggctctgggtgagtcagtaagtggttagtgaatgtgaaggccatgatattactgtgcactactgtagacttttataaacactatatacttaggctacataaagtaatttcactatgatgttaccatggctgtgtccccaggcaataggaatttttcagctccattgtaatcttacgggatcatcatcgtatatttggccattgttgaccaaaagttatgcagcacatcattataattttgatgtgtcacaaaacattactcatttgatttcccccacccccgccaaccatttaaaaaagtttgccggctaggtgcggtggctcatgcctgtaatcctagcattttgggaggacgaggcgggtggatcactcgatgtcaggagtttgagaccagcctggccaacatggtaaaacgccgtctctactaaaaatacaaaaacttagctgggtgtaacggcggatgcctgtaatcccagctacttgggaggctgaggcaggagaatcgcttgaacctgggaggcggaagttgcagtgagccgagattgcaccactgcagttcagcctggatgatgagagtgagactccatcgc

SEQ ID NO: 8462 - DNA, 3763 bp, Homo sapiens
  source 1..3763: mol_type = unassigned DNA
attaattacccggtattagtattaatacggcggctccattcccacatggacctgggggggacaaacaaagtctcctaatcttggacagctgcgcccagcccttcttcacctgccgtccaggtatcatcctagtcttccctccgtctctgggatgggaaactcttgtctagtgatgtgactcattacgtgatcccagactggaaagttgttcaagattatcttgagatccttgagtttcctgagttgaagggaattattttcatgcagacagcttgtcaagctgtgcagcatcaaagaggcaggagacagtataacaaactgcgaaacctgctgaaggatgcgcgtcatgattgcattctctttgctaatgaattccagcaatgctgctatctgccacgggaaagaggagagtccatggagaagtggcagaccaggagcatatacaacgcagctgtttggtactatcatcactgccaggacaggatgccaattgttatggtgacagaagatgaagaggcaattcagcagtatggaagtgaaacagaaggagtattcgtgattactttcaagaattacctggacaatttctggcctgatttaaaagctgcccacgagctttgtgattctatccttcagtctcgacgggagagagagaatgagagtcaggagagccatgggaaggagtacccagaacatcttcccctggaagtgttagaagctgggattaaatctggacgctatatccagggaattctgaatgtcaacaaacacagagcccaaatagaagcttttgttcgacttcaaggagccagcagtaaagattcagatttagtcagtgacatcctaatccacgggatgaaggctcgaaaccgctcaattcatggagatgtggtagttgtggagctgcttcctaaaaatgaatggaaaggaagaaccgtagccctgtgtgagaatgactgtgacgacaaggcttcgggcgagtccccaagtgagcccatgcctacaggtcgagtggtgggcatacttcagaagaactggcgggattatgtggtgacatttccgtccaaagaagaggtccaatctcagggcaaaaatgctcagaaaatcctggttacaccttgggattacagaattcccaaaattcgaattagcactcagcaagcagaaaccctccaggacttcagggtggtcgtgcgcatcgattcctgggagtcaacatctgtgtatccaaatggacattttgtgcgtgttttaggaagaatcggagatctggaaggggaaattgcaaccatcctggtggaaaacagtatttcagttattcctttctcagaagctcagatgtgtgagatgccagtaaacacaccagaaagtccctggaaggtgagtcctgaagaggaacaaaaacgtaaagacttgaggaaaagccatctcgtattcagcattgaccccaaaggttgtgaagatgtggatgacacactctcagtcagaaccttaaataatggcaacctggaacttggggtccacatcgcagatgtaacacactttgtggcaccaaattcttacattgatattgaagctagaacaagggccaccacttattatctagcagatcgtcgctatgacatgctgccttccgtcctcagtgcagatttgtgttcccttctgggaggcgttgataggtatgctgtaagcatcatgtgggaactggataaagcctcttatgaaattaagaaagtgtggtatggcagaaccattattcgatcagcatacaaactgttctatgaagcagcccaagaactactggatggaaacttaagcgttgttgatgatattccagaattcaaagacttggatgagaagagcagacaagccaagctggaggagttggtgtgggcaattggaaagctgaccgacatagctcgccatgtcagagctaaacgagacggatgtggtgccctggaactggaaggggtagaggtttgcgtacagctagatgacaaaaagaacattcacgacctcatccccaagcagcccctggaagtccacgagacagtggctgaatgcatgatcctggccaaccactgggtcgccaaaaagatctgggagagcttccctcatcaggccttgctgcgccagcaccctcctccacaccaggagttcttttcagaactccgggaatgtgctaaagccaaaggcttcttcatagatacacggtccaataaaacactggctgattctctggataatgcgaacgacccccacgatcccattgtgaacaggctactgcgctccatggccacgcaggccatgtcgaatgctctgtacttctccaccggatcctgtgcggaggaggagttccatcattacggtcttgcattagataaatatacccactttacttctccaataagaagatattcagatattgtagtacaccgcttgttaatggcagccatttcaaaagataagaaaatggaaattaagggaaatctgttcagcaacaaagatcttgaggaattatgcagacatatcaacaacagaaaccaagcagcacagcattctcagaagcagtctactgagctcttccagtgcatgtacttcaaagacaaagaccctgccaccgaggagcgttgcatatctgacggagttatttattcaattagaacaaatggtgtgcttctatttataccaaggtttgggattaaaggtgctgcttatctaaaaaataaagatggtttagtcatctcatgtggcccagatagctgttctgaatggaaaccaggatcccttcaacgatttcaaaacaaaattacctctactacaacagatggggaatctgttacgttccatttgtttgaccatgtaaccgtaagaatatccatacaggcctcacgttgccattctgatacaatcagacttgaaataattagtaacaaaccatacaagataccaaatacagaacttattcatcagagttcccccttgctgaagagtgagttagtgaaagaagtaactaaatctgtggaagaagctcagcttgcccaagaagtcaaagtaaacatcattcaggaggaatatcaagaatatcgccaaacaaagggaaggagcctatacacacttctagaggagatacgggacctagctctcctggatgtttcaaacaattatggaatatgagaggctcttacttcactaagagctgtcatatgtgaatgttttacagtcttttcaaacttaacatttaatgtgtgtcactcagtgctctagtcgatcaggactgggtagctatttcgcatatatgtaaaatgttctcagccgggcacggtggctcacgcctgtaaccccagcactttgggaggctgaggcgggcggatcacgaggtcaggagattgagaccatcctggctaacacggtgaaacccagtctctactaaaaatacaaaaattagcccggcgtggtggcatgcgcctgtagtcccagctacttgggaggctgaagcaggagaattgcctgaacccaggaagaggaggttgcagtgagccgagatcgcaccactgcattccagcctgggcaacagagcgagactccatctcaaaaaaaaaaaaaaaaaaaaaaaaagttctctcattcattaaagttgcattaaataaagtataattaggtcactatggaaacagagttttcagtaatgagtggacagtaagtggtggctctgcagatggcccctttctaataagtttaataaacccgaaattactggtta

SEQ ID NO: 8463 - DNA, 3621 bp, Homo sapiens
  source 1..3621: mol_type = unassigned DNA
gcggccgccgggagacacgccgccatgctgcagaagcgggagaaggtgctgctgctgaggaccttccagggccgcacgctgcggatcgtgcgcgagcactacctgcggccctgcgtgccctgccacagcccgctctgcccgcagcccgccgcctgcagccacgatgggaaactcttgtctagtgatgtgactcattacgtgatcccagactggaaagttgttcaagattatcttgagatccttgagtttcctgagttgaagggaattattttcatgcagacagcttgtcaagctgtgcagcatcaaagaggcaggagacagtataacaaactgcgaaacctgctgaaggatgcgcgtcatgattgcattctctttgctaatgaattccagcaatgctgctatctgccacgggaaagaggagagtccatggagaagtggcagaccaggagcatatacaacgcagctgtttggtactatcatcactgccaggacaggatgccaattgttatggtgacagaagatgaagaggcaattcagcagtatggaagtgaaacagaaggagtattcgtgattactttcaagaattacctggacaatttctggcctgatttaaaagctgcccacgagctttgtgattctatccttcagtctcgacgggagagagagaatgagagtcaggagagccatgggaaggagtacccagaacatcttcccctggaagtgttagaagctgggattaaatctggacgctatatccagggaattctgaatgtcaacaaacacagagcccaaatagaagcttttgttcgacttcaaggagccagcagtaaagattcagatttagtcagtgacatcctaatccacgggatgaaggctcgaaaccgctcaattcatggagatgtggtagttgtggagctgcttcctaaaaatgaatggaaaggaagaaccgtagccctgtgtgagaatgactgtgacgacaaggcttcgggcgagtccccaagtgagcccatgcctacaggtcgagtggtgggcatacttcagaagaactggcgggattatgtggtgacatttccgtccaaagaagaggtccaatctcagggcaaaaatgctcagaaaatcctggttacaccttgggattacagaattcccaaaattcgaattagcactcagcaagcagaaaccctccaggacttcagggtggtcgtgcgcatcgattcctgggagtcaacatctgtgtatccaaatggacattttgtgcgtgttttaggaagaatcggagatctggaaggggaaattgcaaccatcctggtggaaaacagtatttcagttattcctttctcagaagctcagatgtgtgagatgccagtaaacacaccagaaagtccctggaaggtgagtcctgaagaggaacaaaaacgtaaagacttgaggaaaagccatctcgtattcagcattgaccccaaaggttgtgaagatgtggatgacacactctcagtcagaaccttaaataatggcaacctggaacttggggtccacatcgcagatgtaacacactttgtggcaccaaattcttacattgatattgaagctagaacaagggccaccacttattatctagcagatcgtcgctatgacatgctgccttccgtcctcagtgcagatttgtgttcccttctgggaggcgttgataggtatgctgtaagcatcatgtgggaactggataaagcctcttatgaaattaagaaagtgtggtatggcagaaccattattcgatcagcatacaaactgttctatgaagcagcccaagaactactggatggaaacttaagcgttgttgatgatattccagaattcaaagacttggatgagaagagcagacaagccaagctggaggagttggtgtgggcaattggaaagctgaccgacatagctcgccatgtcagagctaaacgagacggatgtggtgccctggaactggaaggggtagaggtttgcgtacagctagatgacaaaaagaacattcacgacctcatccccaagcagcccctggaagtccacgagacagtggctgaatgcatgatcctggccaaccactgggtcgccaaaaagatctgggagagcttccctcatcaggccttgctgcgccagcaccctcctccacaccaggagttcttttcagaactccgggaatgtgctaaagccaaaggcttcttcatagatacacggtccaataaaacactggctgattctctggataatgcgaacgacccccacgatcccattgtgaacaggctactgcgctccatggccacgcaggccatgtcgaatgctctgtacttctccaccggatcctgtgcggaggaggagttccatcattacggtcttgcattagataaatatacccactttacttctccaataagaagatattcagatattgtagtacaccgcttgttaatggcagccatttcaaaagataagaaaatggaaattaagggaaatctgttcagcaacaaagatcttgaggaattatgcagacatatcaacaacagaaaccaagcagcacagcattctcagaagcagtctactgagctcttccagtgcatgtacttcaaagacaaagaccctgccaccgaggagcgttgcatatctgacggagttatttattcaattagaacaaatggtgtgcttctatttataccaaggtttgggattaaaggtgctgcttatctaaaaaataaagatggtttagtcatctcatgtggcccagatagctgttctgaatggaaaccaggatcccttcaacgatttcaaaacaaaattacctctactacaacagatggggaatctgttacgttccatttgtttgaccatgtaaccgtaagaatatccatacaggcctcacgttgccattctgatacaatcagacttgaaataattagtaacaaaccatacaagataccaaatacagaacttattcatcagagttcccccttgctgaagagtgagttagtgaaagaagtaactaaatctgtggaagaagctcagcttgcccaagaagtcaaagtaaacatcattcaggaggaatatcaagaatatcgccaaacaaagggaaggagcctatacacacttctagaggagatacgggacctagctctcctggatgtttcaaacaattatggaatatgagaggctcttacttcactaagagctgtcatatgtgaatgttttacagtcttttcaaacttaacatttaatgtgtgtcactcagtgctctagtcgatcaggactgggtagctatttcgcatatatgtaaaatgttctcagccgggcacggtggctcacgcctgtaaccccagcactttgggaggctgaggcgggcggatcacgaggtcaggagattgagaccatcctggctaacacggtgaaacccagtctctactaaaaatacaaaaattagcccggcgtggtggcatgcgcctgtagtcccagctacttgggaggctgaagcaggagaattgcctgaacccaggaagaggaggttgcagtgagccgagatcgcaccactgcattccagcctgggcaacagagcgagactccatctcaaaaaaaaaaaaaaaa

SEQ ID NO: 8464 - DNA, 1504 bp, Homo sapiens
  source 1..1504: mol_type = unassigned DNA
gcgcccagcccttcttcacctgccgtccaggtatcatcctagtcttccctccgtctctgggatgggaaactcttgtctagtgatgtgactcattacgtgatcccagactggaaagttgttcaagattatcttgagatccttgagtttcctgagttgaagggaattattttcatgcagacagcttgtcaagctgtgcagcatcaaagaggcaggagcaatgctgctatctgccacgggaaagaggagagtccatggagaagtggcagaccaggagcatatacaacgcagctgtttggtactatcatcactgccaggacaggatgccaattgttatggtgacagaagatgaagaggcaattcagcagtatggaagtgaaacagaaggagtattcgtgattactttcaagaattacctggacaatttctggcctgatttaaaagctgcccacgagctttgtgattctatccttcagtctcgacgggagagagagaatgagagtcaggagagccatgggaaggagtacccagaacatcttcccctggaagtgttagaagctgggattaaatctggacgctatatccagggaattctgaatgtcaacaaacacagagcccaaatagaagcttttgttcgacttcaaggagccagcagtaaagattcagatttagtcagtgacatcctaatccacgggatgaaggctcgaaaccgctcaattcatggagatgtggtagttgtggagctgcttcctaaaaatgaatggaaaggaagaaccgtagccctgtgtgagaatgactgtgacgacaaggcttcgggcgagtccccaagtgagcccatgcctacaggacttcagggtggtcgtgcgcatcgattcctgggagtcaacatctgtgtatccaaatggacattttgtgcgtgttttaggaagaatcggagatctggaaggggaaattgcaaccatcctggtggaaaacagtatttcagttattcctttctcagaagctcagatgtgtgagatgccagtaaacacaccagaaagtccctggaaggtgagtcctgaagaggaacaaaaacgtaaagacttgaggaaaagccatctcgtattcagcattgaccccaaaggttgtgaagatgtggatgacacactctcagtcagaaccttaaataatggcaacctggaacttggggtccacatcgcagatgtaacacactttgtggcaccaaattcttacattgatattgaagctagaacaagggccaccacttattatctagcagatcgtcgctatgacatgctgccttccgtcctcagtgcagatttgtgttcccttctgggaggcgttgataggtatgctgtaagcatcatgtgggaactggataaagcctcttatgaaattaagaaagtgtggtatggcagaaccattattcgatcagcatacaaactgttctatgaagcagcccaagaactactggatggaaacttaagcgttgttgatgatattccag

SEQ ID NO: 8465 - DNA, 873 bp, Homo sapiens
  source 1..873: mol_type = unassigned DNA
cagggccgcacgctgcggatcgtgcgcgagcactacctgcggccctgcgtgccctgccacagcccgctctgcccgcagcccgccgcctgcagccacgatgggaaactcttgtctagtgatgtgactcattacgtgatcccagactggaaagttgttcaagattatcttgagatccttgagtttcctgagttgaagggaattattttcatgcagacagcttgtcaagctgtgcagcatcaaagaggcaggagcaagagatagcagtggatgagtacctgctttgttagagttatttttctcctccgtgtcacagacagtataacaaactgcgaaacctgctgaaggatgcgcgtcatgattgcattctctttgctaatgaattccagcaatgctgctatctgccacgggaaagaggagagtccatggagaagtggcagaccaggagcatatacaacgcagctgtttggtactatcatcactgccaggacaggatgccaattgttatggtgacagaagatgaagaggcaattcagcagtatggaagtgaaacagaaggagtattcgtgattactttcaagaattacctggacaatttctggcctgatttaaaagctgcccacgagctttgtgattctatccttcagtctcgacgggagagagagaatgagagtcaggagagccatgggaaggagtacccagaacatcttcccctggaagtgttagaagctgggattaaatctggacgctatatccagggaattctgaatgtcaacaaacacagagcccaaatagaagcttttgttcgacttcaaggagccagcagtaaagattcagatttagtcagtgacatcctaatccacgggatgaaggctc

SEQ ID NO: 8466 - DNA, 360 bp, Homo sapiens
  source 1..360: mol_type = unassigned DNA
ctaatcttggacagctgcgcccagcccttcttcacctgccgtccaggtatcatcctagtcttccctccgtctctgggatgggaaactcttgtctagtgatgtgactcattacgtgatcccagactggaaagttgttcaagattatcttgagatccttgagtttcctgagttgaagggaattattttcatgcagacagcttgtcaagctgtgcagcatcaaagaggcaggagacagtataacaaactgcgaaacctgctgaaggatgcgcgtcatgattgcattctctttgctaatgaattccagcaatgctgctatctgccacgggaaagaggagagtccatggagaagtggcagaccag

SEQ ID NO: 8467 - DNA, 792 bp, Homo sapiens
  source 1..792: mol_type = unassigned DNA
tcccgccgcaacctcgcgccgtggagaaatggggaggtcccgagctgggagcccccgggagctacaggccagctgctgccgctgcgaagctgacatcgcctgctttgcagccacaggtttcctgacctgcccgcactgttgccccagacttttcccccagtggagagccacttcaccgtagatttgtgaactctctgggcccgcactggagcggaaggtcacggggaagttggactggggactcctgggccccagtccttggtttctaggccacaagggtggccgatagaacgatgcacgttactggctctcttcccccatgggaggatgagaatgggctgggggtccttgtcagcgaatgtgtggaatcctccaaacattgtgattaagatgggaaactcttgtctagtgatgtgactcattacgtgatcccagactggaaagttgttcaagattatcttgagatccttgagtttcctgagttgaagggaattattttcatgcagacagcttgtcaagctgtgcagcatcaaagaggcaggagacagtataacaaactgcgaaacctgctgaaggatgcgcgtcatgattgcattctctttgctaatgaattccagcaatgctgctatctgccacgggaaagaggagagtccatggagaagtggcagaccaggagcatatacaacgcagctgtttggtactatcatcactgccaggacaggatgccaattgttatggtgacagaagatgaagaggcaattcagcagtatggaagtgaaacagaaggagtat

SEQ ID NO: 8468 - DNA, 504 bp, Homo sapiens
  source 1..504: mol_type = unassigned DNA
gacacggaggcgtaggccccgcggcctgcgcccgctcgccggcctcaccccccggctctctgccggtggggacccagcggcccggatgggaaactcttgtctagtgatgtgactcattacgtgatcccagactggaaagttgttcaagattatcttgagatccttgagtttcctgagttgaagggaattattttcatgcagacagcttgtcaagctgtgcagcatcaaagaggcaggagacagtataacaaactgcgaaacctgctgaaggatgcgcgtcatgattgcattctctttgctaatgaattccagcaatgctgctatctgccacgggaaagaggagagtccatggagaagtggcagaccaggagcatatacaacgcagctgtttggtactatcatcactgccaggacaggatgccaattgttatggtgacagaagatgaagaggcaattcagcagtatggaagtgaaacagaaggagtattcgtgattactttcaag

SEQ ID NO: 8469 - DNA, 3201 bp, Homo sapiens
  source 1..3201: mol_type = unassigned DNA
atgcgggggttgtccatctctgtatccccagtgccagcactgcacctcgccccaagcagttgtccaataaatgagcagtgagtaaatgaaagaatgagcaaagccttgtaacaggaaaggggccggcggcgtctgccgtgcaagacctggcccagtggagcagagcctggaggttcaggagccgggtctggaaggctccttccggtggaagaggggcccggagccagccggcgcctggcacaaggcgtctcagaggccgcccactgggagccaaccgttgcagccagttgtccccgcgagcgaggccggagaaggcgcggcggcccctggcctggccatttcgcccttgtcgcagctgaaccgccgactacgagctcctgcaccgcgcacacaccccgcgcgcttcgctctcggcctcgcccggccaccgtcgctctctagaacgccgcgcccgtgacccggaagagcattctccttagcaactgcgggactgcggcggcgccggcctccggggagaaacgcgaatgacaacagagctgctcaaggcgggaactctgagctaagcagtggaggtttctctggatctggagagaagagtgaccttggagccaataatgagccatcctgactacagaatgaacctccggcccctggggacccccagaggtgtgtctgctgtggctggtccacatgacattggtgcttcgccaggtgacaaaaagtcaaagaacaggtccacacgagggaagaaaaagagcatatttgaaacttacatgtccaaggaggatgtttcagaaggcttgaagagaggaacactcatccagggtgtattgagaattaatccaaagaagtttcatgaagccttcattccttccccggatggtgatcgagacatttttattgatggggttgttgctcgtaatagagccttaaatggggatctggtggtcgtgaaactgcttcccgaggagcattggaaggtagttaaaccagagagcaatgacaaagaaacagaagctgcgtatgaatcagatatccccgaggagctctgtggacaccatctcccgcaacagtccctgaaaagctataatgacagtcctgatgtcattgtagaggctcagtttgatggcagcgactcagaagatggacatggcatcacacaaaatgtgctggttgatggtgttaagaaactctcagtttgtgtttctgagaaaggaagagaggatggtgatgcaccggttacaaaagatgagaccacctgcatttcacaagacacaagagctttatcggagaaatccctgcaaagatcagcaaaggtggtttacatcttggagaaaaaacattctcgagcagcaaccggcttcctcaaactcttggctgataagaacagcgaactgtttaggaaatacgccctgttttctccctcagaccaccgagtgcctagaatttatgtgcctctcaaggactgtccccaggactttgtggcacggcctaaagattatgccaacacactgttcatctgccgcattgtggactggaaggaggactgcaattttgccctggggcagctggctaagagtcttgggcaggctggtgaaattgagcctgaaacagaaggaatactaacagagtatggcgtggatttctctgatttctcttcagaagttctagaatgtcttcctcaaggcctgccatggacaattccaccagaggagttcagcaagagaagggatttaagaaaagactgtatcttcaccattgacccatcaaccgcccgagacctcgatgatgccctctcctgcaagccactcgctgacggcaacttcaaagtgggagttcacattgctgacgtgagttactttgttccggagggatctgatctggataaagtggctgccgagagggctacaagcgtctacttggttcaaaaggtggtccccatgcttcccaggctgctgtgtgaggagctgtgcagcctcaaccccatgtccgacaagctgaccttctctgtgatctggacactgactccagagggcaagatccttgatgaatggtttggccggaccatcatccgctcctgcaccaaacttagctacgagcatgcacagagcatgattgaaagcccaactgagaaaatccctgcgaaagagctgccccccatttccccagagcatagcagcgaggaggtacaccagcagaacgcagacaaggatggggctgcccatcttcaggcctctcacagcccctctgctgaagatgcagaagcacagccctccacagaggaacgcctgcctgagactcggggcatatgtgacagggatccagacacacgactgtttttccttcagcaacagagccgtgtattggaagcaaagccccaaaacacgataagagtagaggagcagacaacccagttgcagatttgaagaagcatgtggaattccttgtggcggagaaggaaagattatggaaagaaagtaaacaggtaaaggctgaaaaggccagacttctaaaaggtccagtagaaaaggagctggatgtgggtgctgattttgtggaaaagtcagagttacggagctcgcctctgcattcagaaactgctataccctcttcagccttgcagaggtttgcagcagatgccaggaaagccaagtacattccaatacccaatcttttccctcagattttccatctccagagcttccctttatggagctttctgaggatattctgaaaggatttatgagtaactaaaatggaaggccatagaagaagggagaagaggaaataatactaagtcatacagttaatccagcaacaaaaaatgaaaagggaaagccacaggcaagggtaatcctggaaatgcctcgtcatctggtgtactgtaggagaagacgcattgccaggatgtggggaacagtcgctgtgaagcgtgtcacatacctgattcactgacttgagctgatgatgccgacctggcagacactaaactcgtggagggtcagtttctcttgacaccaaccaaatggctgcctgaaagaattttttcaagcaacaattatttttcttatcttcagggttaaaatgtataaaagtatgttatgtataattaatctgttatgtcataagtgatcatgcaaaacctaaatattatggcagcctgaggggctgcttcgtatttgaaacatgctttgtctcagg

SEQ ID NO: 8470 - DNA, 3501 bp, Homo sapiens
  source 1..3501: mol_type = unassigned DNA
tttcgcccttgtcgcagctgaaccgccgactacgagctcctgcaccgcgcacacaccccgcgcgcttcgctctcggcctcgcccggccaccgtcgctctctagaacgccgcgcccgtgacccggaagagcattctccttagcaactgcgggactgcggcggcgccggcctccggggagaaacgcgaatgacaacagagctgctcaaggcgggaactctgagctaagcagtggaggtttctctggatctggagagaagagtgaccttggagccaataatgagccatcctgactacagaatgaacctccggcccctggggacccccagaggtgtgtctgctgtggctggtccacatgacattggtgcttcgccaggtgacaaaaagtcaaagaacaggtccacacgagggaagaaaaagagcatatttgaaacttacatgtccaaggaggatgtttcagaaggcttgaagagaggaacactcatccagggtgtattgagaattaatccaaagaagtttcatgaagccttcattccttccccggatggtgatcgagacatttttattgatggggttgttgctcgtaatagagccttaaatggggatctggtggtcgtgaaactgcttcccgaggagcattggaaggtagttaaaccagagagcaatgacaaagaaacagaagctgcgtatgaatcagatatccccgaggagctctgtggacaccatctcccgcaacagtccctgaaaagctataatgacagtcctgatgtcattgtagaggctcagtttgatggcagcgactcagaagatggacatggcatcacacaaaatgtgctggttgatggtgttaagaaactctcagtttgtgtttctgagaaaggaagagaggatggtgatgcaccggttacaaaagatgagaccacctgcatttcacaagacacaagagctttatcggagaaatccctgcaaagatcagcaaaggtggtttacatcttggagaaaaaacattctcgagcagcaaccggcttcctcaaactcttggctgataagaacagcgaactgtttaggaaatacgccctgttttctccctcagaccaccgagtgcctagaatttatgtgcctctcaaggactgtccccaggactttgtggcacggcctaaagattatgccaacacactgttcatctgccgcattgtggactggaaggaggactgcaattttgccctggggcagctggctaagagtcttgggcaggctggtgaaattgagcctgaaacagaaggaatactaacagagtatggcgtggatttctctgatttctcttcagaagttctagaatgtcttcctcaaggcctgccatggacaattccaccagaggagttcagcaagagaagggatttaagaaaagactgtatcttcaccattgacccatcaaccgcccgagacctcgatgatgccctctcctgcaagccactcgctgacggcaacttcaaagtgggagttcacattgctgacgtgagttactttgttccggagggatctgatctggataaagtggctgccgagagggctacaagcgtctacttggttcaaaaggtggtccccatgcttcccaggctgctgtgtgaggagctgtgcagcctcaaccccatgtccgacaagctgaccttctctgtgatctggacactgactccagagggcaagatccttgatgaatggtttggccggaccatcatccgctcctgcaccaaacttagctacgagcatgcacagagcatgattgaaagcccaactgagaaaatccctgcgaaagagctgccccccatttccccagagcatagcagcgaggaggtacaccaggccgtcttgaatctccacggaattgccaagcagttacgccagcagcgctttgtggacggcgcacttcgtttggatcagctaaagcttgctttcactctggaccacgagaccggattgcctcaaggatgtcatatctatgagtaccgcgagagcaacaagctcgtggaggagttcatgctcttggccaacatggcagtggcccacaagatccaccgcgccttccccgagcaggccctgctgcgccggcaccccccgccccaaacaaggatgctcagtgacctggtggaattctgcgaccagatggggctgcccgtggacttcagctccgcaggagccctcaataaaagcctgacccaaacatttggagatgacaagtactcactggcccgcaaggaggtgctcaccaacatgtgctcccggcccatgcagatggcactgtacttctgctcggggctgctgcaggacccagcgcagttccggcactacgcgctcaatgtgcccctgtacacacacttcacctcgcccatccgccgctttgccgacgtcctggtgcaccgcctcctggctgccgcgttaggctatagggagcgactagacatggcgcccgataccctgcagaaacaggcggaccactgtaacgaccgccgcatggcgtccaagcgcgtgcaggagctcagtaccagtctcttctttgctgttctggtcaaggagagtggccccctggagtcagaagccatggtgatgggcatcctgaagcaagccttcgacgtgctggtgctgcgctacggcgtgcagaagcgcatctactgcaacgcactggccctgcggtcccaccacttccagaaggtgggcaagaagccggaactcacgctggtctgggagcctgaggacatggagcaggagccagcacagcaggtcatcaccatcttcagcctggtggaggtggtcctgcaggcagagtccacagccctcaagtacagcgccatcctgaagcggccaggcacccagggccacctgggccctgagaaggaggaggaggagtctgacggtgagcccgaggactcaagcaccagctgagctccaccagccgcctgccccgcctgccccgcctgcctgtcccgccacactggctttaggacctgttgacacggaggggggtttttaatttggtttttaacaactcaggggtttgtttttatttttatttaatttttgcagctcaacttttaaacaaactgcaggggagagggtggggctggaaggaaggctgaggcctggtcagcagtgaccccagcagagcaggccccagtcctcctgggaggctggccccccttttttctgggccctactgccctcctctgcccaggaaatgggggggtttcagcaactcagtgtcacagaataaaatcaagtgtggagtgccatctggtgtgtagggcgcctctgggaagcctgggcagcagaatgccccttgcacccagggcaagggacccagttcaggcttcacccctcgctgctgagccgatgtcaacacctggaactttcctgtcagttccaacacgattcagagctggctgcctggcagatgattgatactggagtctcattctgcctgattaaaaatggaattagtatgcaacactg

SEQ ID NO: 8471 - DNA, 1347 bp, Homo sapiens
  source 1..1347: mol_type = unassigned DNA
tttcgcccttgtcgcagctgaaccgccgactacgagctcctgcaccgcgcacacaccccgcgcgcttcgctctcggcctcgcccggccaccgtcgctctctagaacgccgcgcccgtgacccggaagagcattctccttagcaactgcgggactgcggcggcgccggcctccggggagaaacgcgaatgacaacagagctgctcaaggcgggaactctgagctaagcagtggaggtttctctggatctggagagaagagtgaccttggagccaataatgagccatcctgactacagaatgaacctccggcccctggggacccccagaggtgtgtctgctgtggctggtccacatgacattggtgcttcgccaggtgacaaaaagtcaaagaacaggtccacacgagggaagaaaaagagcatatttgaaacttacatgtccaaggaggatgtttcagaaggcttgaagagaggaacactcatccagggtgtattgagaattaatccaaagaagtttcatgaagccttcattccttccccggatggtgatcgagacatttttattgatggggttgttgctcgtaatagagccttaaatggggatctggtggtcgtgaaactgcttcccgaggagcattggaaggtagttaaaccagagagcaatgacaaagaaacagaagctgcgtatgaatcagatatccccgaggagctctgtggacaccatctcccgcaacagtccctgaaaagctataatgacagtcctgatgtcattgtagaggctcagtttgatggcagcgactcagaagatggacatggcatcacacaaaatgtgctggttgatggtgttaagaaactctcagtttgtgtttctgagaaagacaatgaaattgaggctcagagaagttcctgggcttatccagtatcccacaggaagtcagaagagaggatggtgatgcaccggttacaaaagatgagaccacctgcatttcacaagacacaagagctttatcggagaaatccctgcaaagatcagcaaaggtggtttacatcttggagaaaaaacattctcgagcagcaaccggcttcctcaaactcttggctgataagaacagcgaactgtttaggaaatacgccctgttttctccctcagaccaccgagtgcctagaatttatgtgcctctcaaggactgtccccaggactttgtggcacggcctaaagattatgccaacacactgttcatctgccgcattgtggactggaaggaggactgcaattttgccctggggtagctggctaagagtcttgggcaggctggtgaaattgagcctgaaacagaaggaatactaa

SEQ ID NO: 8472 - DNA, 2658 bp, Homo sapiens
  source 1..2658: mol_type = unassigned DNA
atgagccatcctgactacagaatgaacctccggcccctggggacccccagaggtgtgtctgctgtggctggtccacatgacattggtgcttcgccaggtgacaaaaagtcaaagaacaggtccacacgagggaagaaaaagagcatatttgaaacttacatgtccaaggaggatgtttcagaaggcttgaagagaggaacactcatccagggtgtattgagaattaatccaaagaagtttcatgaagccttcattccttccccggatggtgatcgagacatttttattgatggggttgttgctcgtaatagagccttaaatggggatctggtggtcgtgaaactgcttcccgaggagcattggaaggtagttaaaccagagagcaatgacaaagaaacagaagctgcgtatgaatcagatatccccgaggagctctgtggacaccatctcccgcaacagtccctgaaaagctataatgacagtcctgatgtcattgtagaggctcagtttgatggcagcgactcagaagatggacatggcatcacacaaaatgtgctggttgatggtgttaagaaactctcagtttgtgtttctgagaaaggaagagaggatggtgatgcaccggttacaaaagatgagaccacctgcatttcacaagacacaagagctttatcggagaaatccctgcaaagatcagcaaaggtggtttacatcttggagaaaaaacattctcgagcagcaaccggcttcctcaaactcttggctgataagaacagcgaactgtttaggaaatacgccctgttttctccctcagaccaccgagtgcctagaatttatgtgcctctcaaggactgtccccaggactttgtggcacggcctaaagattatgccaacacactgttcatctgccgcattgtggactggaaggaggactgcaattttgccctggggcagctggctaagagtcttgggcaggctggtgaaattgagcctgaaacagaaggaatactaacagagtatggcgtggatttctctgatttctcttcagaagttctagaatgtcttcctcaaggcctgccatggacaattccaccagaggagttcagcaagagaagggatttaagaaaagactgtatcttcaccattgacccatcaaccgcccgagacctcgatgatgccctctcctgcaagccactcgctgacggcaacttcaaagtgggagttcacattgctgacgtgagttactttgttccggagggatctgatctggataaagtggctgccgagagggctacaagcgtctacttggttcaaaaggtggtccccatgcttcccaggctgctgtgtgaggagctgtgcagcctcaaccccatgtccgacaagctgaccttctctgtgatctggacactgactccagagggcaagatccttgatgaatggtttggccggaccatcatccgctcctgcaccaaacttagctacgagcatgcacagagcatgattgaaagcccaactgagaaaatccctgcgaaagagctgccccccatttccccagagcatagcagcgaggaggtacaccaggccgtcttgaatctccacggaattgccaagcagttacgccagcagcgctttgtggacggcgcacttcgtttggatcagctaaagcttgctttcactctggaccacgagaccggattgcctcaaggatgtcatatctatgagtaccgcgagagcaacaagctcgtggaggagttcatgctcttggccaacatggcagtggcccacaagatccaccgcgccttccccgagcaggccctgctgcgccggcaccccccgccccaaacaaggatgctcagtgacctggtggaattctgcgaccagatggggctgcccgtggacttcagctccgcaggagccctcaataaaagcctgacccaaacatttggagatgacaagtactcactggcccgcaaggaggtgctcaccaacatgtgctcccggcccatgcagatggcactgtacttctgctcggggctgctgcaggacccagcgcagttccggcactacgcgctcaatgtgcccctgtacacacacttcacctcgcccatccgccgctttgccgacgtcctggtgcaccgcctcctggctgccgcgttaggctatagggagcgactagacatggcgcccgataccctgcagaaacaggcggaccactgtaacgaccgccgcatggcgtccaagcgcgtgcaggagctcagtaccagtctcttctttgctgttctggtcaaggagagtggccccctggagtcagaagccatggtgatgggcatcctgaagcaagccttcgacgtgctggtgctgcgctacggcgtgcagaagcgcatctactgcaacgcactggccctgcggtcccaccacttccagaaggtgggcaagaagccggaactcacgctggtctgggagcctgaggacatggagcaggagccagcacagcaggtcatcaccatcttcagcctggtggaggtggtcctgcaggcagagtccacagccctcaagtacagcgccatcctgaagcggccaggcacccagggccacctgggccctgagaaggaggaggaggagtctgacggtgagcccgaggactcaagcaccagctga

SEQ ID NO: 8473 - DNA, 2048 bp, Homo sapiens
  source 1..2048: mol_type = unassigned DNA
agaacgccgcgcccgtgacccggaagagcattctccttagcaactgcgggactgcggcggcgccggcctccggggagaaacgcgaatgacaacagagctgctcaaggcgggaactctgagctaagcagtggaggtttctctggatctggagagaagagtgaccttggagccaataatgagccatcctgactacagaatgaacctccggcccctggggacccccagaggtgtgtctgctgtggctggtccacatgacattggtgcttcgccaggtgacaaaaagtcaaagaacaggtccacacgagggaagaaaaagagcatatttgaaacttacatgtccaaggaggatgtttcagaaggcttgaagagaggaacactcatccagggtgtattgagaattaatccaaagaagtttcatgaagccttcattccttccccggatggtgatcgagacatttttattgatggggttgttgctcgtaatagagccttaaatggggatctggtggtcgtgaaactgcttcccgaggagcattggaaggtagttaaaccagagagcaatgacaaagaaacagaagctgcgtatgaatcagatatccccgaggagctctgtggacaccatctcccgcaacagtccctgaaaagctataatgacagtcctgatgtcattgtagaggctcagtttgatggcagcgactcagaagatggacatggcatcacacaaaatgtgctggttgatggtgttaagaaactctcagtttgtgtttctgagaaaggaagagaggatggtgatgcaccggttacaaaagatgagaccacctgcatttcacaagacacaagagctttatcggagaaatccctgcaaagatcagcaaaggtcattgcctacagattttctccacgtgtccaaatggctttcacctgagctacttgttgaagatctcgtgtgattcagtcaggactgtatttggtcatttaatcagaaaagttagagcagagaatcataaaaagtgaattaaaaaaaaaaaactttaaacatataaatacgaatccatcttcctgcctttggataaggggtcaaggccttttctttgagtgtgggtatgttgattggagttctgtgttatctttcttgcttaaaccacacttgtaatgcagcatttatcactttgagttttggtggagtgagaatttagacagtggagaagcagtatgaatatagactctcttcagatttgtacagtttttgctccaatttttttgttgttaccatgcccatacctaatttaaaaataattttaatgtcttttttagtttttccaaagtattcaatttagttatagaaacaattgtttttatattcctatttcaccattttgcacaattcacttgtattctttaattatagaagctagtgtcattttcagatgtgggatgaaacagctgacttcttttttttttgttttgagacagagtttcactgttgttgcccaggctggagtgcaatggcacgatcttggctcactgcaacctctgcctccctggttcaagcgattcttctgcctcagcctcctgagtagctgggattacaggcgtgtaccaccatgcctggctaattttttgtatttttagtagaaatggggtttcgccaggctggtctcgaactcctgacctcgtgatctgcctgcctcagcctcccaaagtgctgggattacaggtgtgagccaacatgctcgactaaacacagctgacttctagctgtgcacatagctcatagtggcagaaatggtgaagggcaacgtataaagtggcataatggcatgaggctttatgtttcagaagcatccatcagtgtgtttcatatgggaatgcagtgtgcttactctaccaagcaagttgattaatagagtattgctcttgcatactgacatgaggaatttctaaattatactctatatatttgagtactaactgtgctccaggcagcatgctaagtgtgggagattagaatgaatggaaagcctggggatggatctggctcacagacc

SEQ ID NO: 8474 - DNA, 2298 bp, Homo sapiens
  source 1..2298: mol_type = unassigned DNA
attctccttagcaactgcgggactgcggcggcgccggcctccggggagaaacgcgaatgacaacagagctgctcaaggcgggaactctgagctaagcagtggaggtttctctggatctggagagaagagtgaccttggagccaataatgagccatcctgactacagaatgaacctccggcccctggggacccccagaggtgtgtctgctgtggctggtccacatgacattggtgcttcgccaggtgacaaaaagtcaaagaacaggtccacacgagggaagaaaaagagcatatttgaaacttacatgtccaaggaggatgtttcagaaggcttgaagagaggaacactcatccagggtgtattgagaattaatccaaagaagtttcatgaagccttcattccttccccggatggtgatcgagacatttttattgatggggttgttgctcgtaatagagccttaaatggggatctggtggtcgtgaaactgcttcccgaggagcattggaaggtagttaaaccagagagcaatgacaaagaaacagaagctgcgtatgaatcagatatccccgaggagctctgtggacaccatctcccgcaacagtccctgaaaagctataatgacagtcctgatgtcattgtagaggctcagtttgatggcagcgactcagaagatggacatggcatcacacaaaatgtgctggttgatggtgttaagaaactctcagtttgtgtttctgagaaaggaagagaggatggtgatgcaccggttacaaaagatgagaccacctgcatttcacaagacacaagagctttatcggagaaatccctgcaaagatcagcaaaggtggtttacatcttggagaaaaaacattctcgagcagcaaccggcttcctcaaactcttggctgataagaacagcgaactgtttaggaaatacgccctgttttctccctcagaccaccgagtgcctagaatttatgtgcctctcaaggactgtccccaggactttgtggcacggcctaaagattatgccaacacactgttcatctgccgcattgtggactggaaggaggactgcaattttgccctggggcagctggctaagagtcttgggcaggctggtgaaattgagcctgaaacagaaggaatactaacagagtatggcgtggatttctctgatttctcttcagaagttctagaatgtcttcctcaaggcctgccatggacaattccaccagaggagttcagcaagagaagggatttaagaaaagactgtatcttcaccattgacccatcaaccgcccgagacctcgatgatgccctctcctgcaagccactcgctgacggcaacttcaaagtgggagttcacattgctgacgtgagttactttgttccggagggatctgatctggataaagtggctgccgagagggctacaagcgtctacttggttcaaaaggtggtccccatgcttcccaggctgctgtgtgaggagctgtgcagcctcaaccccatgtccgacaagctgaccttctctgtgatctggacactgactccagagggcaagatccttgatgaatggtttggccggaccatcatccgctcctgcaccaaacttagctacgagcatgcacagagcatgattgaaagcccaactgagaaaatccctgcgaaagagctgccccccatttccccagagcatagcagcgaggaggtacaccaggccgtcttgaatctccacggaattgccaagcagttacgccagcagcgctttgtggacggcgcacttcgtttggatcagctaaagcttgctttcactctggaccacgagaccggattgcctcaaggatgtcatatctatgagtaccgcgagagcaacaagctcgtggaggagttcatgctcttggccaacatggcagtggcccacaagatccaccgcgccttccccgagcaggccctgctgcgccggcaccccccgccccaaacaaggatgctcagtgacctggtggaattctgcgaccagatggggctgcccgtggacttcagctccgcaggagccctcaataaaagcctgacccaaacatttggagatgacaagtactcactggcccgcaaggaggtgctcaccaacatgtgctcccgcctgcctgtcccgccacactggctttaggacctgttgacacggaggggggtttttaatttggtttttaacaactcaggggtttgtttttatttttatttaatttttgcagctcaacttttaaacaaactgcaggggagagggtggggctgga

SEQ ID NO: 8475 - DNA, 570 bp, Homo sapiens
  source 1..570: mol_type = unassigned DNA
agagcattctccttagcaactgcgggactgcggcggcgccggcctccggggagaaacgagctgctcaaggcgggaactctgagctaagcagtggaggtttctctggatctggagagaagagtgaccttggagccaataatgagccatcctgactacagaatgaacctccggcccctggggacccccagaggtgtgtctgctgtggctggtccacatgacattggtgcttcgccaggtgacaaaaagtcaaagaacaggtccacacgagggaagaaaaagagcatatttgaaacttacatgtccaaggaggatgtttcagaaggcttgaagagaggaacactcatccagggtgtattgagaattaatccaaagaagtttcatgaagccttcattccttccccggatggtgatcgagacatttttattgatggggttgttgctcgtaatagagccttaaatggggatctggtggtcgtgaaactgcttcccgaggagcattggaaggtagttaaaccagagagcaatgacaaagaaacagaagctgcgtatgaatcagatatccccgaggag

SEQ ID NO: 8476 - DNA, 2133 bp, Homo sapiens
  source 1..2133: mol_type = unassigned DNA
tttcgcccttgtcgcagctgaaccgccgactacgagctcctgcaccgcgcacacaccccgcgcgcttcgctctcggcctcgcccggccaccgtcgctctctagaacgccgcgcccgtgacccggaagagcattctccttagcaactgcgggactgcggcggcgccggcctccggggagaaacgcgaatgacaacagagctgctcaaggcgggaactctgagctaagcagtggaggtttctctggatctggagagaagagtgaccttggagccaataatgagccatcctgactacagaatgaacctccggcccctggggacccccagaggtgtgtctgctgtggctggtccacatgacattggtgcttcgccaggtgacaaaaagtcaaagaacaggtccacacgagggaagaaaaagagcatatttgaaacttacatgtccaaggaggatgtttcagaaggcttgaagagaggaacactcatccagggtgtattgagaattaatccaaagaagtttcatgaagccttcattccttccccggatggtgatcgagacatttttattgatggggttgttgctcgtaatagagccttaaatggggatctggtggtcgtgaaactgcttcccgaggagcattggaaggtagttaaaccagagagcaatgacaaagaaacagaagctgcgtatgaatcagatatccccgaggagctctgtggacaccatctcccgcaacagtccctgaaaagctataatgacagtcctgatgtcattgtagaggctcagtttgatggcagcgactcagaagatggacatggcatcacacaaaatgtgctggttgatggtgttaagaaactctcagtttgtgtttctgagaaaggaagagaggatggtgatgcaccggttacaaaagatgagaccacctgcatttcacaagacacaagagctttatcggagaaatccctgcaaagatcagcaaaggtggtttacatcttggagaaaaaacattctcgagcagcaaccggcttcctcaaactcttggctgataagaacagcgaactgtttaggaaatacgccctgttttctccctcagaccaccgagtgcctagaatttatgtgcctctcaaggactgtccccaggactttgtggcacggcctaaagattatgccaacacactgttcatctgccgcattgtggactggaaggaggactgcaattttgccctggggcagctggctaagagtcttgggcaggctggtgaaattgagcctgaaacagaaggaatactaacagagtatggcgtggatttctctgatttctcttcagaagttctagaatgtcttcctcaaggcctgccatggacaattccaccagaggagttcagcaagagaagggatttaagaaaagactgtatcttcaccattgacccatcaaccgcccgagacctcgatgatgccctctcctgcaagccactcgctgacggcaacttcaaagtgggagttcacattgctgacgtgagttactttgttccggagggatctgatctggataaagtggctgccgagagggctacaagcgtctacttggttcaaaaggtggtccccatgcttcccaggctgctgtgtgaggagctgtgcagcctcaaccccatgtccgacaagctgaccttctctgtgatctggacactgactccagagggcaagatccttgatgaatggtttggccggaccatcatccgctcctgcaccaaacttagctacgagcatgcacagagcatgattgaaagcccaactgagaaaatccctgcgaaagagctgccccccatttccccagagcatagcagcgaggaggtacaccaggccgtcttgaatctccacggaattgccaagcagttacgccagcagcgctttgtggacggcgcacttcgtttggatcagctaaagcttgctttcactctggaccacgagaccggattgcctcaaggatgtcatatctatgagtaccgcgagagcaacaagccctgctgcgccggcaccccccgccccaaacaaggatgctcagtgacctggtggaattctgcgaccagatggggctgcccgtggacttcagctccgcaggagccctcaatgaaagcc

SEQ ID NO: 8477 - DNA, 647 bp, Homo sapiens
  source 1..647: mol_type = unassigned DNA
gggatctgtgtgaagtggactaaggattaagtaggatgtcaactgagacagaacttcaagtagctgtgaaaaccagcgccaagaaagactccagaaagaaaggtcaggatcgcagtgaagccactttgataaagaggtttaaaggtgaaggggtccggtacaaagccaaattgatcgggattgatgaagtttccgcagctcggggagacaagttatgtcaagattccatgatgaaactcaagggcgttgttgctggcgctcgttccaaaggagaacacaaacagaaaatctttttaaccatctcctttggaggaatcaaaatctttgatgagaagacaggggcccttcagcatcatcatgctgttcatgaaatatcctacattgcaaaggacattacagatcaccgggcctttggatatgtttgtgggaaggaagggaatcacagatttgtggccataaaaacagcccaggcggctgaacctgttattctggacttgagagatctctttcaactcatttatgaattgaagcaaagagaagaattagaaaaaaaggcacaaaaggataagcagtgtgaacaagctgtgtaccaggttcccaccagccaaaagaaggaaggtgtttatgatgtgccaaaaagtcaacct

SEQ ID NO: 8478 - DNA, 1150 bp, Homo sapiens
  source 1..1150: mol_type = unassigned DNA
cccagctcggcgctcgcccgggcttccccgggctgcagagcgcgcctgagtgccgccgcccgccgggcatggggagccgcttcctgggcggctgcggcagcggaggaggatgctctgggctaggcgagcactcaaaaagagtgaatgaaatgtgcagctcagagtgtcatttctgaagggaggagtctttctcttggagaagagtcctcaatgagcctggccgaggcccgggatctgtgtgaagtggactaaggattaagtaggatgtcaactgagacagaacttcaagtagctgtgaaaaccagcgccaagaaagactccagaaagaaaggtcaggatcgcagtgaagccactttgataaagaggtttaaaggtgaaggggtccggtacaaagccaaattgatcgggattgatgaagtttccgcagctcggggagacaagttatgtcaagattccatgatgaaactcaagggcgttgttgctggcgctcgttccaaaggagaacacaaacagaaaatctttttaaccatctcctttggaggaatcaaaatctttgatgagaagacaggggcccttcagcatcatcatgctgttcatgaaatatcctacattgcaaaggacattacagatcaccgggcctttggatatgtttgtgggaaggaagggaatcacagatttgtggccataaaaacagcccaggcggctgaacctgttattctggacttgagagatctctttcaactcatttatgaattgaagcaaagagaagaattagaaaaaaaggcacaaaaggataagcagtgtgaacaagctgtgtaccagacaatattggaagaggatgttgaagatcctgtgtaccaggtaatttctgaaactagtcggggttttagattcaagagtgactagacctgtgccagagccattttgtcagaaacctgaagaatccactgactgcaaaacctggagagagaccaagattatttctgagggtgagggctgccagcccctccaggagcaaatttccataaaaactaacagaagtttggccggcatcggtatcttgggatttggagatccgcttctcccttcttgcctctgcctcggcccccttcacagtctgtaaaagtttgatcccagagctgaatgtttt

SEQ ID NO: 8479 - DNA, 1802 bp, Homo sapiens
  source 1..1802: mol_type = unassigned DNA
gggatctgtgtgaagtggactaaggattaagtaggatgtcaactgagacagaacttcaagtagctgtgaaaaccagcgccaagaaagactccagaaagaaaggtcaggatcgcagtgaagccactttgataaagaggtttaaaggtgaaggggtccggtacaaagccaaattgatcgggattgatgaagtttccgcagctcggggagacaagttatgtcaagattccatgatgaaactcaagggcgttgttgctggcgctcgttccaaaggagaacacaaacagaaaatctttttaaccatctcctttggaggaatcaaaatctttgatgagaagacaggggcccttcagcatcatcatgctgttcatgaaatatcctacattgcaaaggacattacagatcaccgggcctttggatatgtttgtgggaaggaagggaatcacagatttgtggccataaaaacagcccaggcggctgaacctgttattctggacttgagagatctctttcaactcatttatgaattgaagcaaagagaagaattagaaaaaaaggcacaaaaggataagcagtgtgaacaagctgtgtaccagacaatattggaagaggatgttgaagatcctgtgtaccagtacattgtgtttgaggctggacacgagccaatccgtgatcccgaaacggaagaaaacatttatcaggttcccaccagccaaaagaaggaaggtgtttatgatgtgccaaaaagtcaacctgtaagtaatggctattcgtttgaggattttgaagaacggtttgctgcagccaccccgaacagaaacctgcccacagactttgatgagatttttgaggcaacgaaggctgtgacccaattagaactttttggggacatgtccacaccccctgatataacctctccccccactcctgcaactccaggtgatgcctttatcccatcttcatctcagacccttccagcgagtgcagatgtgtttagttctgtacctttcggcactgctgctgtaccctcaggttacgttgcaatgggcgctgtcctcccgtccttctggggtcagcagcccctcgtccaacagcagatggtcatgggtgcccagccaccagtcgctcaggtgatgccgggggctcagcccatcgcatggggccagccgggtctctttcctgccactcagcagccctggccaactgtggccgggcagtttccgccagccgccttcatgcccacacaaactgttatgcctttgccagctgccatgttccaaggtcccctcaccccccttgccaccgtcccaggcacgagtgactccaccaggtcaagtccacagaccgacaagcccaggcagaaaatgggcaaagaaacgtttaaggatttccagatggcccagcctccgcccgtgccctcccgcaaacccgaccagccctccctcacctgtacctcagaggccttctccagttacttcaacaaagtcggggtggcacaggatacagacgactgtgatgactttgacatctcccagttgaatttgacccctgtgacttctaccacaccatcgaccaactcacctccaaccccagcccctagacagagctctccatccaaatcatctgcatcccatgccagtgatcctaccacagatgacatctttgaagagggctttgaaagtcccagcaaaagcgaagagcaagaagctcctgatggatcacaggcctcatccaacagtgatccatttggtgagcccagtggggagcccagtggtgataatataagtccacaggccggtagctag

SEQ ID NO: 8480 - DNA, 752 bp, Homo sapiens
  source 1..752: mol_type = unassigned DNA
gggatctgtgtgaagtggactaaggattaagtaggatgtcaactgagacagaacttcaagtagctgtgaaaaccagcgccaagaaagactccagaaagaaaggtcaggatcgcagtgaagccactttgataaagaggtttaaaggtgaaggggtccggtacaaagccaaattgatcgggattgatgaagtttccgcagctcggggagacaagttatgtcaagattccatgatgaaactcaagggcgttgttgctggcgctcgttccaaaggagaacacaaacagaaaatctttttaaccatctcctttggaggaatcaaaatctttgatgagaagacaggggttcccaccagccaaaagaaggaaggtgtttatgatgtgccaaaaagtcaacctgtaagtaatggctattcgtttgaggattttgaagaacggtttgctgcagccaccccgaacagaaacctgcccacagactttgatgagatttttgaggcaacgaaggctgtgacccaattagaactttttggggacatgtccacaccccctgatataacctctccccccactcctgcaactccaggtgatgcctttatcccatcttcatctcagacccttccagcgagtgcagatgtgtttagttctgtacctttcggcactgctgctgtaccctcaggttacgttgcaatgggcgctgtcctcccgtccttctggggtcagcagcccctcgtccaacagcagatggtcatgggtgcc

SEQ ID NO: 8481 - DNA, 2177 bp, Homo sapiens
  source 1..2177: mol_type = unassigned DNA
cccagctcggcgctcgcccgggcttccccgggctgcagagcgcgcctgagtgccgccgcccgccgggcatggggagccgcttcctgggcggctgcggcagcggaggaggatgctctgggctaggcgagcactcaaaaagagtgaatgaaatgtgcagctcagagtgtcatttctgaagggaggagtctttctcttggagaagagtcctcaatgagcctggccgaggcccgggatctgtgtgaagtggactaaggattaagtaggatgtcaactgagacagaacttcaagtagctgtgaaaaccagcgccaagaaagactccagaaagaaaggtcaggatcgcagtgaagccactttgataaagaggtttaaaggtgaaggggtccggtacaaagccaaattgatcgggattgatgaagtttccgcagctcggggagacaagttatgtcaagattccatgatgaaactcaagggcgttgttgctggcgctcgttccaaaggagaacacaaacagaaaatctttttaaccatctcctttggaggaatcaaaatctttgatgagaagacaggggcccttcagcatcatcatgctgttcatgaaatatcctacattgcaaaggacattacagatcaccgggcctttggatatgtttgtgggaaggaagggaatcacagatttgtggccataaaaacagcccaggcggctgaacctgttattctggacttgagagatctctttcaactcatttatgaattgaagcaaagagaagaattagaaaaaaaggcacaaaaggataagcagtgtgaacaagctgtgtaccagacaatattggaagaggatgttgaagatcctgtgtaccagtacattgtgtttgaggctggacacgagccaatccgtgatcccgaaacggaagaaaacatttatcaggttcccaccagccaaaagaaggaaggtgtttatgatgtgccaaaaagtcaacctgtaagtgctgtgacccaattagaactttttggggacatgtccacaccccctgatataacctctccccccactcctgcaactccaggtgatgcctttatcccatcttcatctcagacccttccagcgagtgcagatgtgtttagttctgtacctttcggcactgctgctgtaccctcaggttacgttgcaatgggcgctgtcctcccgtccttctggggtcagcagcccctcgtccaacagcagatggtcatgggtgcccagccaccagtcgctcaggtgatgccgggggctcagcccatcgcatggggccagccgggtctctttcctgccactcagcagccctggccaactgtggccgggcagtttccgccagccgccttcatgcccacacaaactgttatgcctttgccagctgccatgttccaaggtcccctcaccccccttgccaccgtcccaggcacgagtgactccaccaggtcaagtccacagaccgacaagcccaggcagaaaatgggcaaagaaacgtttaaggatttccagatggcccagcctccgcccgtgccctcccgcaaacccgaccagccctccctcacctgtacctcagaggccttctccagttacttcaacaaagtcggggtggcacaggatacagacgactgtgatgactttgacatctcccagttgaatttgacccctgtgacttctaccacaccatcgaccaactcacctccaaccccagcccctagacagagctctccatccaaatcatctgcatcccatgccagtgatcctaccacagatgacatctttgaagagggctttgaaagtcccagcaaaagcgaagagcaagaagctcctgatggatcacaggcctcatccaacagtgatccatttggtgagcccagtggggagcccagtggtgataatataagtccacaggccggtagctagatagcgcaggtctgggagccagagcctctgtacgcgcagatcaacagacctaagaaatagcatcgatgcgagctcgtggtgggtgctcaagactggcatggacatcagcatcacgacaggctctcttgtattctttcacctcttcccacaagaaattcatgattgcccaatggaactcgctcagaagagggaactaagcatttttggcaaccaatggcagatatctatggcagcacacaaaaaaa

SEQ ID NO: 8482 - DNA, 2580 bp, Homo sapiens
  source 1..2580: mol_type = unassigned DNA
ataaggtatgaaagatgtggcctgcagagagccggcactatctctactgctgctgctgctgctactgctgctgttgctaccgctgcctctgctgccaccgccactactgctgccagcggagccgctaggagtgagcatcccctctccgggatacccagctccgcggcgtctcccgcgcgccctggccccacacggacctgccagccccagggaacaaaagcggagcccgctcgccctctactgcagccggaggatgagtcgagagggctgagcggagagtgtggtcctcggcggctggagctatttccttggcttctctccatgacgattcctgactcgtggccccggcaatcttgggaagacatcatccagcttcttcagtccagaccctgggcaccccccttttgccaggatcgtccccacccagcctggacacattgactgaactgttttctaggacactgcactcagcaagacatggtggtgagccctgactctcagtcttcatgattgaagaactcttttgtacaacacaaagcactcaaaaagagtgaatgaaatgtgcagctcagagtgtcatttctgaagggaggagtctttctcttggagaagagtcctcaatgagcctggccgaggcccgggatctgtgtgaagtggactaaggattaagtaggatgtcaactgagacagaacttcaagtagctgtgaaaaccagcgccaagaaagactccagaaagaaaggtcaggatcgcagtgaagccactttgataaagaggtttaaaggtgaaggggtccggtacaaagccaaattgatcgggattgatgaagtttccgcagctcggggagacaagttatgtcaagattccatgatgaaactcaagggcgttgttgctggcgctcgttccaaaggagaacacaaacagaaaatctttttaaccatctcctttggaggaatcaaaatctttgatgagaagacaggggcccttcagcatcatcatgctgttcatgaaatatcctacattgcaaaggacattacagatcaccgggcctttggatatgtttgtgggaaggaagggaatcacagatttgtggccataaaaacagcccaggcggctgaacctgttattctggacttgagagatctctttcaactcatttatgaattgaagcaaagagaagaattagaaaaaaaggcacaaaaggataagcagtgtgaacaagctgtgtaccagacaatattggaagaggatgttgaagatcctgtgtaccagtacattgtgtttgaggctggacacgagccaatccgtgatcccgaaacggaagaaaacatttatcaggttcccaccagccaaaagaaggaaggtgtttatgatgtgccaaaaagtcaacctgtaagtgctgtgacccaattagaactttttggggacatgtccacaccccctgatataacctctccccccactcctgcaactccaggtgatgcctttatcccatcttcatctcagacccttccagcgagtgcagatgtgtttagttctgtacctttcggcactgctgctgtaccctcaggttacgttgcaatgggcgctgtcctcccgtccttctggggtcagcagcccctcgtccaacagcagatggtcatgggtgcccagccaccagtcgctcaggtgatgccgggggctcagcccatcgcatggggccagccgggtctctttcctgccactcagcagccctggccaactgtggccgggcagtttccgccagccgccttcatgcccacacaaactgttatgcctttgccagctgccatgttccaaggtcccctcaccccccttgccaccgtcccaggcacgagtgactccaccaggtcaagtccacagaccgacaagcccaggcagaaaatgggcaaagaaacgtttaaggatttccagatggcccagcctccgcccgtgccctcccgcaaacccgaccagccctccctcacctgtacctcagaggccttctccagttacttcaacaaagtcggggtggcacaggatacagacgactgtgatgactttgacatctcccagttgaatttgacccctgtgacttctaccacaccatcgaccaactcacctccaaccccagcccctagacagagctctccatccaaatcatctgcatcccatgccagtgatcctaccacagatgacatctttgaagagggctttgaaagtcccagcaaaagcgaagagcaagaagctcctgatggatcacaggcctcatccaacagtgatccatttggtgagcccagtggggagcccagtggtgataatataagtccacaggccggtagctagatagcgcaggtctgggagccagagcctctgtacgcgcagatcaacagacctaagaaatagcatcgatgcgagctcgtggtgggtgctcaagactggcatggacatcagcatcacgacaggctctcttgtattctttcacctcttcccacaagaaattcatgattgcccaatggaactcgctcagaagagggaactaagcatttttggcaaccaatggcagatatctatggcagcacac

SEQ ID NO: 8483 - DNA, 5673 bp, Homo sapiens
  source 1..5673: mol_type = unassigned DNA
actatctctactgctgctgctgctgctactgctgctgttgctaccgctgcctctgctgccaccgccactactgctgccagcggagccgctaggagtgagcatcccctctccgggatacccagctccgcggcgtctcccgcgcgccctggccccacacggacctgccagccccagggaacaaaagcggagcccgctcgccctctactgcagccggaggatgagtcgagagggctgagcggagagtgtggtcctcggcggctggaggctatttccttggcttctctccatgacgattcctgactcgtggccccggcaatcttgggaagacatcatccagcttcttcagtccagaccctgggcaccccccttttgccaggatcgtccccacccagcctggacacattgactgaactgttttctaggacactgcactcagcaagacatggtggtgagccctgactctcagtcttcatgattgaagaactcttttgtacaacacaaagcactcaaaaagagtgaatgaaatgtgcagctcagagtgtcatttctgaagggaggagtctttctcttggagaagagtcctcaatgagcctggccgaggcccgggatctgtgtgaagtggactaaggattaagtaggatgtcaactgagacagaacttcaagtagctgtgaaaaccagcgccaagaaagactccagaaagaaaggtcaggatcgcagtgaagccactttgataaagaggtttaaaggtgaaggggtccggtacaaagccaaattgatcgggattgatgaagtttccgcagctcggggagacaagttatgtcaagattccatgatgaaactcaagggcgttgttgctggcgctcgttccaaaggagaacacaaacagaaaatctttttaaccatctcctttggaggaatcaaaatctttgatgagaagacaggggcccttcagcatcatcatgctgttcatgaaatatcctacattgcaaaggacattacagatcaccgggcctttggatatgtttgtgggaaggaagggaatcacagatttgtggccataaaaacagcccaggcggctgaacctgttattctggacttgagagatctctttcaactcatttatgaattgaagcaaagagaagaattagaaaaaaaggcacaaaaggataagcagtgtgaacaagctgtgtaccagacaatattggaagaggatgttgaagatcctgtgtaccagtacattgtgtttgaggctggacacgagccaatccgtgatcccgaaacggaagaaaacatttatcaggttcccaccagccaaaagaaggaaggtgtttatgatgtgccaaaaagtcaacctgtaagtgctgtgacccaattagaactttttggggacatgtccacaccccctgatataacctctccccccactcctgcaactccaggtgatgcctttatcccatcttcatctcagacccttccagcgagtgcagatgtgtttagttctgtacctttcggcactgctgctgtaccctcaggttacgttgcaatgggcgctgtcctcccgtccttctggggtcagcagcccctcgtccaacagcagatggtcatgggtgcccagccaccagtcgctcaggtgatgccgggggctcagcccatcgcatggggccagccgggtctctttcctgccactcagcagccctggccaactgtggccgggcagtttccgccagccgccttcatgcccacacaaactgttatgcctttgccagctgccatgttccaaggtcccctcaccccccttgccaccgtcccaggcacgagtgactccaccaggtcaagtccacagaccgacaagcccaggcagaaaatgggcaaagaaacgtttaaggatttccagatggcccagcctccgcccgtgccctcccgcaaacccgaccagccctccctcacctgtacctcagaggccttctccagttacttcaacaaagtcggggtggcacaggatacagacgactgtgatgactttgacatctcccagttgaatttgacccctgtgacttctaccacaccatcgaccaactcacctccaaccccagcccctagacagagctctccatccaaatcatctgcatcccatgccagtgatcctaccacagatgacatctttgaagagggctttgaaagtcccagcaaaagcgaagagcaagaagctcctgatggatcacaggcctcatccaacagtgatccatttggtgagcccagtggggagcccagtggtgataatataagtccacaggccggtagctagatagcgcaggtctgggagccagagcctctgtacgcgcagatcaacagacctaagaaatagcatcgatgcgagctcgtggtgggtgctcaagactggcatggacatcagcatcacgacaggctctcttgtattctttcacctcttcccacaagaaattcatgattgcccaatggaactcgctcagaagagggaactaagcatttttggcaaccaatggcagatatctatggcagcacacaaaaaaagtatagaaagatccacccaacattaaatcagaaatcaagcaaatgcttacccaacaaatatttgagccctcatagctgggtttaagatgactcagtgtgcaaaattattaattccctttttatttctctacctgttgaccactgttgagacaccaaatttggagtgacaggcatcagaggattacaacagggttggaactgacttctttaagcaaaagcaaagggtcttctgtgaccacaatatcgtcatccatatgccttttcacataggatgatgtgttttttgtcactccatggggcctggtctgccattttcccccctttcctttttttgtcatgtttgaaaattaataggtgtacaaatttttgtattgcttttgactttttttagatatgggtgaagaaatctaactggggagaaaaaaagcctcagtgaaatgaattaacttgaaattacaagacaaataagtggttgattattcattatgatcacgaatgttgccaaaacagtcctttagctattctgcatcctggtgaagaaagacagctttcagtacgaaccttcattctgtgagtaggaaaagacatcagatcccattgatgagaaagatgaaaaatgcatctgatttcttaagaagctctaaactctaagtacaataaaatgatattttttatttttccgatatcttgctgctgtgttgctatgcagacaagtgtcttctccacgtgccattttcaaagaaaagtcatttgccaaataattctggtacaattctggtaatgtggttttggatcttaaaaaccaactttctaatggaacaatggtggcataaatattcagaataacaaactgattctgtggtccaaatggttcatctctatctctttttgtacatcagaaaattcaaatgggatttttattttataacttgaaaaaaaaaccttaccattaaactctttaaatatttaagggaaatggctttaaggagttctaatgaaaaaaaattgtcttttttttgtaaatataaatgttaatgaaaatgatttttaataatgccattacactgtagagaaggtagcagattgagtgcaaggtgtgacaaacttgatggatggggctcactttccagacgttattctggagcatatggtaggaagctggagtgcagggacagctggcaggagcagttggccaatcagcagctagtgaacgggaagggagcacgtgactccatcatctagcctttccacgagagtccccaccctacgtgcaacacaagaaaaagacaattcacattctgaagaattcagattctgaaactctcccacctccccactcccacctacccccgatataaatcactggactgtttgtacgtgaaacagaagaggctaagcttcctttttttacacttatgagacaaaaagtgcagtgtttggttcgtatgtttagcacatgattttcataaagaatctatatatttttgccctacagagaattgttatacaggtcaagtgtgttttcctgatgttcctatgcagttacagtatgttgaaagtgttttaacactaagaagaaaactttaaagattcatgtgattaattggatttgaggataattattattatttggtttttagatttgaaaagtagaatttccattgagacaattgatttgaataggcctgcatttgattcttcatatcaatagaaactaaaatgatttgggagattcatttgaaaaatgattgtatacttgttcacaaagcgaaaagtgatacatgaaggtaatggttatcatttaaagcccacattttacactatcaggtcacaggagtctaatttttttttcagttagataaactgaccaaacgtctattcaagaatatatgtcaatatcatcctaatgtggaaggtccgaagaaccagaaaagtgagaagggccgtttacctccctctgtagctatcacctgttggtccacagagtttcttgagaaatgagcaaacattttatgattaggtaaccctttcacatgaacgggaagatgggaaaggtggaatgaccataagagttggcctgagaccagtttgttttctggggatttggtaagataggcagttcccatgggaaattgcttaaattgctttgttgcctatgatttgattctaaacaagtggtgctatcttctccctcaatatggctgtcttgagtttgtcttgcagtatcacaccattataccaattctttgggttgcttctgacacattcaaagtgaactctggctgatgttgctgtttcaggtataccatctggagttaatttcctagcagaaggtgaaagtccaggagaattgtcctctttcattgaacatgattgaaaatgtaactggctctgaacttcaagaagatagatgcccaagtgatgcattaaagtaagggaaataaagtcaagtttttcaactgccatccatattctcattggcagaattctgatttttttccaagcactgtttggtgagcctggaagcaccgtatcctgtcccaggagtacagtgaaatttccaagcaagagctgaggtgccaataccaaaagaccatggggagtctgcacggttctggttagatcaatagaaaatccatgtgtacaactgttaattcctcatcctccactagcactaaatttgtcactttaaattttgaaaccagggaaacaccacctgtcattctgtccccattctccatagctcttcaatctttacatgccgcaagacttttttgatagctcgtactcatcccagtgtctcctgaaaccccatcatgtaatgtactgggcaccttcttttaaacaaatgtttactctgtgggtttggttcatttcaatttctgcgttctgacacatatttttttaataaagatgagaaagagaaaatgactgttgcagtacctttctagacctactttaactttacctcagatgacagtttgttaacatatatggacacattatttttaactttatgtacaatgcattcaacagaacagcaaaatttttagaaattttccattaatttctgtaacacaccatgtaaaactgttacaaataaacatgtttgagaacaaca

SEQ ID NO: 8484 - DNA, 1769 bp, Homo sapiens
  source 1..1769: mol_type = unassigned DNA
cgggatctgtgtgaagtggactaaggattaagtaggatgtcaactgagacagaacttcaagtagctgtgaaaaccagcgccaagaaagactccagaaagaaaggtcaggatcgcagtgaagccactttgataaagaggtttaaaggtgaaggggtccggtacaaagccaaattgatcgggattgatgaagtttccgcagctcggggagacaagttatgtcaagattccatgatgaaactcaagggcgttgttgctggcgctcgttccaaaggagaacacaaacagaaaatctttttaaccatctcctttggaggaatcaaaatctttgatgagaagacaggggcccttcagcatcatcatgctgttcatgaaatatcctacattgcaaaggacattacagatcaccgggcctttggatatgtttgtgggaaggaagggaatcacagatttgtggccataaaaacagcccaggcggctgaacctgttattctggacttgagagatctctttcaactcatttatgaattgaagcaaagagaagaattagaaaaaaaggcacaaaaggataagcagtgtgaacaagctgtgtaccaggttcccaccagccaaaagaaggaaggtgtttatgatgtgccaaaaagtcaacctgtaagtaatggctattcgtttgaggattttgaagaacggtttgctgcagccaccccggctgtgacccaattagaactttttggggacatgtccacaccccctgatataacctctccccccactcctgcaactccaggtgatgcctttatcccatcttcatctcagacccttccagcgagtgcagatgtgtttagttctgtacctttcggcactgctgctgtaccctcaggttacgttgcaatgggcgctgtcctcccgtccttctggggtcagcagcccctcgtccaacagcagatggtcatgggtgcccagccaccagtcgctcaggtgatgccgggggctcagcccatcgcatggggccagccgggtctctttcctgccactcagcagccctggccaactgtggccgggcagtttccgccagccgccttcatgcccacacaaactgttatgcctttgccagctgccatgttccaaggtcccctcaccccccttgccaccgtcccaggcacgagtgactccaccaggtcaagtccacagaccgacaagcccaggcagaaaatgggcaaagaaacgtttaaggatttccagatggcccagcctccgcccgtgccctcccgcaaacccgaccagccctccctcacctgtacctcagaggccttctccagttacttcaacaaagtcggggtggcacaggatacagacgactgtgatgactttgacatctcccagttgaatttgacccctgtgacttctaccacaccatcgaccaactcacctccaaccccagcccctagacagagctctccatccaaatcatctgcatcccatgccagtgatcctaccacagatgacatctttgaagagggctttgaaagtcccagcaaaagcgaagagcaagaagctcctgatggatcacaggcctcatccaacagtgatccatttggtgagcccagtggggagcccagtggtgataatataagtccacaggccggtagctagatagcgcaggtctgggagccagagcctctgtacgcgcagatcaacagacctaagaaatagcatcgatgcgagctcgtggtgggtgctcaagactggcatggacatcagcatcacgacag

SEQ ID NO: 8485 - DNA, 1817 bp, Homo sapiens
  source 1..1817: mol_type = unassigned DNA
cgggatctgtgtgaagtggactaaggattaagtaggatgtcaactgagacagaacttcaagtagctgtgaaaaccagcgccaagaaagactccagaaagaaaggtcaggatcgcagtgaagccactttgataaagaggtttaaaggtgaaggggtccggtacaaagccaaattgatcgggattgatgaagtttccgcagctcggggagacaagttatgtcaagattccatgatgaaactcaagggcgttgttgctggcgctcgttccaaaggagaacacaaacagaaaatctttttaaccatctcctttggaggaatcaaaatctttgatgagaagacaggggcccttcagcatcatcatgctgttcatgaaatatcctacattgcaaaggacattacagatcaccgggcctttggatatgtttgtgggaaggaagggaatcacagatttgtggccataaaaacagcccaggcggctgaacctgttattctggacttgagagatctctttcaactcatttatgaattgaagcaaagagaagaattagaaaaaaaggcacaaaaggataagcagtgtgaacaagctgtgtaccaggttcccaccagccaaaagaaggaaggtgtttatgatgtgccaaaaagtcaacctgtaagtaatggctattcgtttgaggattttgaagaacggtttgctgcagccaccccgaacagaaacctgcccacagactttgatgagatttttgaggcaacgaaggctgtgacccaattagaactttttggggacatgtccacaccccctgatataacctctccccccactcctgcaactccaggtgatgcctttatcccatcttcatctcagacccttccagcgagtgcagatgtgtttagttctgtacctttcggcactgctgctgtaccctcaggttacgttgcaatgggcgctgtcctcccgtccttctggggtcagcagcccctcgtccaacagcagatggtcatgggtgcccagccaccagtcgctcaggtgatgccgggggctcagcccatcgcatggggccagccgggtctctttcctgccactcagcagccctggccaactgtggccgggcagtttccgccagccgccttcatgcccacacaaactgttatgcctttgccagctgccatgttccaaggtcccctcaccccccttgccaccgtcccaggcacgagtgactccaccaggtcaagtccacagaccgacaagcccaggcagaaaatgggcaaagaaacgtttaaggatttccagatggcccagcctccgcccgtgccctcccgcaaacccgaccagccctccctcacctgtacctcagaggccttctccagttacttcaacaaagtcggggtggcacaggatacagacgactgtgatgactttgacatctcccagttgaatttgacccctgtgacttctaccacaccatcgaccaactcacctccaaccccagcccctagacagagctctccatccaaatcatctgcatcccatgccagtgatcctaccacagatgacatctttgaagagggctttgaaagtcccagcaaaagcgaagagcaagaagctcctgatggatcacaggcctcatccaacagtgatccatttggtgagcccagtggggagcccagtggtgataatataagtccacaggccggtagctagatagcgcaggtctgggagccagagcctctgtacgcgcagatcaacagacctaagaaatagcatcgatgcgagctcgtggtgggtgctcaagactggcatggacatcagcatcacgacag

SEQ ID NO: 8486 - DNA, 1565 bp, Homo sapiens
  source 1..1565: mol_type = unassigned DNA
cgggatctgtgtgaagtggactaaggattaagtaggatgtcaactgagacagaacttcaagtagctgtgaaaaccagcgccaagaaagactccagaaagaaaggtcaggatcgcagtgaagccactttgataaagaggtttaaaggtgaaggggtccggtacaaagccaaattgatcgggattgatgaagtttccgcagctcggggagacaagttatgtcaagattccatgatgaaactcaagggcgttgttgctggcgctcgttccaaaggagaacacaaacagaaaatctttttaaccatctcctttggaggaatcaaaatctttgatgagaagacaggggttcccaccagccaaaagaaggaaggtgtttatgatgtgccaaaaagtcaacctgtaagtaatggctattcgtttgaggattttgaagaacggtttgctgcagccaccccgaacagaaacctgcccacagactttgatgagatttttgaggcaacgaaggctgtgacccaattagaactttttggggacatgtccacaccccctgatataacctctccccccactcctgcaactccaggtgatgcctttatcccatcttcatctcagacccttccagcgagtgcagatgtgtttagttctgtacctttcggcactgctgctgtaccctcaggttacgttgcaatgggcgctgtcctcccgtccttctggggtcagcagcccctcgtccaacagcagatggtcatgggtgcccagccaccagtcgctcaggtgatgccgggggctcagcccatcgcatggggccagccgggtctctttcctgccactcagcagccctggccaactgtggccgggcagtttccgccagccgccttcatgcccacacaaactgttatgcctttgccagctgccatgttccaaggtcccctcaccccccttgccaccgtcccaggcacgagtgactccaccaggtcaagtccacagaccgacaagcccaggcagaaaatgggcaaagaaacgtttaaggatttccagatggcccagcctccgcccgtgccctcccgcaaacccgaccagccctccctcacctgtacctcagaggccttctccagttacttcaacaaagtcggggtggcacaggatacagacgactgtgatgactttgacatctcccagttgaatttgacccctgtgacttctaccacaccatcgaccaactcacctccaaccccagcccctagacagagctctccatccaaatcatctgcatcccatgccagtgatcctaccacagatgacatctttgaagagggctttgaaagtcccagcaaaagcgaagagcaagaagctcctgatggatcacaggcctcatccaacagtgatccatttggtgagcccagtggggagcccagtggtgataatataagtccacaggccggtagctagatagcgcaggtctgggagccagagcctctgtacgcgcagatcaacagacctaagaaatagcatcgatgcgagctcgtggtgggtgctcaagactggcatggacatcagcatcacgacag

SEQ ID NO: 8487 - DNA, 4534 bp, Homo sapiens
  source 1..4534: mol_type = unassigned DNA
atttcccctcccgtcgctgggtccctgcgatcgcccccagctggtggggctcgcggagctcaggggagcggggtcctctgcgccgctgcagcgcgagttaataaacagttaagtttggaagactctgcagacacgttgagggggagttaccaagcccaggcagcaaaaacatcctggcacattcctggggagtcctcagctgccagcatctgattagaaccatatctctcgccgggagtggccgcgcggctccgaagctcccggccggcggctatttaagcgaggcccgccgcatccgctgcgctgtagcctggaggctccgggcgcggggaagtcatgctcgcttcacggaggcaatagctagccggtgtctgtgggaggttatgtttatttgagacttctccatcgggatcgcctggtgtcaccaagtgtccactggtactgaggtttgctgcctgccttcttgccatgtctaacgaagtagaaacaagtgcaaccaatggtcagcccgaccaacaggccgcaccaaaagcaccctcaaagaaggaaaaaaagaaaggccctgaaaagacagatgaatatctcttagcaaggttcaaaggcgatggtgtaaaatataaggccaagctgattggcattgatgatgtgccagatgcaagaggggataaaatgagccaagactctatgatgaaactaaagggaatggcggcagctggtcggtctcagggacaacacaaacaaaggatctgggtcaacatttccctttctgggataaaaataattgatgagaaaactggggtaatagagcatgaacatccagtaaataagatttctttcattgcccgtgatgtgacagacaaccgggcatttggttacgtgtgtggaggagaaggccagcatcagttttttgccataaaaaccgggcaacaggctgaaccattagttgttgatcttaaagacctttttcaagttatctataatgtaaagaaaaaggaagaagaaaagaaaaagatagaggaagccagcaaagcagttgagaatgggagtgaggccctaatgattctagatgaccaaactaacaaactgaaatcgggtgttgaccagatggatttgtttggggacatgtctacacctcctgacctaaatagtccaacagaaagcaaagatatcctgttagtggatctaaactctgaaatcgacaccaatcagaattctttaagagaaaatccattcttaacaaacggcatcacctcctgttctcttcctcgaccaacgcctcaggcatccttcttgcctgaaaatgccttttctgccaatctcaacttctttcccacccctaatcctgatcctttccgtgacgatcctttcacacagccagaccaatcgacaccttcttcgtttgattctctcaaatctccagatcagaagaaagagaattcgagtagctcgtctactccgctgagtaatgggcccctgaatggtgatgttgactactttggtcagcaatttgaccagatctctaaccggactggcaaacaggaagctcaggcaggcccatggcccttttcaagttcgcaaacccagccagcagtgagaactcaaaatggggtatctgaaagagaacagaacggcttctctgtcaaatcctccccgaacccttttgtgggaagccctcccaaaggactgtccatacagaatggcgtaaagcaggacttggaaagctctgtccagtcctcaccacatgactccatagccattatcccacctccacaaagtaccaaaccaggaagaggcagaaggactgctaagtcttcagccaatgacttgcttgcatcagacatctttgctcctcccgtctcagaaccttcaggccaggcgtcacccacaggacaacctacagccctgcagcccaaccctctggatctcttcaaaacaagtgctcctgccccagtggggcccctggtgggtctaggtggtgtaactgtcacactccctcaggcaggaccatggaacacagcatctttggtcttcaatcagtccccttcaatggctccgggagccatgatgggtggtcaaccttcaggttttagtcagcccgtcatttttggtacaagtccagctgtttcaggttggaaccagccttcaccctttgcagcctcaactccccctccagtgcctgttgtctggggcccttctgcatctgtggcacccaatgcttggtcaacaacaagccctttggggaatccttttcagagcaatatttttccagctcctgctgtgtccactcagcccccatccatgcactcctctctcctggtcactcctcctcagccacctcccagagctggccctcccaaggacatctccagtgatgccttcactgccttagacccacttggggataaagagatcaaggatgtgaaagaaatgtttaaggatttccaactgcggcagccacctgctgtgcccgcgcggaagggagagcagacttcttctgggactttgagtgcctttgccagttatttcaacagcaaggttggcattcctcaggagaatgcagaccatgatgactttgatgctaatcaactattgaacaagatcaatgaaccaccaaagccagctcccagacaagtttccctgccagttaccaaatctactgacaatgcatttgagaaccctttctttaaagattcttttggttcatcacaagcctctgtggcttcttctcaacctgtatcttctgagatgtatagggatccatttggaaatccttttgcctaaattctgaacttggtctgcagaccatccagaggaataaaaaggttggccttagtagtcaaaaacaaagctgatagccagacacgttctgatttctgcccttgttccagctttgacgtattatctgttgccttatttctcattgcctcttctacttgtaaaatgcttttcactttctgtctaggttaaagctaaactgaatctatggctttaaataaattaagatcctaaactctctagcttaagtgtaaatgaagtacagtagtttccctactgaaccctgcctcttgtgtccctggaaccttctagaacacctgccttctaccctctggttgggagatgcagccaccacatcccttcatatcatactgttttgaataaattttcaaatccttattgttcagagttgtttgggggttctgtttcagagcataaaacctaaaggttatagtagaacaaggcaccttcttaaaagaaatcttgcttcagaccatcagttacagagaatttctaaagtaaaattgaagcaactacaacttctccttagacactttggaatctaaccacttaaggacctttttaaagagatagcttctcttctttctgaagatcaatttctcccaaggccaagattgtccttttctcccatttcttgctagctattgcaaatgagggaagaacattattcatctctcctccccttttttttctgattcttttttcagtcagttttgctcctgggttcaagtagtattaccaccctttcacaagcaacagactctcacagggcaaaaaaaaaaaaaaatctaatgattcacagacagatctggagcctctcttcattctcagtaattgctagtcccaagaactagaattgcaaatgggcacaacctatatccttcctgtggaagaggaggccactctcttgagctgaagttccagaagagcagttaatgttcaagagaaattgaactcaactcagcaacaaaggactctattttgaagagcaacatatcacaaagctaaatgtgattgtgccaaacacattaggtgcttatttggggtcatgctaggcctttatcaagtaactggaaaacttttcttgcagccacaatctcaatgtcgttagtaggaagataagaggggagaaaaagctgtagaacaaatgtttggggttaccattgaaaatctaatgtctgcaatatttttctcctcacaacttggaaacgttcccagttcattttcagtcctgttgtgagcacagttctgaagggtttattattgtcaaaataagttttgttttgttttgtttatgttgggtttttaatgttgtctcttgacccttaatgctcaggttcttgtgggagttaatcagccacatccaatgttaccttgagggggaagaagagggtgatgctcagaagctaaacaagacaggggccacatgaccctctattgattagccccaagtagaaagtcctgtggttttatgtttaatggtaatagttgatcatatatggcataattttctatcagcttcctactcagtcactataaacacagacttgaaatagtactttaaatgtccaaatacctaaatgtgctaaactggaggtaactatttctaggtagttgaatttttgaaagtcatgatcagccacacaactgttttgtacatacttattttctcatgcacttttctgtatgcaaataaagctataaatttactcatttcaataaactggagtggcagaat

SEQ ID NO: 8488 - DNA, 3690 bp, Homo sapiens
  source 1..3690: mol_type = unassigned DNA
agtcctcagctgccagcatctgattagaaccatatctctcgccgggagtggccgcgcggctccgaagctcccggccggcggctatttaagcgaggcccgccgcatccgctgcgctgtagcctggaggctccgggcgcggggaagtcatgctcgcttcacggaggcaatagctagccggtgtctgtgggaggttatgtttatttgagacttctccatcgggatcgcctggtgtcaccaagtgtccactggtactgaggtttgctgcctgccttcttgccatgtctaacgaagtagaaacaagtgcaaccaatggtcagcccgaccaacaggccgcaccaaaagcaccctcaaagaaggaaaaaaagaaaggccctgaaaagacagatgaatatctcttagcaaggttcaaaggcgatggtgtaaaatataaggccaagctgattggcattgatgatgtgccagatgcaagaggggataaaatgagccaagactctatgatgaaactaaagggaatggcggcagctggtcggtctcagggacaacacaaacaaaggatctgggtcaacatttccctttctgggataaaaataattgatgagaaaactggggtaatagagcatgaacatccagtaaataagatttctttcattgcccgtgatgtgacagacaaccgggcatttggttacgtgtgtggaggagaaggccagcatcagttttttgccataaaaaccgggcaacaggctgaaccattagttgttgatcttaaagacctttttcaagttatctataatgtaaagaaaaaggaagaagaaaagaaaaagatagaggaagccagcaaagcagttgagaatgggagtgaggccctaatgattctagatgaccaaactaacaaactgaaatcgggtgttgaccagatggatttgtttggggacatgtctacacctcctgacctaaatagtccaacatcttcagccaatgacttgcttgcatcagacatctttgctcctcccgtctcagaaccttcaggccaggcgtcacccacaggacaacctacagccctgcagcccaaccctctggatctcttcaaaacaagtgctcctgccccagtggggcccctggtgggtctaggtggtgtaactgtcacactccctcaggcaggaccatggaacacagcatctttggtcttcaatcagtccccttcaatggctccgggagccatgatgggtggtcaaccttcaggttttagtcagcccgtcatttttggtacaagtccagctgtttcaggttggaaccagccttcaccctttgcagcctcaactccccctccagtgcctgttgtctggggcccttctgcatctgtggcacccaatgcttggtcaacaacaagccctttggggaatccttttcagagcaatatttttccagctcctgctgtgtccactcagcccccatccatgcactcctctctcctggtcactcctcctcagccacctcccagagctggccctcccaaggacatctccagtgatgccttcactgccttagacccacttggggataaagagatcaaggatgtgaaagaaatgtttaaggatttccaactgcggcagccacctgctgtgcccgcgcggaagggagagcagacttcttctgggactttgagtgcctttgccagttatttcaacagcaaggttggcattcctcaggagaatgcagaccatgatgactttgatgctaatcaactattgaacaagatcaatgaaccaccaaagccagctcccagacaagtttccctgccagttaccaaatctactgacaatgcatttgagaaccctttctttaaagattcttttggttcatcacaagcctctgtggcttcttctcaacctgtatcttctgagatgtatagggatccatttggaaatccttttgcctaaattctgaacttggtctgcagaccatccagaggaataaaaaggttggccttagtagtcaaaaacaaagctgatagccagacacgttctgatttctgcccttgttccagctttgacgtattatctgttgccttatttctcattgcctcttctacttgtaaaatgcttttcactttctgtctaggttaaagctaaactgaatctatggctttaaataaattaagatcctaaactctctagcttaagtgtaaatgaagtacagtagtttccctactgaaccctgcctcttgtgtccctggaaccttctagaacacctgccttctaccctctggttgggagatgcagccaccacatcccttcatatcatactgttttgaataaattttcaaatccttattgttcagagttgtttgggggttctgtttcagagcataaaacctaaaggttatagtagaacaaggcaccttcttaaaagaaatcttgcttcagaccatcagttacagagaatttctaaagtaaaattgaagcaactacaacttctccttagacactttggaatctaaccacttaaggacctttttaaagagatagcttctcttctttctgaagatcaatttctcccaaggccaagattgtccttttctcccatttcttgctagctattgcaaatgagggaagaacattattcatctctcctccccttttttttctgattcttttttcagtcagttttgctcctgggttcaagtagtattaccaccctttcacaagcaacagactctcacagggcaaaaaaaaaaaaaaatctaatgattcacagacagatctggagcctctcttcattctcagtaattgctagtcccaagaactagaattgcaaatgggcacaacctatatccttcctgtggaagaggaggccactctcttgagctgaagttccagaagagcagttaatgttcaagagaaattgaactcaactcagcaacaaaggactctattttgaagagcaacatatcacaaagctaaatgtgattgtgccaaacacattaggtgcttatttggggtcatgctaggcctttatcaagtaactggaaaacttttcttgcagccacaatctcaatgtcgttagtaggaagataagaggggagaaaaagctgtagaacaaatgtttggggttaccattgaaaatctaatgtctgcaatatttttctcctcacaacttggaaacgttcccagttcattttcagtcctgttgtgagcacagttctgaagggtttattattgtcaaaataagttttgttttgttttgtttatgttgggtttttaatgttgtctcttgacccttaatgctcaggttcttgtgggagttaatcagccacatccaatgttaccttgagggggaagaagagggtgatgctcagaagctaaacaagacaggggccacatgaccctctattgattagccccaagtagaaagtcctgtggttttatgtttaatggtaatagttgatcatatatggcataattttctatcagcttcctactcagtcactataaacacagacttgaaatagtactttaaatgtccaaatacctaaatgtgctaaactggaggtaactatttctaggtagttgaatttttgaaagtcatgatcagccacacaactgttttgtacatacttattttctcatgcacttttctgtatgcaaataaagctataaatttactcatttcaataaactggagtggcagaat

SEQ ID NO: 8489 - DNA, 561 bp, Homo sapiens
  source 1..561: mol_type = unassigned DNA
gctgtagcctggaggctccgggcgcggggaagtcatgctcgcttcacggaggcaatagctagccgtttttgtttggaaggaagagagccgctctgtaaaccgagaagagcagaaacaagcttccagacacatggaaagacttaaaaattatggaggggcgacttcacgaatagtaaatgttgctattgctctataaagtgacttcatgaaaaaatttctggccttagtcaggcaaagcaggggcatgggggagaaggaggtgtctgtgggaggttatgtttatttgagacttctccatcgggatcgcctggtgtcaccaagtgtccactggtactgaggtttgctgcctgccttcttgccatgtctaacgaagtagaaacaagtgcaaccaatggtcagcccgaccaacaggccgcaccaaaagcaccctcaaagaaggaaaaaaagaaaggccctgaaaagacagatgaatatctcttagcaaggttcaaaggcgatggtgtaaaatataaggccaagctgattggcattgatgatgtgccagatgcaagaggggataaa

SEQ ID NO: 8490 - DNA, 551 bp, Homo sapiens
  source 1..551: mol_type = unassigned DNA
gcacacatgaaacatggcaatgttcagggcagcatgtgattgactgccaaagtgtctcgagcaggaagtaccaagggaggatggagatggtaataatcagggttgggtggagaatatctgaggaaactgcacttgatttgggccttgaagagtaattgactggatttagatttatctagaaaggtcgttcccagcagaagcaacaagaacaacaagcttggaggtgtctgtgggaggttatgtttatttgagacttctccatcgggatcgcctggtgtcaccaagtgtccactggtactgaggtttgctgcctgccttcttgccatgtctaacgaagtagaaacaagtgcaaccaatggtcagcccgaccaacaggccgcaccaaaagcaccctcaaagaaggaaaaaaagaaaggccctgaaaagacagatgaatatctcttagcaaggttcaaaggcgatggtgtaaaatataaggccaagctgattggcattgatgatgtgccagatgcaagaggggataaaatgagccaagactctatgatgaaact

SEQ ID NO: 8491 - DNA, 651 bp, Homo sapiens
  source 1..651: mol_type = unassigned DNA
ctcagctgccagcatctgattagaaccatatctctcgccgggagtggccgcgcggctccgaagctcccggccggcggctatttaagcgaggcccgccgcatccgctgcgctgtagcctggaggctccgggcgcggggaagtcatgctcgcttcacggaggcaatagctagccgtgcaacagaaataaaccaaatgtgtttgaacatatgtcagagggctgacataatcatatgaagaatgctataccagtttggctttgggacgaaatgtgaatctactagggcaacatacaactgccctctgagtcagaagatcagaagttgctgtggctacacataattctggggtacatgtggagaacatgcagttttgttacataggtatacatgtgccatggtggtttgctgcatccatcaacccatcacctacattaggtgtctgtgggaggttatgtttatttgagacttctccatcgggatcgcctggtgtcaccaagtgtccactggtactgaggtttgctgcctgccttcttgccatgtctaacgaagtagaaacaagtgcaaccaatggtcagcccgaccaacaggccgcaccaaaagcaccctcaaagaaggaaaaaaagaaaggccctgaaaagacagatgaatatct

SEQ ID NO: 8492 - DNA, 4534 bp, Homo sapiens
  source 1..4534: mol_type = unassigned DNA
gtccttatttgcacccgccccccgcccgcgtcggtctggggcttttgacttctccccgaacacatttcccctcccgtcgctgggtccctgcgatcgcccccagctggtggggctcgcggagctcaggggagcggggtcctctgcgccgctgcagcgcgagttaataaacagttaagtttggaagactctgcagacacgttgagggggagttaccaagcccaggcagcaaaaacatcctggcacattcctggggagtcctcagctgccagcatctgattagaaccatatctctcgccgggagtggccgcgcggctccgaagctcccggccggcggctatttaagcgaggcccgccgcatccgctgcgctgtagcctggaggctccgggcgcggggaagtcatgctcgcttcacggaggcaatagctagccggtgtctgtgggaggttatgtttatttgagacttctccatcgggatcgcctggtgtcaccaagtgtccactggtactgaggtttgctgcctgccttcttgccatgtctaacgaagtagaaacaagtgcaaccaatggtcagcccgaccaacaggccgcaccaaaagcaccctcaaagaaggaaaaaaagaaaggccctgaaaagacagatgaatatctcttagcaaggttcaaaggcgatggtgtaaaatataaggccaagctgattggcattgatgatgtgccagatgcaagaggggataaaatgagccaagactctatgatgaaactaaagggaatggcggcagctggtcggtctcagggacaacacaaacaaaggatctgggtcaacatttccctttctgggataaaaataattgatgagaaaactggggtaatagagcatgaacatccagtaaataagatttctttcattgcccgtgatgtgacagacaaccgggcatttggttacgtgtgtggaggagaaggccagcatcagttttttgccataaaaaccgggcaacaggctgaaccattagttgttgatcttaaagacctttttcaagttatctataatgtaaagaaaaaggaagaagaaaagaaaaagatagaggaagccagcaaagcagttgagaatgggagtgaggccctaatgattctagatgaccaaactaacaaactgaaatcggaaagcaaagatatcctgttagtggatctaaactctgaaatcgacaccaatcagaattctttaagagaaaatccattcttaacaaacggcatcacctcctgttctcttcctcgaccaacgcctcaggcatccttcttgcctgaaaatgccttttctgccaatctcaacttctttcccacccctaatcctgatcctttccgtgacgatcctttcacacagccagaccaatcgacaccttcttcgtttgattctctcaaatctccagatcagaagaaagagaattcgagtagctcgtctactccgctgagtaatgggcccctgaatggtgatgttgactactttggtcagcaatttgaccagatctctaaccggactggcaaacaggaagctcaggcaggcccatggcccttttcaagttcgcaaacccagccagcagtgagaactcaaaatggggtatctgaaagagaacagaacggcttctctgtcaaatcctccccgaacccttttgtgggaagccctcccaaaggactgtccatacagaatggcgtaaagcaggacttggaaagctctgtccagtcctcaccacatgactccatagccattatcccacctccacaaagtaccaaaccaggaagaggcagaaggactgctaagtcttcagccaatgacttgcttgcatcagacatctttgctcctcccgtctcagaaccttcaggccaggcgtcacccacaggacaacctacagccctgcagcccaaccctctggatctcttcaaaacaagtgctcctgccccagtggggcccctggtgggtctaggtggtgtaactgtcacactccctcaggcaggaccatggaacacagcatctttggtcttcaatcagtccccttcaatggctccgggagccatgatgggtggtcaaccttcaggttttagtcagcccgtcatttttggtacaagtccagctgtttcaggttggaaccagccttcaccctttgcagcctcaactccccctccagtgcctgttgtctggggcccttctgcatctgtggcacccaatgcttggtcaacaacaagccctttggggaatccttttcagagcaatatttttccagctcctgctgtgtccactcagcccccatccatgcactcctctctcctggtcactcctcctcagccacctcccagagctggccctcccaaggacatctccagtgatgccttcactgccttagacccacttggggataaagagatcaaggatgtgaaagaaatgtttaaggatttccaactgcggcagccacctgctgtgcccgcgcggaagggagagcagacttcttctgggactttgagtgcctttgccagttatttcaacagcaaggttggcattcctcaggagaatgcagaccatgatgactttgatgctaatcaactattgaacaagatcaatgaaccaccaaagccagctcccagacaagtttccctgccagttaccaaatctactgacaatgcatttgagaaccctttctttaaagattcttttggttcatcacaagcctctgtggcttcttctcaacctgtatcttctgagatgtatagggatccatttggaaatccttttgcctaaattctgaacttggtctgcagaccatccagaggaataaaaaggttggccttagtagtcaaaaacaaagctgatagccagacacgttctgatttctgcccttgttccagctttgacgtattatctgttgccttatttctcattgcctcttctacttgtaaaatgcttttcactttctgtctaggttaaagctaaactgaatctatggctttaaataaattaagatcctaaactctctagcttaagtgtaaatgaagtacagtagtttccctactgaaccctgcctcttgtgtccctggaaccttctagaacacctgccttctaccctctggttgggagatgcagccaccacatcccttcatatcatactgttttgaataaattttcaaatccttattgttcagagttgtttgggggttctgtttcagagcataaaacctaaaggttatagtagaacaaggcaccttcttaaaagaaatcttgcttcagaccatcagttacagagaatttctaaagtaaaattgaagcaactacaacttctccttagacactttggaatctaaccacttaaggacctttttaaagagatagcttctcttctttctgaagatcaatttctcccaaggccaagattgtccttttctcccatttcttgctagctattgcaaatgagggaagaacattattcatctctcctccccttttttttctgattcttttttcagtcagttttgctcctgggttcaagtagtattaccaccctttcacaagcaacagactctcacagggcaaaaaaaaaaaaaaatctaatgattcacagacagatctggagcctctcttcattctcagtaattgctagtcccaagaactagaattgcaaatgggcacaacctatatccttcctgtggaagaggaggccactctcttgagctgaagttccagaagagcagttaatgttcaagagaaattgaactcaactcagcaacaaaggactctattttgaagagcaacatatcacaaagctaaatgtgattgtgccaaacacattaggtgcttatttggggtcatgctaggcctttatcaagtaactggaaaacttttcttgcagccacaatctcaatgtcgttagtaggaagataagaggggagaaaaagctgtagaacaaatgtttggggttaccattgaaaatctaatgtctgcaatatttttctcctcacaacttggaaacgttcccagttcattttcagtcctgttgtgagcacagttctgaagggtttattattgtcaaaataagttttgttttgttttgtttatgttgggtttttaatgttgtctcttgacccttaatgctcaggttcttgtgggagttaatcagccacatccaatgttaccttgagggggaagaagagggtgatgctcagaagctaaacaagacaggggccacatgaccctctattgattagccccaagtagaaagtcctgtggttttatgtttaatggtaatagttgatcatatatggcataattttctatcagcttcctactcagtcactataaacacagacttgaaatagtactttaaatgtccaaatacctaaatgtgctaaactggaggtaactatttctaggtagttgaatttttgaaagtcatgatcagccacacaactgttttgtacatacttattttctcatgcacttttctgtatgcaaataaagctataaatttactcatttcaataaactggagtggcagaat

SEQ ID NO: 8493 - DNA, 3096 bp, Homo sapiens
  source 1..3096: mol_type = unassigned DNA
catcttgcatcagcctgtggatgtatgcctaccaccgggctccttcaccagcaaagtggaaaaagaagcgtttcacaacaaattcttctttttgggttggggaaacgcagtggattatagctctgttttcttctttccaaaactgtgcacccctggatgaaacctccatcaagggagacctgcaagttgcctggggttcagtgctctagaaagttccaaggtttgtggcttgaattattctaaagaagctgaaataattgaagagaagcagaggccagctgtttttgaggatcctgctccacagagaatgctctgcacccgttgatactccagttccaacaccatcttctgagatgatcctgattcccagaatgctcttggtgctgttcctgctgctgcctatcttgagttctgcaaaagctcaggttaatccagctatatgccgctatcctctgggcatgtcaggaggccagattccagatgaggacatcacagcttccagtcagtggtcagagtccacagctgccaaatatggaaggctggactcagaagaaggggatggagcctggtgccctgagattccagtggaacctgatgacctgaaggagtttctgcagattgacttgcacaccctccattttatcactctggtggggacccaggggcgccatgcaggaggtcatggcatcgagtttgcccccatgtacaagatcaattacagtcgggatggcactcgctggatctcttggcggaaccgtcatgggaaacaggtgctggatggaaatagtaacccctatgacattttcctaaaggacttggagccgcccattgtagccagatttgtccggttcattccagtcaccgaccactccatgaatgtgtgtatgagagtggagctttacggctgtgtctggctagatggcttggtgtcttacaatgctccagctgggcagcagtttgtactccctggaggttccatcatttatctgaatgattctgtctatgatggagctgttggatacagcatgacagaagggctaggccaattgaccgatggtgtgtctggcctggacgatttcacccagacccatgaataccacgtgtggcccggctatgactatgtgggctggcggaacgagagtgccaccaatggctacattgagatcatgtttgaatttgaccgcatcaggaatttcactaccatgaaggtccactgcaacaacatgtttgctaaaggtgtgaagatctttaaggaggtacagtgctacttccgctctgaagccagtgagtgggaacctaatgccatttccttcccccttgtcctggatgacgtcaaccccagtgctcggtttgtcacggtgcctctccaccaccgaatggccagtgccatcaagtgtcaataccattttgcagatacctggatgatgttcagtgagatcaccttccaatcagatgctgcaatgtacaacaactctgaagccctgcccacctctcctatggcacccacaacctatgatccaatgcttaaagttgatgacagcaacactcggatcctgattggctgcttggtggccatcatctttatcctcctggccatcattgtcatcatcctctggaggcagttctggcagaaaatgctggagaaggcttctcggaggatgctggatgatgaaatgacagtcagcctttccctgccaagtgattctagcatgttcaacaataaccgctcctcatcacctagtgaacaagggtccaactcgacttacgatcgcatctttccccttcgccctgactaccaggagccatccaggctgatacgaaaactcccagaatttgctccaggggaggaggagtcaggctgcagcggtgttgtgaagccagtccagcccagtggccctgagggggtgccccactatgcagaggctgacatagtgaacctccaaggagtgacaggaggcaacacatactcagtgcctgccgtcaccatggacctgctctcaggaaaagatgtggctgtggaggagttccccaggaaactcctaactttcaaagagaagctgggagaaggacagtttggggaggttcatctctgtgaagtggagggaatggaaaaattcaaagacaaagattttgccctagatgtcagtgccaaccagcctgtcctggtggctgtgaaaatgctccgagcagatgccaacaagaatgccaggaatgattttcttaaggagataaagatcatgtctcggctcaaggacccaaacatcatccatctattagctgtgtgtatcactgatgaccctctctgtatgatcactgaatacatggagaatggagatctcaatcagtttctttcccgccacgagccccctaattcttcctccagcgatgtacgcactgtcagttacaccaatctgaagtttatggctacccaaattgcctctggcatgaagtacctttcctctcttaattttgttcaccgagatctggccacacgaaactgtttagtgggtaagaactacacaatcaagatagctgactttggaatgagcaggaacctgtacagtggtgactattaccggatccagggccgggcagtgctccctatccgctggatgtcttgggagagtatcttgctgggcaagttcactacagcaagtgatgtgtgggcctttggggttactttgtgggagactttcaccttttgtcaagaacagccctattcccagctgtcagatgaacaggttattgagaatactggagagttcttccgagaccaagggaggcagacttacctccctcaaccagccatttgtcctgactctgtgtataagctgatgctcagctgctggagaagagatacgaagaaccgtccctcattccaagaaatccaccttctgctccttcaacaaggcgacgagtgatgctgtcagtgcctggccatgttcctacggctcaggtcctccctacaagacctaccactcacccatgcctatgccactccatctggacatttaatgaaactgagagacagaggcttgtttgctttgccctcttttcctggtcacccccactccctacccctgactcatatacact

SEQ ID NO: 8494 - DNA, 3207 bp, Homo sapiens
  source 1..3207: mol_type = unassigned DNA
aaaggcatcttgcatcagcctgtggatgtatgcctaccaccgggctccttcaccagcaaagtggaaaaagaagcgtttcacaacaaattcttctttttgggttggggaaacgcagtggattatagctctgttttcttctttccaaaactgtgcacccctggatgaaacctccatcaagggagacctgcaagttgcctggggttcagtgctctagaaagttccaaggtttgtggcttgaattattctaaagaagctgaaataattgaagagaagcagaggccagctgtttttgaggatcctgctccacagagaatgctctgcacccgttgatatgcctcccaggacccagagggagactgtagcctcatttctgtggagacctttggctggactctcctggctctcccagagactccagttccaacaccatcttctgagatgatcctgattcccagaatgctcttggtgctgttcctgctgctgcctatcttgagttctgcaaaagctcaggttaatccagctatatgccgctatcctctgggcatgtcaggaggccagattccagatgaggacatcacagcttccagtcagtggtcagagtccacagctgccaaatatggaaggctggactcagaagaaggggatggagcctggtgccctgagattccagtggaacctgatgacctgaaggagtttctgcagattgacttgcacaccctccattttatcactctggtggggacccaggggcgccatgcaggaggtcatggcatcgagtttgcccccatgtacaagatcaattacagtcgggatggcactcgctggatctcttggcggaaccgtcatgggaaacaggtgctggatggaaatagtaacccctatgacattttcctaaaggacttggagccgcccattgtagccagatttgtccggttcattccagtcaccgaccactccatgaatgtgtgtatgagagtggagctttacggctgtgtctggctagatggcttggtgtcttacaatgctccagctgggcagcagtttgtactccctggaggttccatcatttatctgaatgattctgtctatgatggagctgttggatacagcatgacagaagggctaggccaattgaccgatggtgtgtctggcctggacgatttcacccagacccatgaataccacgtgtggcccggctatgactatgtgggctggcggaacgagagtgccaccaatggctacattgagatcatgtttgaatttgaccgcatcaggaatttcactaccatgaaggtccactgcaacaacatgtttgctaaaggtgtgaagatctttaaggaggtacagtgctacttccgctctgaagccagtgagtgggaacctaatgccatttccttcccccttgtcctggatgacgtcaaccccagtgctcggtttgtcacggtgcctctccaccaccgaatggccagtgccatcaagtgtcaataccattttgcagatacctggatgatgttcagtgagatcaccttccaatcagatgctgcaatgtacaacaactctgaagccctgcccacctctcctatggcacccacaacctatgatccaatgcttaaagttgatgacagcaacactcggatcctgattggctgcttggtggccatcatctttatcctcctggccatcattgtcatcatcctctggaggcagttctggcagaaaatgctggagaaggcttctcggaggatgctggatgatgaaatgacagtcagcctttccctgccaagtgattctagcatgttcaacaataaccgctcctcatcacctagtgaacaagggtccaactcgacttacgatcgcatctttccccttcgccctgactaccaggagccatccaggctgatacgaaaactcccagaatttgctccaggggaggaggagtcaggctgcagcggtgttgtgaagccagtccagcccagtggccctgagggggtgccccactatgcagaggctgacatagtgaacctccaaggagtgacaggaggcaacacatactcagtgcctgccgtcaccatggacctgctctcaggaaaagatgtggctgtggaggagttccccaggaaactcctaactttcaaagagaagctgggagaaggacagtttggggaggttcatctctgtgaagtggagggaatggaaaaattcaaagacaaagattttgccctagatgtcagtgccaaccagcctgtcctggtggctgtgaaaatgctccgagcagatgccaacaagaatgccaggaatgattttcttaaggagataaagatcatgtctcggctcaaggacccaaacatcatccatctattagctgtgtgtatcactgatgaccctctctgtatgatcactgaatacatggagaatggagatctcaatcagtttctttcccgccacgagccccctaattcttcctccagcgatgtacgcactgtcagttacaccaatctgaagtttatggctacccaaattgcctctggcatgaagtacctttcctctcttaattttgttcaccgagatctggccacacgaaactgtttagtgggtaagaactacacaatcaagatagctgactttggaatgagcaggaacctgtacagtggtgactattaccggatccagggccgggcagtgctccctatccgctggatgtcttgggagagtatcttgctgggcaagttcactacagcaagtgatgtgtgggcctttggggttactttgtgggagactttcaccttttgtcaagaacagccctattcccagctgtcagatgaacaggttattgagaatactggagagttcttccgagaccaagggaggcagacttacctccctcaaccagccatttgtcctgactctgtgtataagctgatgctcagctgctggagaagagatacgaagaaccgtccctcattccaagaaatccaccttctgctccttcaacaaggcgacgagtgatgctgtcagtgcctggccatgttcctacggctcaggtcctccctacaagacctaccactcacccatgcctatgccactccatctggacatttaatgaaactgagagacagaggcttgtttgctttgccctcttttcctggtcacccccactccctacccctgactcatatacacttttttttttttttacattaaagaact

SEQ ID NO: 8495 - DNA, 718 bp, Homo sapiens
  source 1..718: mol_type = unassigned DNA
gctccgcgtgtgtgccccaactgtcctggaagcttcaattggaaaactccaaactttaagttttgcttatagcttcagctcaacctccatcaagggagacctgcaagttgcctggggttcagtgctctagaaagttccaaggtttgtggcttgaattattctaaagaagctgaaataattgaagagaagcagaggccagctgtttttgaggatcctgctccacagagaatgctctgcacccgttgatactccagttccaacaccatcttctgagatgatcctgattcccagaatgctcttggtgctgttcctgctgctgcctatcttgagttctgcaaaagctcaggttaatccagctatatgccgctatcctctgggcatgtcaggaggccagattccagatgaggacatcacagcttccagtcagtggtcagagtccacagctgccaaatatggaaggctggactcagaagaaggggatggagcctggtgccctgagattccagtggaacctgatgacctgaaggagtttctgcagattgacttgcacaccctccattttatcactctggtggggacccaggggcgccatgcaggaggtcatggcatcgagtttgcccccatgtacaagatcaattacagtcgggatggcactcgctggatctcttggcggaaccgtcatgggaaacaggtgctggatggaaatagtaacccctat

SEQ ID NO: 8496 - DNA, 693 bp, Homo sapiens
  source 1..693: mol_type = unassigned DNA
catctttatcctcctggccatcattgtcatcatcctctggaggcagttctggcagaaaatgctggagaaggcttctcggaggatgctggatgatgaaatgacagtcagcctttccctgccaagtgattctagcatgttcaacaataaccgctcctcatcacctagtgaacaagggtccaactcgacttacgatcgcatctttccccttcgccctgactaccaggagccatccaggctgatacgaaaactcccagaatttgctccaggggaggaggagtcaggctgcagcggtgttgtgaagccagtccagcccagtggccctgagggggtgccccactatgcagaggctgacatagtgaacctccaaggagtgacaggaggcaacacatactcagtgcctgccgtcaccatggacctgctctcaggaaaagatgtggctgtggaggagttccccaggaaactcctaactttcaaagagaagctgggagaaggacagtttggggaggtgagttgattctttgattcccttatagctcgaagaaggtggttggataaaaatgatcagtagaacaaagagtcccttccagaggtggattcacaacagaatgtctcttccatttgtctctccttgcattgtcctctggatttcagtattgggtcaacctaatctttgtcaaatagctgtggagttcc

SEQ ID NO: 8497 - DNA, 656 bp, Homo sapiens
  source 1..656: mol_type = unassigned DNA
aaacagagaagagctggtgatagctccagagctcagagaaaggaggtctctttacaagaagtctggctctcaaagcctccatcaagggagacctgcaagttgcctggggttcagtgctctagaaagttccaaggtttgtggcttgaattattctaaagaagctgaaataattgaagagaagcagaggccagctgtttttgaggatcctgctccacagagaatgctctgcacccgttgatactccagttccaacaccatcttctgagatgatcctgattcccagaatgctcttggtgctgttcctgctgctgcctatcttgagttctgcaaaagctcaggttaatccagctatatgccgctatcctctgggcatgtcaggaggccagattccagatgaggacatcacagcttccagtcagtggtcagagtccacagctgccaaatatggaaggctggactcagaagaaggggatggagcctggtgccctgagattccagtggaacctgatgacctgaaggagtttctgcagattgacttgcacaccctccattttatcactctggtggggacccaggggcgccatgcaggaggtcatggcatcgagtttgcccccatgtacaagatcaattacagtcgggatggcactcgctggatc

SEQ ID NO: 8498 - DNA, 558 bp, Homo sapiens
  source 1..558: mol_type = unassigned DNA
cttaaagttgatgacagcaacactcggatcctgattggctgcttggtggccatcatctttatcctcctggccatcattgtcatcatcctctggaggcagttctggcagaaaatgctggagaaggcttctcggaggatgctggatgatgaaatgacagtcagcctttccctgccaagtgattctagcatgttcaacaataaccgctcctcatcacctagtgaacaagggtccaactcgacttacgatcgcatctttccccttcgccctgactaccaggagccatccaggctgatacgaaaactcccagaatttgctccaggggaggaggagtcaggtgaggatgatgtggtgggcagggtgtcaagggagaaacctcagcaagcatcaggtaggtatgacacgcctgctcccagttcattgcatctatttttagtctctgctaacctcctgagaagtccacattctctttctagatttggtctgccgctgctcctggcctaatttgagcaactctcctttgctactgaatataagatgtgtggagggacccacatacca

SEQ ID NO: 8499 - DNA, 1909 bp, Homo sapiens
  source 1..1909: mol_type = unassigned DNA
aaaggcatcttgcatcagcctgtggatgtatgcctaccaccgggctccttcaccagcaaagtggaaaaagaagcgtttcacaacaaattcttctttttgggttggggaaacgcagtggattatagctctgttttcttctttccaaaactgtgcacccctggatgaaacctccatcaagggagacctgcaagttgcctggggttcagtgctctagaaagttccaaggtttgtggcttgaattattctaaagaagctgaaataattgaagagaagcagaggccagctgtttttgaggatcctgctccacagagaatgctctgcacccgttgatactccagttccaacaccatcttctgagatgatcctgattcccagaatgctcttggtgctgttcctgctgctgcctatcttgagttctgcaaaagctcaggttaatccagctatatgccgctatcctctgggcatgtcaggaggccagattccagatgaggacatcacagcttccagtcagtggtcagagtccacagctgccaaatatggaaggctggactcagaagaaggggatggagcctggtgccctgagattccagtggaacctgatgacctgaaggagtttctgcagattgacttgcacaccctccattttatcactctggtggggacccaggggcgccatgcaggaggtcatggcatcgagtttgcccccatgtacaagatcaattacagtcgggatggcactcgctggatctcttggcggaaccgtcatgggaaacaggtgctggatggaaatagtaacccctatgacattttcctaaaggacttggagccgcccattgtagccagatttgtccggttcattccagtcaccgaccactccatgaatgtgtgtatgagagtggagctttacggctgtgtctggctagatggcttggtgtcttacaatgctccagctgggcagcagtttgtactccctggaggttccatcatttatctgaatgattctgtctatgatggagctgttggatacagcatgacagaagggctaggccaattgaccgatggtgtgtctggcctggacgatttcacccagacccatgaataccacgtgtggcccggctatgactatgtgggctggcggaacgagagtgccaccaatggctacattgagatcatgtttgaatttgaccgcatcaggaatttcactaccatgaaggtccactgcaacaacatgtttgctaaaggtgtgacctctcttaattttgttcaccgagatctggccacacgaaactgtttagtgggtaagaactacacaatcaagatagctgactttggaatgagcaggaacctgtacagtggtgactattaccggatccagggccgggcagtgctccctatccgctggatgtcttgggagagtatcttgctgggcaagttcactacagcaagtgatgtgtgggcctttggggttactttgtgggagactttcaccttttgtcaagaacagccctattcccagctgtcagatgaacaggttattgagaatactggagagttcttccgagaccaagggaggcagacttacctccctcaaccagccatttgtcctgactctgtgtataagctgatgctcagctgctggagaagagatacgaagaaccgtccctcattccaagaaatccaccttctgctccttcaacaaggcgacgagtgatgctgtcagtgcctggccatgttcctacggctcaggtcctccctacaagacctaccactcacccatgcctatgccactccatctggacatttaatgaaactgagagacagaggcttgtttgctttgccctcttttcctggtcacccccactccctacccctgactcatatacacttttttttttttttacattaaaga

SEQ ID NO: 8500 - DNA, 2516 bp, Homo sapiens
  source 1..2516: mol_type = unassigned DNA
agctggtagagaagtaagcctgcttggcaaccacctgcagggctgcagagatgaattacattttcggaaacaacacacttctatactctcgcggcagtcgaggaggcaatactagctctagccatggctcagcaggcccaaagcagaaacactgggcaaaaaagggctcgtcagatgaactgcaagctgagccagaaccttcacgctggcagcagatagttgcatttttcactcgaagacacagctttattgactgcatctcggtagccaccagctccacccaggcaaatcctcccccagtactggtcaacacagatagcttggaaacaccaacttacgttaatggcacagatgcagattatgaatatgaagaaatcacacttgaaaggggaaattcagggcttggtttcagcattgcaggaggtacggacaacccacacattggagatgactcaagtattttcattaccaaaattatcacagggggagcagccgcccaagatggaagattgcgggtcaatgactgtatattacgagtaaatgaagtagatgttcgtgatgtaacacatagcaaagcagttgaagcgttgaaagaagcagggtctattgtacgcttgtatgtaaaaagaaggaaaccagtgtcagaaaaaataatggaaataaagctcattaaaggtcctaaaggtcttgggtttagcattgctggaggtgttggaaatcagcatattcctggggataatagcatctatgtaaccaaaataattgaaggaggtgcagcacataaggatggcaaacttcagattggagataaacttttagcagtgaataacgtatgtttagaagaagttactcatgaagaagcagtaactgccttaaagaacacatctgattttgtttatttgaaagtggcaaaacccacaagtatgtatatgaatgatggctatgcaccacctgatatcaccaactcttcttctcagcctgttgataaccatgttagcccatcttccttcttgggccagacaccagcatctccagccagatactccccagtttctaaagcagtacttggagatgatgaaattacaagggaacctagaaaagttgttcttcatcgtggctcaacgggccttggtttcaacattgtaggaggagaagatggagaaggaatatttatttcctttatcttagccggaggacctgctgatctaagtggagagctcagaaaaggagatcgtattatatcggtaaacagtgttgacctcagagctgctagtcatgagcaggcagcagctgcattgaaaaatgctggccaggctgtcacaattgttgcacaatatcgacctgaagaatacagtcgttttgaagctaaaatacatgatttacgggagcagatgatgaatagtagtattagttcagggtcaggttctcttcgaactagccagaagcgatccctctatgtcagagccctttttgattatgacaagactaaagacagtgggcttcccagtcagggactgaacttcaaatttggagatatcctccatgttattaatgcttctgatgatgaatggtggcaagccaggcaggttacaccagatggtgagagcgatgaggtcggagtgattcccagtaaacgcagagttgagaagaaagaacgagcccgattaaaaacagtgaaattcaattctaaaacgagagataaaggggagatccctgacgacatgggatcaaaaggcctgaagcatgtaacttctaatgccagcgatagtgaaagtagttacctaatcttgattacagatgagtatggctgctcaaaaggtggtcaagaagaatacgtcttatcttatgaaccagtgaatcaacaagaagttaattatactcgaccagtgatcatattgggacctatgaaagacaggataaatgatgacttgatctcagaatttcctgacaaatttggatcctgtgttcctcatacaactagaccaaaacgagattatgaggtagatggaagagattatcattttgtgacttcaagagagcagatggaaaaagatatccaggaacataaattcattgaagctggccagtataacaatcatctatatggaacaagtgttcagtctgtacgagaagtagcagaaaagggcaaacactgtatccttgatgtgtctggaaatgccataaagagattacagattgcacagctttaccctatctccatttttattaaacccaaatccatggaaaatatcatggaaatgaataagcgtctaacagaagaacaagccagaaaaacatttgagagagccatgaaactggaacaggagtttactgaacatttcacagctattgtacagggggatacgctggaagacatttacaaccaagtgaaacagatcatagaagaacaatctggttcttacatctgggttccggcaaaagaaaagctatgaaaactcatgtttctctgtttctcttttccacaattccattttctttggcatctctttgccctt

SEQ ID NO: 8501 - DNA, 3053 bp, Homo sapiens
  source 1..3053: mol_type = unassigned DNA
atcagctaacaaaagaacagcttttggttcctgcagacgctggtgaaaaaataatcatgagaaagaaatccaccttatgtcgtcttttttgtctgcaaaaataaactcagccatcatacagctaacaggtacagagggaagatacgagctctttcataggaagaaatcactgagaaaatgagcatcatttctcaaggtttttattttcactgatctacaagtgatgctgctgtaattgtagctgcagtttttaccgatcattcaccactcagcagctggtagagaagtaagcctgcttggcaaccacctgcagggctgcagagatgaattacattttcggaaacaacacacttctatactctcgcggcagtcgaggaggcaatactagctctagccatggctcagcaggcccaaagcagaaacactgggcaaaaaagggctcgtcagatgaactgcaagctgagccagaaccttcacgctggcagcagatagttgcatttttcactcgaagacacagctttattgactgcatctcggtagccaccagctccacccaggcaaatcctcccccagtactggtcaacacagatagcttggaaacaccaacttacgttaatggcacagatgcagattatgaatatgaagaaatcacacttgaaaggggaaattcagggcttggtttcagcattgcaggaggtacggacaacccacacattggagatgactcaagtattttcattaccaaaattatcacagggggagcagccgcccaagatggaagattgcgggtcaatgactgtatattacgagtaaatgaagtagatgttcgtgatgtaacacatagcaaagcagttgaagcgttgaaagaagcagggtctattgtacgcttgtatgtaaaaagaaggaaaccagtgtcagaaaaaataatggaaataaagctcattaaaggtcctaaaggtcttgggtttagcattgctggaggtgttggaaatcagcatattcctggggataatagcatctatgtaaccaaaataattgaaggaggtgcagcacataaggatggcaaacttcagattggagataaacttttagcagtgaataacgtatgtttagaagaagttactcatgaagaagcagtaactgccttaaagaacacatctgattttgtttatttgaaagtggcaaaacccacaagtatgtatatgaatgatggctatgcaccacctgatatcaccaactcttcttctcagcctgttgataaccatgttagcccatcttccttcttgggccagacaccagcatctccagccagatactccccagtttctaaagcagtacttggagatgatgaaattacaagggaacctagaaaagttgttcttcatcgtggctcaacgggccttggtttcaacattgtaggaggagaagatggagaaggaatatttatttcctttatcttagccggaggacctgctgatctaagtggagagctcagaaaaggagatcgtattatatcggtaaacagtgttgacctcagagctgctagtcatgagcaggcagcagctgcattgaaaaatgctggccaggctgtcacaattgttgcacaatatcgacctgaagaatacagtcgttttgaagctaaaatacatgatttacgggagcagatgatgaatagtagtattagttcagggtcaggttctcttcgaactagccagaagcgatccctctatgtcagagccctttttgattatgacaagactaaagacagtgggcttcccagtcagggactgaacttcaaatttggagatatcctccatgttattaatgcttctgatgatgaatggtggcaagccaggcaggttacaccagatggtgagagcgatgaggtcggagtgattcccagtaaacgcagagttgagaagaaagaacgagcccgattaaaaacagtgaaattcaattctaaaacgagagataaaggggagatccctgacgacatgggatcaaaaggcctgaagcatgtaacttctaatgccagcgatagtgaaagtagttaccgtggtcaagaagaatacgtcttatcttatgaaccagtgaatcaacaagaagttaattatactcgaccagtgatcatattgggacctatgaaagacaggataaatgatgacttgatctcagaatttcctgacaaatttggatcctgtgttcctcatacaactagaccaaaacgagattatgaggtagatggaagagattatcattttgtgacttcaagagagcagatggaaaaagatatccaggaacataaattcattgaagctggccagtataacaatcatctatatggaacaagtgttcagtctgtacgagaagtagcagaaaagggcaaacactgtatccttgatgtgtctggaaatgccataaagagattacagattgcacagctttaccctatctccatttttattaaacccaaatccatggaaaatatcatggaaatgaataagcgtctaacagaagaacaagccagaaaaacatttgagagagccatgaaactggaacaggagtttactgaacatttcacagctattgtacagggggatacgctggaagacatttacaaccaagtgaaacagatcatagaagaacaatctggttcttacatctgggttccggcaaaagaaaagctatgaaaactcatgtttctctgtttctcttttccacaattccattttctttggcatctctttgccctttcctctggagtctttcttgagtactgatttcatgttgaattgtatcccacacatcatggtctgcagcttctttttcacatgtagtgtctccttcaagttacatcgtgtgtattatttaatgtcactattggttagtggccatttttcagaactgaagatggaatggcctgaccagctattaagaacgtggggagacgcagaaattgtggtaaaattccttaatgtttaagggaaagtaactttaagagatttttggaaaagctttatatacattcttttcaaatttcagtacaaatgaaa

SEQ ID NO: 8502 - DNA, 5074 bp, Homo sapiens
  source 1..5074: mol_type = unassigned DNA
ggggctgaggaggcgagggcagcggagtttcctgccctgagatagttgcagcccgctctgctgcaaccatttcaaattagagaagaaagcagttcagccggtggggctggcgggactctgaccggcccggtggcctcgccggcaacggccccgccccgctggcggcagcggcggcggcagcggctgcgcggggcctggaactggtcgggccggctggggttccgggggacaggtttgcagggtggggcccgagaggctggcgggcaggcagcagtggagccggaagggtaggcagccaggggagagagagaggagctatggagagggcccgcaagttctcgggctccggcttggccatgggcttgggctccgcctccgcttcggcctggaggagggcttcgcagaggtgggcctggccgctccgctccctgcggcccggaggggatgccagagagcctcgcaagatcatcctgcacaaaggctccacaggcctgggcttcaacatcgtaggaggagaggatggagaaggcatttttgtctccttcatcctggcaggaggcccagctgacctgagtggggagctgcgcaggggagaccggatcttatcggtgaatggagtgaatctgaggaatgcaactcatgagcaggctgcagctgctctgaaacgggccggccagtcagtcaccattgtggcccagtacagacctgaagaatacagtcgctttgaatcgaagatacatgacttacgagaacaaatgatgaacagcagcatgagctctgggtctgggtccctccgaacaagtgaaaagaggtccttgtatgtcagggccctgtttgattatgatcggactcgggacagctgcctgccaagccaggggctcagcttctcttatggtgacattctgcatgtcattaatgcctctgatgatgagtggtggcaggcaaggctggtgaccccacacggagaaagtgagcagatcggtgtgatccccagtaagaagagggtggaaaagaaagaaagagctcgattgaaaactgtgaagttccatgccaggacggggatgattgagtctaacaggtcgatcaaaacgaaacgtaaaaagagtttccgcctctctcgaaagtttccattttacaagagcaaagaaaacatggcccaggagagcagcatacaggaacagggagtgacatccaacaccagtgacagcgaaagcagttccaaaggacaagaggatgctattttgtcatatgagccagtgacacggcaagaaattcactatgcaaggcctgtgatcatcctgggcccaatgaaggaccgagtcaatgatgacctgatctccgaatttccacataaatttggatcctgtgtgccacatactacccggcctcgacgtgataatgaggtggatggacaagactaccactttgtggtgtcccgagaacaaatggagaaagatattcaggacaacaagttcatcgaggcgggccaatttaatgataacctctatgggaccagcatccagtcagtgcgggcagttgcagagaggggcaagcactgcatcttagatgtttccggcaatgctatcaagagactgcagcaagcacaactttaccccattgccattttcatcaagcccaagtccattgaagcccttatggaaatgaaccgaaggcagacatatgaacaagcaaataagatctatgacaaagccatgaaactggagcaggaatttggagagtactttacagccattgtacagggtgactcactggaagagatttataacaaaatcaaacaaatcattgaggaccagtctgggcactacatttgggtcccatcccctgaaaaactctgaagaatcccctccaaccattctcttgtgaacagaagaaatcaagtccctcttccctcctccctcttcattcctgtccccatggggagaacaaatgctactgttcttgtccccttttttagatatgtcaaaaaaaattaagttttctagtcctgttctttttttttttttaagtttttgtttgtttcagtttattttttgggatgatgccatctcattcatcatgtgactgtgcccattcctgcatggacctttcccaagcgctagcacaggtgcaaaatccatcagagccattgttttcataaaaaccaagcagaagtgaagagaaaagaggaggactgatggaaagacagactctggacagctgcacggcttgtgaagtgagctaaatgcaccacatgatgagatgctcctgggcatttctccctatctgtactgctgtcttgcagctctgaacggtgcaacgtaatggcgacagaaagtatcttatttatatatagatatatatatgtaatttatataaaatatatagaaattattatatatatatattatacactctcatataatatatatatattcacacacatttgggttagaaaatctatggagacttcatcaatggtactatgttattagagaaatgctttaattttcatattccaatcagatggcatcttctatcccagctggttgggaagggattgaagatggtagcaagtgctgcactaagggcactcgcatttggtcattctcttgagagctaggaggggtcagcctgaggccggagaggaagggcttttgcctggggtgagagggtgagagacttgacctgaaagcagctgctgcccctgaggtgcagccagagtcctgtgtgcggacagagagaatggctaatgatgctccgcgtggaattgcctattgttttatgccacctgatgtgtctgcatgagaggtttcctttttgttcctttttaagctgctgttaaaccaaaaccatgttgtgctactgtgtcagccttttcattattgcaaattttacttttactatttaagtgaatgcatagaatccaatttgccaaggttctaaaggcttatgaggtcctgaaggagccaggccttgtgatggagtaggtgacacaggcctggttgtcctgtcagcagaagggaaagcaggggctgggctgagaggaggacacggagggctctgctgaggttccttcctgggttccaccaacagggacagggagtcacttgccttccagttctgtgctgggatggcgggacagcacttggcttgcttggccagctgcgtcatgagtttgatttggtttttttttttttgcagctgcttcatatgctctgctccagcccctccccaacagctggtagcttatggtttcttcaagaggaaagtagactttatgctgtacatttgagctgtagagctaagattcgcttactggtgagctgtgaaaccttgttgctttttcccagagtctgatggcagtgactgtgatcaagggaatcttcaccgccacaagtgcaggcagcaggtgtggttcaggtccccccccaccccactgtgctcctttgaagccaacgtgcctccctcgcctccatactggagggacgacgcaggggagaacagagaagtgcttggccctaggattgaggcacttgtttcctagcccgctgggttagggctggtgcaagcgaggcaatgttgaggatgctttaagcactaccagccgaatccgggaactctgttaacagttgtccaaccagcagaatgaggctaactgtataaagcatgggacccaggatgaggataaggaaaggacagcggctttccctgggcagtacaatggcttgaaggcaaaaagggataaagtgacagccgactgtgactctggtgaggaggggtgagcagggaggttgattctctgatgttaactaagtggcaaagtctcaaccgtgctcagccctccccctcccagggaagagaaacaaagattcaaagtaagcatgatactagtgggtttaccagtgtttcttccaaggagacatatattttttaataaacgatagttgcaatgaactgtggctcagagaccttcttaaagtagttgagaagggagggcgtgggcaaagcagtgggaagaacatcccaaacttttgggggccagagggctctctccttagtgatgatcagctagccgagctgggccgtcctggggatcggtacagctccctggggtggtgacaggccctttgtgaaagttgtgtgcttggtcttccaccccagccccagacactgcttcaaatagcaccaaccagatgggagtccacatctgtggtggcaaaatgctgacattttcccaagaggtacacaaggtgggagaggcctgctgtagcagaggtgtgtgttagagaaagcaggggcctgatttagtagcagagaactgggtgagaaaaatggccagagaaagtgacctgccagctaccagtgtttccgaaaatgagggtgggatgggcccatttgcagagcaggacagcagtcatccccatagccctctgaggaggggagggatgcttagagcaggcagttctggcagttctgacgtggcaggtgccattgcaacttgtgcggaggagtcttaggaagtgctgtcataattcataaggtcaagagcaacatctggatgaatgagccacctgaaatgtgtgtgggctgagccacaggaagggtgagtcctcttgcttgtggtgctttatggtgtgcaggttgcttgctttcccacattctctcatttgcttgaaggcagcctaacaaaagggagtccccaaagagctccatgagagcttaagaaaattcatctcctgaggacaaagagaacaaagatctgtcctgtggtcacactgttgaggctctgtcttcacagctgatgttctcctagtggaggtacagctgaagaacattcagccccagcacgagaagatacagagcaacttggaaaccccaaagggagacacacccttaacactgccgtgctgtgctgtgccgtgtcctgaaggaggagagagccctatctcctcctggttttgttgctgacattgcagctgatcatgccttgactccttcatctctaacagaggaagaactgtattatcaaaccttatggtctacccatgaataaataaaatatttgttcaagcac

SEQ ID NO: 8503 - DNA, 10090 bp, Homo sapiens
  source 1..10090: mol_type = unassigned DNA
gaggaagaagctggagacttggtccagccgggcatcagctttccggggccggcagaggaggatctagacccgcagtactcatggtcgcccacgcagcacttcaatgaggagcgctactcgcccgcgcccaggagcatgaagggcctttccggaagtcggacccagccgccgctgtgttccgggcacacgtgtggtctggcgcccccggaggactgcgagcacctgcaccacgggcccgacgcgcggccgccctacctgctgagccccgccgacagctgccccggggggcgccaccgctgctcgccgcgcagctcggtgcactcggagtgcgtgatgatgccggtggtgctgggcgaccacgtgtccagcagcaccttcccgcggatgcactacagctcgcactacgacacgcgcgacgactgcgctgtggcccacgcgggcgccaagatcaaccgcatcccggccaacctgctggaccagttcgagaagcagctgccgctgcaccgggacggcttccacacgctgcagtaccagaggacgtccgcggccgccgagcagcgcagcgagagccccgggcggatccgccacctggtacactccgtgcagaagctcttcaccaagtcgcactcgctggagggctcctccaaaagcaacgccaacggcaccaaggcggacggccgggcggacgaccaccaccacgcccaccacgccaagcacagcaagaggagcaagagcaaggagcgcaagccggagggcaagccccggcccggcatgagcagctggtggagctcggacgacaacctggacagcgacagcacctatcggacgcccagcgtgctcaaccggcaccacctgggccccgtggcccactgctaccccgacgcgctgcagagccccttcggggacctgtccctcaagacctccaagagcaacaacgacgtcaagtgctcggcctgtgaggggttggcgctgacgcccgacgccaagtacctgaagcgcagctcctggtctacgctgacggtcagccaggccaaggaggcctaccgcaagagctcgctgaacctggacaagccgctgctgcaccaggacgccaagcccgccctgaggccgtgccactacctccaggtacctcaggatgagtggggagggtaccccaccggtggcaaagatgaggagattccctgcaggagaatgagaagtgggagttacattaaagccatgggggacgaggagagcggagagtcagactccagccccaagacatcaccaaagtcggcaatcctaccagagccgctgctgaagtccatcggacagagaccgcttggagagcaccagacccagacctacctgcaagctgcaagcgatgtgcctgtgggacacagcctggaccccgctgcgaactacaactccccgaaattccgctcccggaaccagagctacatgagggccgtcagcaccctgagccaggccagctgcgtgagccaggtgagcgaggcggagatcaatgggcaattcgagtccgtgtgcgagtccgtcttcagtgaagttgaatctcaggccatggatgccctcgacctcccgggatgtttccgaacaaggagtcacagctaccttcgagccattcaagccggctactcccaagatgacgaatgtattcccatgatgacaccctctgacatcacctccaccatcaggtcaacagcagctgtctcatatacaaattacaagaaaacgcccccaccggtgccccctcggaccacctccaagcctctgatctcggtgacggcgcagagcagcaccgaatccacccaggacgcctaccaggacagccgcgcacagaggatgtccccgtggccccaggacagccgcggcctctacaactccacggacagcctggacagcaacaaggccatgaacctcgcgctggaaacggccgctgcccagcgccacctgccagagagccagagcagctctgtgcggaccagcgacaaggccatcctggtgtccaaggcggaggagctcctcaagagccgctgctcctccatcgggattcaggtggaaacggccacagattctgacacggagagccgcggtctgcgggaataccactctgtcggggtgcaagtggaagatgagaagcgacacggacgttttaaacgttctaacagcgtcacggccgccgtccaagctgacctggagctggaggggttcccaggccacatcaccacggaggacaaaggccttcagttcggctcatccttccagcggcactccgagcccagcacccccacccagtacagcgcggtgagaactgtacggacccaggggctcttcagctatagagaagactatcggacccaagtggacacctccaccctgccccctccagacccctggctggagcccgccatcgacacggtagagactgggaggatgtctccgtgccgcagggatggctcgtggtttttgaagctgctgcacgcagagacaaagaggatggaaggctggtgcaaagagatggagagagaggcggaggagaacgacctctcggaggaaattctcggtaaaatcaggagtgctgttgggagtgcccagcttctcatgtcccagaaattccagcagttttattggctttgccaacagaatatggaccccagcgccatgccgaggccgacgtcgcaggacctggccggctactgggacatgctgcagctctccattgaggacgtcagcatgaagttcgacgagctgcagcggctgcggctcaacgactggaagatgatggagtccccggaaagaaaggaagaaagaaaggtcccgcctccaataccaaagaagcctcccaaggggaagtttcccatcacaagagaaaaatccctggacctgcccgacagacaacgccaggaagcccggaggcgcctcatggccgccaagcgagcggcgtccttccggcagaattccgcctccgagcgcgcggacagcatcgagatctacatccccgaggcccagacccggctctgagggcggaggccggcgccttcccctcgtcgcttccgctttcccggacgcttgtgcagcgcggcgccgccctggtggtttctgtctcctcctcccgctgaacacgtcctcgctcccgcgctccccgcgccccggacacagcgggacgcggccggcggcctcagagtccacggagctcgcggcgaggacgacttctgcttttgttgttgttgttgttgttcacgggtggcctggctcacacttggctctgagggacaggtgtggcgagacctgatttctcctgcgtgttctcagaggacggcgagaaatgcctctggagctggaacccagcttacattttgttatttctatttttataaattgtgtgataattagaggtaagaataacaagtaactataaacgggtgcatcccaccactccctggaggcattagacacccaagtggaaggtgctacaacctgaagcgcaggaaagaaaggcccattcccctcgcacagccgagcttttactccctgagcacgggccgctccgctcccctgctcctgtctgtctcggacagaaaacacgaggctccttgtgtcaagcttcctgtgatggaaagcgacctctccaaccaccacactccccgccgtacagttctccagaatcccaggcgatgacaagtctgaacccacgaaaatacccagcgcagcatctacacattcaaaagataagctgagtgttcccaccaggaagtcacgcgcagagaggagagtcttacggagggctgggagcttaaaaggaaaacaatgtccttacttgtaaacagttattgtattttttatttctttctaacttaaaatacgacacccagtattttctttaagtttcaccatttacgctacatgtgatttttttaatgtatgtatatatatatattctcaaattgctctatcagctgacttttcagggtatccttaaaaaaaaacacacacgaaaaacaaaagtttgcttgtttaaaatgacagttgtgatgtaaaaagtttaagaaatatgaatgtgagtggtaagtatatctcagtttaaatggtaaagaagaaatgtagtttacatttgtatttttccagaattcttttgtcctatgcagtattgctaaagtcgagaatatattccttgcctgtgttagacatgaagggaaaaagaggtcacatattgtgatttccagctgtagcattcaaaaaaaaaattggtgttcatgactctgtggtcggtgccagaggaaaataggaacgactctaattaataggctttctgtgtatataattaaatttagctgctgcaaccattgttctgacacgacttctgtttcacagttcagaccggtcttcaaaggaaaagcctgtccgatttttccatgggttccagtttcagagttctcattattactcaaagtaaaagcggactgcgatttaagatgtttccaccccaatacctggtcttccttcccggcttaaggagtaccatgtacttagccacaggcagaatagctttcgatgaccccatagcactttgtttcttcgccttgatttgcactttacaatgtccccagcccctctgcagcccgtggctggcagggcgttcgatgtgcggttggcccccagcgcgccctccagagctgcggtgtctccctgcctcattccccacatcccactgagcatgggaccattgggagcagagctgatattaaagcatgtttagcttcgaagttttacttttttaaagctgagtagttaagaattccctgtaaaaacaaaaccctgtaaattgagcctcatgtctggtatatattttaccaaacagccttaaaatatatttggaagcaaaaatcagtacgaatgtatctccttgaaaaatgcaaaaaaaaaaaaatccctgaaatattcttctataaatgaatcctatttccccagagtgttcaaggcatttttctacctaaatgaatacctaaatcttgagtagtgtacggtaatgacgcttcttcctatatccactcttattatgttaaaacaaatgtatttgcgagtattggcattttagactttaaaaatgctgtatgatttcagatgaactctgctgtttagaagtaaccacagaaaagcaaagtcagtgtacactctgagtgaaaggaaatgtaatgtggataaaggcccgccacctcctcacattggtctatctactggcagctgatacgtttaactcatttccttgagcttatacaaaacatagaaaagcaaactgttaaagtagtcaataattatttgtctcagatcccagattctatgatccctgcttaaaagaaaatgttcactgcatgtaggttgatttcttatgttttgtagactcattgttatttttcaatccccaaaagtcttggcctaaaccatccctaggggagcagattaacctaccactacattgcacagggttggtgactcgacgtggtgaatgtgcacacgccctgcctggtccgccatgttccaaagaagatgatttaatggtagaacggatacctgctgctagacctgatggaatgttacctgtccgtgttacataatcaagtgcaatatactcagttctcatgcaggtgacattctaccatgaaacgcagaagataagccatgtttctgtattgtacatgtaaagaaaaataaaactgtttatgatacttgtgttagtcactcgagctagcttatttcagccacttctagcagatcatgccatggagctcacgacgtgtgaccatttcgtcatatttaaaatataacttcaagaaaagagtaaacatccattggagaacacggctgaaaattattgtgctgttctaggaacatcatcctagagagtgtgatgttcactataaccccatacctacattccctaatgatacagccaatgacaggtgaaacccagacactctccttagagccgacaggttgatcctgctgtgttgaaggctgtggttaataaaacacaagtatgataaacaggacctagcgtttagcccgggaaaggagaatgctgcttgtcacctagagtgctttccttgtgatgcgtctctcgcatcttcacgtgttgttgtgtttgaagtaaaactagttgttatcgatgacaatttttaccatagttttctcagcaaatttatatcaccatcttagaatggtatataaaaaaattgaactgtttatgataccaaaaaaattacagttttgtttaaaaggaaatgttgatgttttcaactccaaatcaattctaaaaacttcaagcacttaatggaaaggtaaatggtcagataaaaatataattacctgtaaggttatctggttttaaaagaaaaaaaaaaagcctacaaactcagtgacctactacgcagagggaatttttccctgctgcttcttatgaaagtggccaggtttattattagaagacacagtggcagagcacacatgtgcacaggttctgattatttctcttggagcatatgtccttgtcttgatttttgccttttcgatgccatattaagcagccaccgtttccacccctttcattagaaggccctgcatccgtaaattcgcgcatctctgtttttgttagatccttgtaagcatcgctacccgagtccaggatggaatttcacaggaaagtgaagggatactgcaggcctgtgtttgcagcgcctgtggtaactgtggaatgagctctgttagggacagttgtctggtttgtgccaaaccttcgaggggcgagtagggagtgggggaggtgggtccaagtctccctcaggaaggccttttctatcggcagcaattccatcaagccaagcctcctgtggtcctgagcatgaaggggccaggggacctcctgggagatgcagcttttgtttccgctgcgtttcatcagtcagccttgcttggaattctggcaggttccccggggtgtttcagtggacaggaggcccccgtgccgtggctgagtcagcctgggtaccccagtcaccagcagggccacccttgatgacagggccccccacgaacctgggaaaggcagcgggaaatgtgtgagagggtgtgcgctggtacggacataaaagcattgtccaaaacagcgctggttcggggagggcccctggatactgcctttggcccacactgaaaactgaaattgccccacctgtgagcacagaaacacgcttctccaacacgggccgaaataactaaactccacatggttcctgcctgctcatttcccagccctcttcttctcaagcctgaacttcatttttttttttagctgcaaatttaacaggctaatttaaaactgcagttttcagacgacagcccctgggaatgttccagggttctcttgttttgatctgcatgtctgtttacacttctctgtaggcgtgggttgaatacaagtttccaaaactttaaaatagaaaaccacgagcttaagaggtgaaaaagatgacccctttctgattaggatctgtaactctgtgggctgggtcaatgcagtgtgcttcattcagggccatgtggcagccatgacacacaccacataaggtcagctcagagcccatggcttccctgcaggagccccatcttgtcgctattagttgggagttgcaatacattgttggccataaacaaagtgctaaaggaaagggtttgcttctacacattcggctgaatgtcccccagtgcagggtggcagcagaatgttctggaaatgaaggagatattgctaggaatctctaggctgttaggcaacctggcttttattcatcctcagccggcaactcatctcaagtttatgtctcagtttttttcctctagaaaggggattacagttcctgtccctgtcttcctccaggacacactgtgaggattaatgacatattggctctaaagtcctttgagctcctgggaacaggtggtgaaagtgtgcgttactgctaaggattagtccctggcctcttctagaatgccgccctcccagctctgcagggcacgctgccagaatccaggctggtcgtaaacatctcagagataatcagggaccaccagaggcagaggccatgagactgtctttggaaaggtttggaaatgcagaaataactacaagggccattctccttagcttctggctttcaactgtttctagatgcttccaagaacaagaacccagcaccaaccagaattaggccacgttttcaccattacttaagctcaatcgcctcttagatgaaatgaggagataaactaaacattaaaatgatgaaggaaaaaaaattatttggaagccgaaaaccgcatgggtggggaaacatcaggaacgaaatcagacacactgactcaaaccacgcaagggtttgagaagcccacccctctaattccaggcgtttgtaatttttctacttcgcacttgagagaaggcagaggtggtccgtgggaaagctccgggaaacagccgtctttcatccttgccacattgaaaaatgtccacaattttatgaattgctgtcctaaccctggcgtttttatccagtgttaaaataaattatttcaagtttcaatgtaaacacttaacagatgacttctttgcagaagaaatgttcgttacctactatcaaactactttttaacagattttgtatatacacacacaagttgacagaggtttacctccctactttcttagattttatgtaactcttttcattggtgcttattcagaacctgaaagccttgggcatccaagctttcacctactcaatggaggagaggtgataatgaatgaaaagattgacaccaggtttcttggacaaatttaagttcaaatttatctctttcaagtagaccatggtctccctagagagtgtgttggcttgtgtctgccagtacgacaaaggacgctcccagcttgatcgtggtaccttatggaagccactcacgcattctctgatttacccccaaaacactaccatgccccagccccactcatttaaataatacaatcatatcactttcaaagggctcagcacgaatgttcccctcactccactttttaactcgtttgctgaactcgacaaggcttccccttacgagcagtgagacctaggctactttcgaacgcttccttccgaacggtaagccacttcgctctcgggcaggacaggtcctccctgcagagagagacaactcatcccccgaccttccatactacagaccaaaatacccaggtgtggcctaaggactatattaaatgcctcctatagaaattcaaggaatgttagaaccaggaaactagctgtttaaagttttaaagaagtatataaatatatatataaatataaatatgaaatcatatcgagtgtgaggatgagcagagtgccaaatattcagcatctgtacaaagtcattcactggaattcaactattttatgtcattctctttctcacgcttttatggttcttttgataaattctatttagtagcatgcaggatacctaatctgaatgtgcaatatgctattcatcaccacgacaatttcttacttcctcttaataacttaccagaatgttggtcattcctttaaggcagttaaggattgctttatttgtgttcttttttcccatgactttttttcactctcagctgactgtaagaaactgtgcaccgtttccgccataaccgtcctgtgacgatgcctccatttgacttctgtatcgctgatgttcacctcctgtaaatagtttggcaattaaattttttgagaaaagtaatgtttacttttttattggagtgaattctcgtgttattttaatctcagaaaaattatatagaccaaagagttttatccgaaaaaaaattacactcttcctccattatatatttcattgttgaaatatcctcaatttctctatattttaagaagtaatggacatttattaaggttacagatttaatatgtatgcaaaatggtatagattaaatgagtttttaattaataaatcctacagtatttagtta

SEQ ID NO: 8504 - DNA, 10132 bp, Homo sapiens
  source 1..10132: mol_type = unassigned DNA
aggaagaagctggagacttggtccagccgggcatcagctttccggggccggcagaggaggatctagacccgcagtactcatggtcgcccacgcagcacttcaatgaggagcgctactcgcccgcgcccaggagcatgaagggcctttccggaagtcggacccagccgccgctgtgttccgggcacacgtgtggtctggcgcccccggaggactgcgagcacctgcaccacgggcccgacgcgcggccgccctacctgctgagccccgccgacagctgccccggggggcgccaccgctgctcgccgcgcagctcggtgcactcggagtgcgtgatgatgccggtggtgctgggcgaccacgtgtccagcagcaccttcccgcggatgcactacagctcgcactacgacacgcgcgacgactgcgctgtggcccacgcgggcgccaagatcaaccgcatcccggccaacctgctggaccagttcgagaagcagctgccgctgcaccgggacggcttccacacgctgcagtaccagaggacgtccgcggccgccgagcagcgcagcgagagccccgggcggatccgccacctggtacactccgtgcagaagctcttcaccaagtcgcactcgctggagggctcctccaaaagcaacgccaacggcaccaaggcggacggccgggcggacgaccaccaccacgcccaccacgccaagcacagcaagaggagcaagagcaaggagcgcaagccggagggcaagccccggcccggcatgagcagctggtggagctcggacgacaacctggacagcgacagcacctatcggacgcccagcgtgctcaaccggcaccacctgggccccgtggcccactgctaccccgacgcgctgcagagccccttcggggacctgtccctcaagacctccaagagcaacaacgacgtcaagtgctcggcctgtgaggggttggcgctgacgcccgacgccaagtacctgaagcgcagctcctggtctacgctgacggtcagccaggccaaggaggcctaccgcaagagctcgctgaacctggacaagccgctgctgcaccaggacgccaagcccgccctgaggccgtgccactacctccaggtacctcaggatgagtggggagggtaccccaccggtggcaaagatgaggagattccctgcaggagaatgagaagtgggagttacattaaagccatgggggacgaggagagcggagagtcagactccagccccaagacatcaccaaagtcggcaatcctaccagagccgctgctgaagtccatcggacagagaccgcttggagagcaccagacccagacctacctgcaagctgcaagcgatgtgcctgtgggacacagcctggaccccgctgcgaactacaactccccgaaattccgctcccggaaccagagctacatgagggccgtcagcaccctgagccaggccagctgcgtgagccaggtgagcgaggcggagatcaatgggcaattcgagtccgtgtgcgagtccgtcttcagtgaagttgaatctcaggccatggatgccctcgacctcccgggatgtttccgaacaaggagtcacagctaccttcgagccattcaagccggctactcccaagatgacgaatgtattcccatgatgacaccctctgacatcacctccaccatcaggtcaacagcagctgtctcatatacaaattacaagaaaacgcccccaccggtgccccctcggaccacctccaagcctctgatctcggtgacggcgcagagcagcaccgaatccacccaggacgcctaccaggacagccgcgcacagaggatgtccccgtggccccaggacagccgcggcctctacaactccacggacagcctggacagcaacaaggccatgaacctcgcgctggaaacggccgctgcccagcgccacctgccagagagccagagcagctctgtgcggaccagcgacaaggccatcctggtgtccaaggcggaggagctcctcaagagccgctgctcctccatcgggattcaggattctgaattcccagagcatcagccatacccaaggtcagatgtggaaacggccacagattctgacacggagagccgcggtctgcgggaataccactctgtcggggtgcaagtggaagatgagaagcgacacggacgttttaaacgttctaacagcgtcacggccgccgtccaagctgacctggagctggaggggttcccaggccacatcaccacggaggacaaaggccttcagttcggctcatccttccagcggcactccgagcccagcacccccacccagtacagcgcggtgagaactgtacggacccaggggctcttcagctatagagaagactatcggacccaagtggacacctccaccctgccccctccagacccctggctggagcccgccatcgacacggtagagactgggaggatgtctccgtgccgcagggatggctcgtggtttttgaagctgctgcacgcagagacaaagaggatggaaggctggtgcaaagagatggagagagaggcggaggagaacgacctctcggaggaaattctcggtaaaatcaggagtgctgttgggagtgcccagcttctcatgtcccagaaattccagcagttttattggctttgccaacagaatatggaccccagcgccatgccgaggccgacgtcgcaggacctggccggctactgggacatgctgcagctctccattgaggacgtcagcatgaagttcgacgagctgcagcggctgcggctcaacgactggaagatgatggagtccccggaaagaaaggaagaaagaaaggtcccgcctccaataccaaagaagcctcccaaggggaagtttcccatcacaagagaaaaatccctggacctgcccgacagacaacgccaggaagcccggaggcgcctcatggccgccaagcgagcggcgtccttccggcagaattccgcctccgagcgcgcggacagcatcgagatctacatccccgaggcccagacccggctctgagggcggaggccggcgccttcccctcgtcgcttccgctttcccggacgcttgtgcagcgcggcgccgccctggtggtttctgtctcctcctcccgctgaacacgtcctcgctcccgcgctccccgcgccccggacacagcgggacgcggccggcggcctcagagtccacggagctcgcggcgaggacgacttctgcttttgttgttgttgttgttgttcacgggtggcctggctcacacttggctctgagggacaggtgtggcgagacctgatttctcctgcgtgttctcagaggacggcgagaaatgcctctggagctggaacccagcttacattttgttatttctatttttataaattgtgtgataattagaggtaagaataacaagtaactataaacgggtgcatcccaccactccctggaggcattagacacccaagtggaaggtgctacaacctgaagcgcaggaaagaaaggcccattcccctcgcacagccgagcttttactccctgagcacgggccgctccgctcccctgctcctgtctgtctcggacagaaaacacgaggctccttgtgtcaagcttcctgtgatggaaagcgacctctccaaccaccacactccccgccgtacagttctccagaatcccaggcgatgacaagtctgaacccacgaaaatacccagcgcagcatctacacattcaaaagataagctgagtgttcccaccaggaagtcacgcgcagagaggagagtcttacggagggctgggagcttaaaaggaaaacaatgtccttacttgtaaacagttattgtattttttatttctttctaacttaaaatacgacacccagtattttctttaagtttcaccatttacgctacatgtgatttttttaatgtatgtatatatatatattctcaaattgctctatcagctgacttttcagggtatccttaaaaaaaaacacacacgaaaaacaaaagtttgcttgtttaaaatgacagttgtgatgtaaaaagtttaagaaatatgaatgtgagtggtaagtatatctcagtttaaatggtaaagaagaaatgtagtttacatttgtatttttccagaattcttttgtcctatgcagtattgctaaagtcgagaatatattccttgcctgtgttagacatgaagggaaaaagaggtcacatattgtgatttccagctgtagcattcaaaaaaaaaattggtgttcatgactctgtggtcggtgccagaggaaaataggaacgactctaattaataggctttctgtgtatataattaaatttagctgctgcaaccattgttctgacacgacttctgtttcacagttcagaccggtcttcaaaggaaaagcctgtccgatttttccatgggttccagtttcagagttctcattattactcaaagtaaaagcggactgcgatttaagatgtttccaccccaatacctggtcttccttcccggcttaaggagtaccatgtacttagccacaggcagaatagctttcgatgaccccatagcactttgtttcttcgccttgatttgcactttacaatgtccccagcccctctgcagcccgtggctggcagggcgttcgatgtgcggttggcccccagcgcgccctccagagctgcggtgtctccctgcctcattccccacatcccactgagcatgggaccattgggagcagagctgatattaaagcatgtttagcttcgaagttttacttttttaaagctgagtagttaagaattccctgtaaaaacaaaaccctgtaaattgagcctcatgtctggtatatattttaccaaacagccttaaaatatatttggaagcaaaaatcagtacgaatgtatctccttgaaaaatgcaaaaaaaaaaaaatccctgaaatattcttctataaatgaatcctatttccccagagtgttcaaggcatttttctacctaaatgaatacctaaatcttgagtagtgtacggtaatgacgcttcttcctatatccactcttattatgttaaaacaaatgtatttgcgagtattggcattttagactttaaaaatgctgtatgatttcagatgaactctgctgtttagaagtaaccacagaaaagcaaagtcagtgtacactctgagtgaaaggaaatgtaatgtggataaaggcccgccacctcctcacattggtctatctactggcagctgatacgtttaactcatttccttgagcttatacaaaacatagaaaagcaaactgttaaagtagtcaataattatttgtctcagatcccagattctatgatccctgcttaaaagaaaatgttcactgcatgtaggttgatttcttatgttttgtagactcattgttatttttcaatccccaaaagtcttggcctaaaccatccctaggggagcagattaacctaccactacattgcacagggttggtgactcgacgtggtgaatgtgcacacgccctgcctggtccgccatgttccaaagaagatgatttaatggtagaacggatacctgctgctagacctgatggaatgttacctgtccgtgttacataatcaagtgcaatatactcagttctcatgcaggtgacattctaccatgaaacgcagaagataagccatgtttctgtattgtacatgtaaagaaaaataaaactgtttatgatacttgtgttagtcactcgagctagcttatttcagccacttctagcagatcatgccatggagctcacgacgtgtgaccatttcgtcatatttaaaatataacttcaagaaaagagtaaacatccattggagaacacggctgaaaattattgtgctgttctaggaacatcatcctagagagtgtgatgttcactataaccccatacctacattccctaatgatacagccaatgacaggtgaaacccagacactctccttagagccgacaggttgatcctgctgtgttgaaggctgtggttaataaaacacaagtatgataaacaggacctagcgtttagcccgggaaaggagaatgctgcttgtcacctagagtgctttccttgtgatgcgtctctcgcatcttcacgtgttgttgtgtttgaagtaaaactagttgttatcgatgacaatttttaccatagttttctcagcaaatttatatcaccatcttagaatggtatataaaaaaattgaactgtttatgataccaaaaaaattacagttttgtttaaaaggaaatgttgatgttttcaactccaaatcaattctaaaaacttcaagcacttaatggaaaggtaaatggtcagataaaaatataattacctgtaaggttatctggttttaaaagaaaaaaaaaaagcctacaaactcagtgacctactacgcagagggaatttttccctgctgcttcttatgaaagtggccaggtttattattagaagacacagtggcagagcacacatgtgcacaggttctgattatttctcttggagcatatgtccttgtcttgatttttgccttttcgatgccatattaagcagccaccgtttccacccctttcattagaaggccctgcatccgtaaattcgcgcatctctgtttttgttagatccttgtaagcatcgctacccgagtccaggatggaatttcacaggaaagtgaagggatactgcaggcctgtgtttgcagcgcctgtggtaactgtggaatgagctctgttagggacagttgtctggtttgtgccaaaccttcgaggggcgagtagggagtgggggaggtgggtccaagtctccctcaggaaggccttttctatcggcagcaattccatcaagccaagcctcctgtggtcctgagcatgaaggggccaggggacctcctgggagatgcagcttttgtttccgctgcgtttcatcagtcagccttgcttggaattctggcaggttccccggggtgtttcagtggacaggaggcccccgtgccgtggctgagtcagcctgggtaccccagtcaccagcagggccacccttgatgacagggccccccacgaacctgggaaaggcagcgggaaatgtgtgagagggtgtgcgctggtacggacataaaagcattgtccaaaacagcgctggttcggggagggcccctggatactgcctttggcccacactgaaaactgaaattgccccacctgtgagcacagaaacacgcttctccaacacgggccgaaataactaaactccacatggttcctgcctgctcatttcccagccctcttcttctcaagcctgaacttcatttttttttttagctgcaaatttaacaggctaatttaaaactgcagttttcagacgacagcccctgggaatgttccagggttctcttgttttgatctgcatgtctgtttacacttctctgtaggcgtgggttgaatacaagtttccaaaactttaaaatagaaaaccacgagcttaagaggtgaaaaagatgacccctttctgattaggatctgtaactctgtgggctgggtcaatgcagtgtgcttcattcagggccatgtggcagccatgacacacaccacataaggtcagctcagagcccatggcttccctgcaggagccccatcttgtcgctattagttgggagttgcaatacattgttggccataaacaaagtgctaaaggaaagggtttgcttctacacattcggctgaatgtcccccagtgcagggtggcagcagaatgttctggaaatgaaggagatattgctaggaatctctaggctgttaggcaacctggcttttattcatcctcagccggcaactcatctcaagtttatgtctcagtttttttcctctagaaaggggattacagttcctgtccctgtcttcctccaggacacactgtgaggattaatgacatattggctctaaagtcctttgagctcctgggaacaggtggtgaaagtgtgcgttactgctaaggattagtccctggcctcttctagaatgccgccctcccagctctgcagggcacgctgccagaatccaggctggtcgtaaacatctcagagataatcagggaccaccagaggcagaggccatgagactgtctttggaaaggtttggaaatgcagaaataactacaagggccattctccttagcttctggctttcaactgtttctagatgcttccaagaacaagaacccagcaccaaccagaattaggccacgttttcaccattacttaagctcaatcgcctcttagatgaaatgaggagataaactaaacattaaaatgatgaaggaaaaaaaattatttggaagccgaaaaccgcatgggtggggaaacatcaggaacgaaatcagacacactgactcaaaccacgcaagggtttgagaagcccacccctctaattccaggcgtttgtaatttttctacttcgcacttgagagaaggcagaggtggtccgtgggaaagctccgggaaacagccgtctttcatccttgccacattgaaaaatgtccacaattttatgaattgctgtcctaaccctggcgtttttatccagtgttaaaataaattatttcaagtttcaatgtaaacacttaacagatgacttctttgcagaagaaatgttcgttacctactatcaaactactttttaacagattttgtatatacacacacaagttgacagaggtttacctccctactttcttagattttatgtaactcttttcattggtgcttattcagaacctgaaagccttgggcatccaagctttcacctactcaatggaggagaggtgataatgaatgaaaagattgacaccaggtttcttggacaaatttaagttcaaatttatctctttcaagtagaccatggtctccctagagagtgtgttggcttgtgtctgccagtacgacaaaggacgctcccagcttgatcgtggtaccttatggaagccactcacgcattctctgatttacccccaaaacactaccatgccccagccccactcatttaaataatacaatcatatcactttcaaagggctcagcacgaatgttcccctcactccactttttaactcgtttgctgaactcgacaaggcttccccttacgagcagtgagacctaggctactttcgaacgcttccttccgaacggtaagccacttcgctctcgggcaggacaggtcctccctgcagagagagacaactcatcccccgaccttccatactacagaccaaaatacccaggtgtggcctaaggactatattaaatgcctcctatagaaattcaaggaatgttagaaccaggaaactagctgtttaaagttttaaagaagtatataaatatatatataaatataaatatgaaatcatatcgagtgtgaggatgagcagagtgccaaatattcagcatctgtacaaagtcattcactggaattcaactattttatgtcattctctttctcacgcttttatggttcttttgataaattctatttagtagcatgcaggatacctaatctgaatgtgcaatatgctattcatcaccacgacaatttcttacttcctcttaataacttaccagaatgttggtcattcctttaaggcagttaaggattgctttatttgtgttcttttttcccatgactttttttcactctcagctgactgtaagaaactgtgcaccgtttccgccataaccgtcctgtgacgatgcctccatttgacttctgtatcgctgatgttcacctcctgtaaatagtttggcaattaaattttttgagaaaagtaatgtttacttttttattggagtgaattctcgtgttattttaatctcagaaaaattatatagaccaaagagttttatccgaaaaaaaattacactcttcctccattatatatttcattgttgaaatatcctcaatttctctatattttaagaagtaatggacatttattaaggttacagatttaatatgtatgcaaaatggtatagattaaatgagtttttaattaataaatcctacagtatttagttaa

SEQ ID NO: 8505 - DNA, 3515 bp, Homo sapiens
  source 1..3515: mol_type = unassigned DNA
cgcccacgcagcacttcaatgaggagcgctactcgcccgcgcccaggagcatgaagggcctttccggaagtcggacccagccgccgctgtgttccgggcacacgtgtggtctggcgcccccggaggactgcgagcacctgcaccacgggcccgacgcgcggccgccctacctgctgagccccgccgacagctgccccggggggcgccaccgctgctcgccgcgcagctcggtgcactcggagtgcgtgatgatgccggtggtgctgggcgaccacgtgtccagcagcaccttcccgcggatgcactacagctcgcactacgacacgcgcgacgactgcgctgtggcccacgcgggcgccaagatcaaccgcatcccggccaacctgctggaccagttcgagaagcagctgccgctgcaccgggacggcttccacacgctgcagtaccagaggacgtccgcggccgccgagcagcgcagcgagagccccgggcggatccgccacctggtacactccgtgcagaagctcttcaccaagtcgcactcgctggagggctcctccaaaagcaacgccaacggcaccaaggcggacggccgggcggacgaccaccaccacgcccaccacgccaagcacagcaagaggagcaagagcaaggagcgcaagccggagggcaagccccggcccggcatgagcagctggtggagctcggacgacaacctggacagcgacagcacctatcggacgcccagcgtgctcaaccggcaccacctgggccccgtggcccactgctaccccgacgcgctgcagagccccttcggggacctgtccctcaagacctccaagagcaacaacgacgtcaagtgctcggcctgtgaggggttggcgctgacgcccgacgccaagtacctgaagcgcagctcctggtctacgctgacggtcagccaggccaaggaggcctaccgcaagagctcgctgaacctggacaagccgctgctgcaccaggacgccaagcccgccctgaggccgtgccactacctccaggtacctcaggatgagtggggagggtaccccaccggtggcaaagatgaggagattccctgcaggagaatgagaagtgggagttacattaaagccatgggggacgaggagagcggagagtcagactccagccccaagacatcaccaaagtcggcaatcctaccagagccgctgctgaagtccatcggacagagaccgcttggagagcaccagacccagacctacctgcaagctgcaagcgatgtgcctgtgggacacagcctggaccccgctgcgaactacaactccccgaaattccgctcccggaaccagagctacatgagggccgtcagcaccctgagccaggccagctgcgtgagccaggtgagcgaggcggagatcaatgggcaattcgagtccgtgtgcgagtccgtcttcagtgaagttgaatctcaggccatggatgccctcgacctcccgggatgtttccgaacaaggagtcacagctaccttcgagccattcaagccggctactcccaagatgacgaatgtattcccatgatgacaccctctgacatcacctccaccatcaggtcaacagcagctgtctcatatacaaattacaagaaaacgcccccaccggtgccccctcggaccacctccaagcctctgatctcggtgacggcgcagagcagcaccgaatccacccaggacgcctaccaggacagccgcgcacagaggatgtccccgtggccccaggacagccgcggcctctacaactccacggacagcctggacagcaacaaggccatgaacctcgcgctggaaacggccgctgcccagcgccacctgccagagagccagagcagctctgtgcggaccagcgacaaggccatcctggtgtccaaggcggaggagctcctcaagagccgctgctcctccatcgggattcaggtggaaacggccacagattctgacacggagagccgcggtctgcgggaataccactctgtcggggtgcaagtggaagatgagaagcgacacggacgttttaaacgttctaacagcgtcacggccgccgtccaagctgacctggagctggaggggttcccaggccacatcaccacggaggacaaaggccttcagttcggctcatccttccagcggcactccgagcccagcacccccacccagtacagcgcggtgagaactgtacggacccaggggctcttcagctatagagaagactatcggacccaagtggacacctccaccctgccccctccagacccctggctggagcccgccatcgacacggtagagactgggaggatgtctccgtgccgcagggatggctcgtggtttttgaagctgctgcacgcagagacaaagaggatggaaggctggtgcaaagagatggagagagaggcggaggagaacgacctctcggaggaaattctcggtaaaatcaggagtgctgttgggagtgcccagcttctcatgtcccagaaattccagcagttttattggctttgccaacagaatatggaccccagcgccatgccgaggccgacgtcgcaggacctggccggctactgggacatgctgcagctctccattgaggacgtcagcatgaagttcgacgagctgcagcggctgcggctcaacgactggaagatgatggagtccccggaaagaaaggaagaaagaaaggtcccgcctccaataccaaagaagcctcccaaggggaagtttcccatcacaagagaaaaatccctggacctgcccgacagacaacgccaggaagcccggaggcgcctcatggccgccaagcgagcggcgtccttccggcagaattccgcctccgagcgcgcggacagcatcgagatctacatccccgaggcccagacccggctctgagggcggaggccggcgccttcccctcgtcgcttccgctttcccggacgcttgtgcagcgcggcgccgccctggtggtttctgtctcctcctcccgctgaacacgtcctcgctcccgcgctccccgcgccccggacacagcgggacgcggccggcggcctcagagtccacggagctcgcggcgaggacgacttctgcttttgttgttgttgttgttgttcacgggtggcctggctcacacttggctctgagggacaggtgtggcgagacctgatttctcctgcgtgttctcagaggacggcgagaaatgcctctggagctggaacccagcttacattttgttatttctatttttataaattgtgtgataattagaggtaagaataacaagtaactataaacgggtgcatcccaccactccctggaggcattagacacccaagtggaaggtgctacaacctgaagcgcaggaaagaaaggcccattcccctcgcacagccgagcttttactccctgagcacgggccgctccgctcccctgctcctgtctgtctcggacagaaaacacgaggctccttgtgtc

SEQ ID NO: 8506 - DNA, 4815 bp, Homo sapiens
  source 1..4815: mol_type = unassigned DNA
gttggaaacggcactgctgagtgaggttgaggggtgtctcggtatgtgcgccttggatctggtgtaggcgaggtcacgcctctcttcagacagcccgagccttcccggcctggcgcgtttagttcggaactgcgggacgcgccggtgggctagggcaaggtgtgtgccctcttcctgattctggagaaaaatgccggtccggaagcaagatacccagagagcattgcaccttttggaggaatatcgttcaaaactaagccaaactgaagacagacagctcagaagttccatagaacgggttattaacatatttcagagcaacctctttcaggctttaatagatattcaagaattttatgaagtgaccttactggataatccaaaatgtatagatcgttcaaagccgtctgaaccaattcaacctgtgaatacttgggagatttccagccttccaagctctactgtgacttcagagacactgccaagcagccttagccctagtgtagagaaatacaggtatcaggatgaagatacacctcctcaagagcatatttccccacaaatcacaaatgaagtgataggtccagaattggttcatgtctcagagaagaacttatcagagattgagaatgtccatggatttgtttctcattctcatatttcaccaataaaggttaatggcacagatgcagattatgaatatgaagaaatcacacttgaaaggggaaattcagggcttggtttcagcattgcaggaggtacggacaacccacacattggagatgactcaagtattttcattaccaaaattatcacagggggagcagccgcccaagatggaagattgcgggtcaatgactgtatattacgagtaaatgaagtagatgttcgtgatgtaacacatagcaaagcagttgaagcgttgaaagaagcagggtctattgtacgcttgtatgtaaaaagaaggaaaccagtgtcagaaaaaataatggaaataaagctcattaaaggtcctaaaggtcttgggtttagcattgctggaggtgttggaaatcagcatattcctggggataatagcatctatgtaaccaaaataattgaaggaggtgcagcacataaggatggcaaacttcagattggagataaacttttagcagtgaataacgtatgtttagaagaagttactcatgaagaagcagtaactgccttaaagaacacatctgattttgtttatttgaaagtggcaaaacccacaagtatgtatatgaatgatggctatgcaccacctgatatcaccaactcttcttctcagcctgttgataaccatgttagcccatcttccttcttgggccagacaccagcatctccagccagatactccccagtttctaaagcagtacttggagatgatgaaattacaagggaacctagaaaagttgttcttcatcgtggctcaacgggccttggtttcaacattgtaggaggagaagatggagaaggaatatttatttcctttatcttagccggaggacctgctgatctaagtggagagctcagaaaaggagatcgtattatatcggtaaacagtgttgacctcagagctgctagtcatgagcaggcagcagctgcattgaaaaatgctggccaggctgtcacaattgttgcacaatatcgacctgaagaatacagtcgttttgaagctaaaatacatgatttacgggagcagatgatgaatagtagtattagttcagggtcaggttctcttcgaactagccagaagcgatccctctatgtcagagccctttttgattatgacaagactaaagacagtgggcttcccagtcagggactgaacttcaaatttggagatatcctccatgttattaatgcttctgatgatgaatggtggcaagccaggcaggttacaccagatggtgagagcgatgaggtcggagtgattcccagtaaacgcagagttgagaagaaagaacgagcccgattaaaaacagtgaaattcaattctaaaacgagagataaaggggagatccctgacgacatgggatcaaaaggcctgaagcatgtaacttctaatgccagcgatagtgaaagtagttaccgtggtcaagaagaatacgtcttatcttatgaaccagtgaatcaacaagaagttaattatactcgaccagtgatcatattgggacctatgaaagacaggataaatgatgacttgatctcagaatttcctgacaaatttggatcctgtgttcctcatacaactagaccaaaacgagattatgaggtagatggaagagattatcattttgtgacttcaagagagcagatggaaaaagatatccaggaacataaattcattgaagctggccagtataacaatcatctatatggaacaagtgttcagtctgtacgagaagtagcagaaaagggcaaacactgtatccttgatgtgtctggaaatgccataaagagattacagattgcacagctttaccctatctccatttttattaaacccaaatccatggaaaatatcatggaaatgaataagcgtctaacagaagaacaagccagaaaaacatttgagagagccatgaaactggaacaggagtttactgaacatttcacagctattgtacagggggatacgctggaagacatttacaaccaagtgaaacagatcatagaagaacaatctggttcttacatctgggttccggcaaaagaaaagctatgaaaactcatgtttctctgtttctcttttccacaattccattttctttggcatctctttgccctttcctctggagtctttcttgagtactgatttcatgttgaattgtatcccacacatcatggtctgcagcttctttttcacatgtagtgtctccttcaagttacatcgtgtgtattatttaatgtcactattggttagtggccatttttcagaactgaagatggaatggcctgaccagctattaagaacgtggggagacgcagaaattgtggtaaaattccttaatgtttaagggaaagtaactttaagagatttttggaaaagctttatatacattcttttcaaatttcagtacaaatgaaaaagtggttttaatcagtgatttagtagactttgagcaactgtgcacgcttcagtttaatagcatggtttggccagtgtattactctcaagtccttttctcaatcaacttctatcatcaaagcaattgtttcattatagataaataaggacattttttaatttaaaaattcatgtctgagttgactttcataagggatttcattttttcctcaacattcttaaagccttttagtatttgacggttcttttttcccaggacatttgctaggaataacaacgtttcaatgtttttaatctacttgagcaacactatcgtgtcttacaaaagttgttcatatgtaaatgatcatcacatttcgtgaattgaggccatgttcaggtgctaaggaagttcgccttttacacagaagattgagaaaatttcctagatataaatacagataaatcagacgttacagtggtgacgtagtaaccatcatggcaatggaaaggagtccaattcatagcctaaaacttcaaatgtattcttaggagtcagattttactgaatattttacccacaatagctgcctattttgttataataaaatatatataaatatatatataaaactttctttaaactgtaactatgggaattattttctttacatagttgcgcacacacacaaacatatatatatatttaaaatatattttgtttcttttgccacctactcctaactttttgtttggtttttaaattaaatattaattgaatagacttatcttccttaatcatgtgaactgaaaatgggggcatggtggtcatgaggaggaaacatttagggaaattagattataagtaaaagtgtgggcatattctcctcttttctacaaaggttttcaaatggttcctgaggttttttgttgttgtccgtgttgttactgttgttcttgtcatcaggtttgattttggtccttgccctttccttctagttctccttttattaataggaaggcaggcaaaagccccatttatgtgtgtgttttcccctcagacagctttcatccactgctctgcactagaattgcacaaatcttcatggtgagcaattttaagaaatgttagtgaaaggtagaaattatttcacaaatcagtttctctggtccttcatattaataataatatttggcttcccattgctctttggagttgtttattaaatatgtgtttttgacaacctcctcattagtttcttaaatgagtactggtttgtaaagaattatcaacattatccattccatttatgaagaagaggagaacagctaataaactgtattgtaaaatccatatgttaagtgtgtcttgaattttgaaagaaaaaatatattttgcaagctaacattttcttgaaacaatttgaggcatcatgtaacttataaccgaatccaagagccgttaggcagcagagtgtgttaccacattgaaatacacagtgctgctgttagactaaatgtcgtaggttgttaaccacatagaaacacactagtatgaagaaaactgttgtaaaatctcaagagcttcagaaactgccttacaagaccgcagcataagctattttgaagtatttaccaaatagtcacatgttgtaaaatatcaagtggttataaaaggatgccatttatatattaaaatttacataacattgttttctgga

SEQ ID NO: 8507 - DNA, 5034 bp, Homo sapiens
  source 1..5034: mol_type = unassigned DNA
gttggaaacggcactgctgagtgaggttgaggggtgtctcggtatgtgcgccttggatctggtgtaggcgaggtcacgcctctcttcagacagcccgagccttcccggcctggcgcgtttagttcggaactgcgggacgcgccggtgggctagggcaaggtgtgtgccctcttcctgattctggagaaaaatgccggtccggaagcaagatacccagagagcattgcaccttttggaggaatatcgttcaaaactaagccaaactgaagacagacagctcagaagttccatagaacgggttattaacatatttcagagcaacctctttcaggctttaatagatattcaagaattttatgaagtgaccttactggataatccaaaatgtatagatcgttcaaagccgtctgaaccaattcaacctgtgaatacttgggagatttccagccttccaagctctactgtgacttcagagacactgccaagcagccttagccctagtgtagagaaatacaggtatcaggatgaagatacacctcctcaagagcatatttccccacaaatcacaaatgaagtgataggtccagaattggttcatgtctcagagaagaacttatcagagattgagaatgtccatggatttgtttctcattctcatatttcaccaataaagccaacagaagctgttcttccctctcctcccactgtccctgtgatccctgtcctgccagtccctgctgagaatactgtcatcctacccaccataccacaggcaaatcctcccccagtactggtcaacacagatagcttggaaacaccaacttacgttaatggcacagatgcagattatgaatatgaagaaatcacacttgaaaggggaaattcagggcttggtttcagcattgcaggaggtacggacaacccacacattggagatgactcaagtattttcattaccaaaattatcacagggggagcagccgcccaagatggaagattgcgggtcaatgactgtatattacgagtaaatgaagtagatgttcgtgatgtaacacatagcaaagcagttgaagcgttgaaagaagcagggtctattgtacgcttgtatgtaaaaagaaggaaaccagtgtcagaaaaaataatggaaataaagctcattaaaggtcctaaaggtcttgggtttagcattgctggaggtgttggaaatcagcatattcctggggataatagcatctatgtaaccaaaataattgaaggaggtgcagcacataaggatggcaaacttcagattggagataaacttttagcagtgaataacgtatgtttagaagaagttactcatgaagaagcagtaactgccttaaagaacacatctgattttgtttatttgaaagtggcaaaacccacaagtatgtatatgaatgatggctatgcaccacctgatatcaccaactcttcttctcagcctgttgataaccatgttagcccatcttccttcttgggccagacaccagcatctccagccagatactccccagtttctaaagcagtacttggagatgatgaaattacaagggaacctagaaaagttgttcttcatcgtggctcaacgggccttggtttcaacattgtaggaggagaagatggagaaggaatatttatttcctttatcttagccggaggacctgctgatctaagtggagagctcagaaaaggagatcgtattatatcggtaaacagtgttgacctcagagctgctagtcatgagcaggcagcagctgcattgaaaaatgctggccaggctgtcacaattgttgcacaatatcgacctgaagaatacagtcgttttgaagctaaaatacatgatttacgggagcagatgatgaatagtagtattagttcagggtcaggttctcttcgaactagccagaagcgatccctctatgtcagagccctttttgattatgacaagactaaagacagtgggcttcccagtcagggactgaacttcaaatttggagatatcctccatgttattaatgcttctgatgatgaatggtggcaagccaggcaggttacaccagatggtgagagcgatgaggtcggagtgattcccagtaaacgcagagttgagaagaaagaacgagcccgattaaaaacagtgaaattcaattctaaaacgagagataaagggcagtcattcaatgacaagcgtaaaaagaacctcttttcccgaaaattccccttctacaagaacaaggaccagagtgagcaggaaacaagtgatgctgaccagcatgtaacttctaatgccagcgatagtgaaagtagttaccgtggtcaagaagaatacgtcttatcttatgaaccagtgaatcaacaagaagttaattatactcgaccagtgatcatattgggacctatgaaagacaggataaatgatgacttgatctcagaatttcctgacaaatttggatcctgtgttcctcatacaactagaccaaaacgagattatgaggtagatggaagagattatcattttgtgacttcaagagagcagatggaaaaagatatccaggaacataaattcattgaagctggccagtataacaatcatctatatggaacaagtgttcagtctgtacgagaagtagcagaaaagggcaaacactgtatccttgatgtgtctggaaatgccataaagagattacagattgcacagctttaccctatctccatttttattaaacccaaatccatggaaaatatcatggaaatgaataagcgtctaacagaagaacaagccagaaaaacatttgagagagccatgaaactggaacaggagtttactgaacatttcacagctattgtacagggggatacgctggaagacatttacaaccaagtgaaacagatcatagaagaacaatctggttcttacatctgggttccggcaaaagaaaagctatgaaaactcatgtttctctgtttctcttttccacaattccattttctttggcatctctttgccctttcctctggagtctttcttgagtactgatttcatgttgaattgtatcccacacatcatggtctgcagcttctttttcacatgtagtgtctccttcaagttacatcgtgtgtattatttaatgtcactattggttagtggccatttttcagaactgaagatggaatggcctgaccagctattaagaacgtggggagacgcagaaattgtggtaaaattccttaatgtttaagggaaagtaactttaagagatttttggaaaagctttatatacattcttttcaaatttcagtacaaatgaaaaagtggttttaatcagtgatttagtagactttgagcaactgtgcacgcttcagtttaatagcatggtttggccagtgtattactctcaagtccttttctcaatcaacttctatcatcaaagcaattgtttcattatagataaataaggacattttttaatttaaaaattcatgtctgagttgactttcataagggatttcattttttcctcaacattcttaaagccttttagtatttgacggttcttttttcccaggacatttgctaggaataacaacgtttcaatgtttttaatctacttgagcaacactatcgtgtcttacaaaagttgttcatatgtaaatgatcatcacatttcgtgaattgaggccatgttcaggtgctaaggaagttcgccttttacacagaagattgagaaaatttcctagatataaatacagataaatcagacgttacagtggtgacgtagtaaccatcatggcaatggaaaggagtccaattcatagcctaaaacttcaaatgtattcttaggagtcagattttactgaatattttacccacaatagctgcctattttgttataataaaatatatataaatatatatataaaactttctttaaactgtaactatgggaattattttctttacatagttgcgcacacacacaaacatatatatatatttaaaatatattttgtttcttttgccacctactcctaactttttgtttggtttttaaattaaatattaattgaatagacttatcttccttaatcatgtgaactgaaaatgggggcatggtggtcatgaggaggaaacatttagggaaattagattataagtaaaagtgtgggcatattctcctcttttctacaaaggttttcaaatggttcctgaggttttttgttgttgtccgtgttgttactgttgttcttgtcatcaggtttgattttggtccttgccctttccttctagttctccttttattaataggaaggcaggcaaaagccccatttatgtgtgtgttttcccctcagacagctttcatccactgctctgcactagaattgcacaaatcttcatggtgagcaattttaagaaatgttagtgaaaggtagaaattatttcacaaatcagtttctctggtccttcatattaataataatatttggcttcccattgctctttggagttgtttattaaatatgtgtttttgacaacctcctcattagtttcttaaatgagtactggtttgtaaagaattatcaacattatccattccatttatgaagaagaggagaacagctaataaactgtattgtaaaatccatatgttaagtgtgtcttgaattttgaaagaaaaaatatattttgcaagctaacattttcttgaaacaatttgaggcatcatgtaacttataaccgaatccaagagccgttaggcagcagagtgtgttaccacattgaaatacacagtgctgctgttagactaaatgtcgtaggttgttaaccacatagaaacacactagtatgaagaaaactgttgtaaaatctcaagagcttcagaaactgccttacaagaccgcagcataagctattttgaagtatttaccaaatagtcacatgttgtaaaatatcaagtggttataaaaggatgccatttatatattaaaatttacataacattgttttctgga

SEQ ID NO: 8508 - DNA, 4935 bp, Homo sapiens
  source 1..4935: mol_type = unassigned DNA
gttggaaacggcactgctgagtgaggttgaggggtgtctcggtatgtgcgccttggatctggtgtaggcgaggtcacgcctctcttcagacagcccgagccttcccggcctggcgcgtttagttcggaactgcgggacgcgccggtgggctagggcaaggtgtgtgccctcttcctgattctggagaaaaatgccggtccggaagcaagatacccagagagcattgcaccttttggaggaatatcgttcaaaactaagccaaactgaagacagacagctcagaagttccatagaacgggttattaacatatttcagagcaacctctttcaggctttaatagatattcaagaattttatgaagtgaccttactggataatccaaaatgtatagatcgttcaaagccgtctgaaccaattcaacctgtgaatacttgggagatttccagccttccaagctctactgtgacttcagagacactgccaagcagccttagccctagtgtagagaaatacaggtatcaggatgaagatacacctcctcaagagcatatttccccacaaatcacaaatgaagtgataggtccagaattggttcatgtctcagagaagaacttatcagagattgagaatgtccatggatttgtttctcattctcatatttcaccaataaaggcaaatcctcccccagtactggtcaacacagatagcttggaaacaccaacttacgttaatggcacagatgcagattatgaatatgaagaaatcacacttgaaaggggaaattcagggcttggtttcagcattgcaggaggtacggacaacccacacattggagatgactcaagtattttcattaccaaaattatcacagggggagcagccgcccaagatggaagattgcgggtcaatgactgtatattacgagtaaatgaagtagatgttcgtgatgtaacacatagcaaagcagttgaagcgttgaaagaagcagggtctattgtacgcttgtatgtaaaaagaaggaaaccagtgtcagaaaaaataatggaaataaagctcattaaaggtcctaaaggtcttgggtttagcattgctggaggtgttggaaatcagcatattcctggggataatagcatctatgtaaccaaaataattgaaggaggtgcagcacataaggatggcaaacttcagattggagataaacttttagcagtgaataacgtatgtttagaagaagttactcatgaagaagcagtaactgccttaaagaacacatctgattttgtttatttgaaagtggcaaaacccacaagtatgtatatgaatgatggctatgcaccacctgatatcaccaactcttcttctcagcctgttgataaccatgttagcccatcttccttcttgggccagacaccagcatctccagccagatactccccagtttctaaagcagtacttggagatgatgaaattacaagggaacctagaaaagttgttcttcatcgtggctcaacgggccttggtttcaacattgtaggaggagaagatggagaaggaatatttatttcctttatcttagccggaggacctgctgatctaagtggagagctcagaaaaggagatcgtattatatcggtaaacagtgttgacctcagagctgctagtcatgagcaggcagcagctgcattgaaaaatgctggccaggctgtcacaattgttgcacaatatcgacctgaagaatacagtcgttttgaagctaaaatacatgatttacgggagcagatgatgaatagtagtattagttcagggtcaggttctcttcgaactagccagaagcgatccctctatgtcagagccctttttgattatgacaagactaaagacagtgggcttcccagtcagggactgaacttcaaatttggagatatcctccatgttattaatgcttctgatgatgaatggtggcaagccaggcaggttacaccagatggtgagagcgatgaggtcggagtgattcccagtaaacgcagagttgagaagaaagaacgagcccgattaaaaacagtgaaattcaattctaaaacgagagataaagggcagtcattcaatgacaagcgtaaaaagaacctcttttcccgaaaattccccttctacaagaacaaggaccagagtgagcaggaaacaagtgatgctgaccagcatgtaacttctaatgccagcgatagtgaaagtagttaccgtggtcaagaagaatacgtcttatcttatgaaccagtgaatcaacaagaagttaattatactcgaccagtgatcatattgggacctatgaaagacaggataaatgatgacttgatctcagaatttcctgacaaatttggatcctgtgttcctcatacaactagaccaaaacgagattatgaggtagatggaagagattatcattttgtgacttcaagagagcagatggaaaaagatatccaggaacataaattcattgaagctggccagtataacaatcatctatatggaacaagtgttcagtctgtacgagaagtagcagaaaagggcaaacactgtatccttgatgtgtctggaaatgccataaagagattacagattgcacagctttaccctatctccatttttattaaacccaaatccatggaaaatatcatggaaatgaataagcgtctaacagaagaacaagccagaaaaacatttgagagagccatgaaactggaacaggagtttactgaacatttcacagctattgtacagggggatacgctggaagacatttacaaccaagtgaaacagatcatagaagaacaatctggttcttacatctgggttccggcaaaagaaaagctatgaaaactcatgtttctctgtttctcttttccacaattccattttctttggcatctctttgccctttcctctggagtctttcttgagtactgatttcatgttgaattgtatcccacacatcatggtctgcagcttctttttcacatgtagtgtctccttcaagttacatcgtgtgtattatttaatgtcactattggttagtggccatttttcagaactgaagatggaatggcctgaccagctattaagaacgtggggagacgcagaaattgtggtaaaattccttaatgtttaagggaaagtaactttaagagatttttggaaaagctttatatacattcttttcaaatttcagtacaaatgaaaaagtggttttaatcagtgatttagtagactttgagcaactgtgcacgcttcagtttaatagcatggtttggccagtgtattactctcaagtccttttctcaatcaacttctatcatcaaagcaattgtttcattatagataaataaggacattttttaatttaaaaattcatgtctgagttgactttcataagggatttcattttttcctcaacattcttaaagccttttagtatttgacggttcttttttcccaggacatttgctaggaataacaacgtttcaatgtttttaatctacttgagcaacactatcgtgtcttacaaaagttgttcatatgtaaatgatcatcacatttcgtgaattgaggccatgttcaggtgctaaggaagttcgccttttacacagaagattgagaaaatttcctagatataaatacagataaatcagacgttacagtggtgacgtagtaaccatcatggcaatggaaaggagtccaattcatagcctaaaacttcaaatgtattcttaggagtcagattttactgaatattttacccacaatagctgcctattttgttataataaaatatatataaatatatatataaaactttctttaaactgtaactatgggaattattttctttacatagttgcgcacacacacaaacatatatatatatttaaaatatattttgtttcttttgccacctactcctaactttttgtttggtttttaaattaaatattaattgaatagacttatcttccttaatcatgtgaactgaaaatgggggcatggtggtcatgaggaggaaacatttagggaaattagattataagtaaaagtgtgggcatattctcctcttttctacaaaggttttcaaatggttcctgaggttttttgttgttgtccgtgttgttactgttgttcttgtcatcaggtttgattttggtccttgccctttccttctagttctccttttattaataggaaggcaggcaaaagccccatttatgtgtgtgttttcccctcagacagctttcatccactgctctgcactagaattgcacaaatcttcatggtgagcaattttaagaaatgttagtgaaaggtagaaattatttcacaaatcagtttctctggtccttcatattaataataatatttggcttcccattgctctttggagttgtttattaaatatgtgtttttgacaacctcctcattagtttcttaaatgagtactggtttgtaaagaattatcaacattatccattccatttatgaagaagaggagaacagctaataaactgtattgtaaaatccatatgttaagtgtgtcttgaattttgaaagaaaaaatatattttgcaagctaacattttcttgaaacaatttgaggcatcatgtaacttataaccgaatccaagagccgttaggcagcagagtgtgttaccacattgaaatacacagtgctgctgttagactaaatgtcgtaggttgttaaccacatagaaacacactagtatgaagaaaactgttgtaaaatctcaagagcttcagaaactgccttacaagaccgcagcataagctattttgaagtatttaccaaatagtcacatgttgtaaaatatcaagtggttataaaaggatgccatttatatattaaaatttacataacattgttttctgga

SEQ ID NO: 8509 - DNA, 5007 bp, Homo sapiens
  source 1..5007: mol_type = unassigned DNA
gttggaaacggcactgctgagtgaggttgaggggtgtctcggtatgtgcgccttggatctggtgtaggcgaggtcacgcctctcttcagacagcccgagccttcccggcctggcgcgtttagttcggaactgcgggacgcgccggtgggctagggcaaggtgtgtgccctcttcctgattctggagaaaaatgccggtccggaagcaagatacccagagagcattgcaccttttggaggaatatcgttcaaaactaagccaaactgaagacagacagctcagaagttccatagaacgggttattaacatatttcagagcaacctctttcaggctttaatagatattcaagaattttatgaagtgaccttactggataatccaaaatgtatagatcgttcaaagccgtctgaaccaattcaacctgtgaatacttgggagatttccagccttccaagctctactgtgacttcagagacactgccaagcagccttagccctagtgtagagaaatacaggtatcaggatgaagatacacctcctcaagagcatatttccccacaaatcacaaatgaagtgataggtccagaattggttcatgtctcagagaagaacttatcagagattgagaatgtccatggatttgtttctcattctcatatttcaccaataaagccaacagaagctgttcttccctctcctcccactgtccctgtgatccctgtcctgccagtccctgctgagaatactgtcatcctacccaccataccacaggcaaatcctcccccagtactggtcaacacagatagcttggaaacaccaacttacgttaatggcacagatgcagattatgaatatgaagaaatcacacttgaaaggggaaattcagggcttggtttcagcattgcaggaggtacggacaacccacacattggagatgactcaagtattttcattaccaaaattatcacagggggagcagccgcccaagatggaagattgcgggtcaatgactgtatattacgagtaaatgaagtagatgttcgtgatgtaacacatagcaaagcagttgaagcgttgaaagaagcagggtctattgtacgcttgtatgtaaaaagaaggaaaccagtgtcagaaaaaataatggaaataaagctcattaaaggtcctaaaggtcttgggtttagcattgctggaggtgttggaaatcagcatattcctggggataatagcatctatgtaaccaaaataattgaaggaggtgcagcacataaggatggcaaacttcagattggagataaacttttagcagtgaataacgtatgtttagaagaagttactcatgaagaagcagtaactgccttaaagaacacatctgattttgtttatttgaaagtggcaaaacccacaagtatgtatatgaatgatggctatgcaccacctgatatcaccaactcttcttctcagcctgttgataaccatgttagcccatcttccttcttgggccagacaccagcatctccagccagatactccccagtttctaaagcagtacttggagatgatgaaattacaagggaacctagaaaagttgttcttcatcgtggctcaacgggccttggtttcaacattgtaggaggagaagatggagaaggaatatttatttcctttatcttagccggaggacctgctgatctaagtggagagctcagaaaaggagatcgtattatatcggtaaacagtgttgacctcagagctgctagtcatgagcaggcagcagctgcattgaaaaatgctggccaggctgtcacaattgttgcacaatatcgacctgaagaatacagtcgttttgaagctaaaatacatgatttacgggagcagatgatgaatagtagtattagttcagggtcaggttctcttcgaactagccagaagcgatccctctatgtcagagccctttttgattatgacaagactaaagacagtgggcttcccagtcagggactgaacttcaaatttggagatatcctccatgttattaatgcttctgatgatgaatggtggcaagccaggcaggttacaccagatggtgagagcgatgaggtcggagtgattcccagtaaacgcagagttgagaagaaagaacgagcccgattaaaaacagtgaaattcaattctaaaacgagagataaaggggagatccctgacgacatgggatcaaaaggcctgaagcatgtaacttctaatgccagcgatagtgaaagtagttacctaatcttgattacagatgagtatggctgctcaaaaggtcgtggtcaagaagaatacgtcttatcttatgaaccagtgaatcaacaagaagttaattatactcgaccagtgatcatattgggacctatgaaagacaggataaatgatgacttgatctcagaatttcctgacaaatttggatcctgtgttcctcatacaactagaccaaaacgagattatgaggtagatggaagagattatcattttgtgacttcaagagagcagatggaaaaagatatccaggaacataaattcattgaagctggccagtataacaatcatctatatggaacaagtgttcagtctgtacgagaagtagcagaaaagggcaaacactgtatccttgatgtgtctggaaatgccataaagagattacagattgcacagctttaccctatctccatttttattaaacccaaatccatggaaaatatcatggaaatgaataagcgtctaacagaagaacaagccagaaaaacatttgagagagccatgaaactggaacaggagtttactgaacatttcacagctattgtacagggggatacgctggaagacatttacaaccaagtgaaacagatcatagaagaacaatctggttcttacatctgggttccggcaaaagaaaagctatgaaaactcatgtttctctgtttctcttttccacaattccattttctttggcatctctttgccctttcctctggagtctttcttgagtactgatttcatgttgaattgtatcccacacatcatggtctgcagcttctttttcacatgtagtgtctccttcaagttacatcgtgtgtattatttaatgtcactattggttagtggccatttttcagaactgaagatggaatggcctgaccagctattaagaacgtggggagacgcagaaattgtggtaaaattccttaatgtttaagggaaagtaactttaagagatttttggaaaagctttatatacattcttttcaaatttcagtacaaatgaaaaagtggttttaatcagtgatttagtagactttgagcaactgtgcacgcttcagtttaatagcatggtttggccagtgtattactctcaagtccttttctcaatcaacttctatcatcaaagcaattgtttcattatagataaataaggacattttttaatttaaaaattcatgtctgagttgactttcataagggatttcattttttcctcaacattcttaaagccttttagtatttgacggttcttttttcccaggacatttgctaggaataacaacgtttcaatgtttttaatctacttgagcaacactatcgtgtcttacaaaagttgttcatatgtaaatgatcatcacatttcgtgaattgaggccatgttcaggtgctaaggaagttcgccttttacacagaagattgagaaaatttcctagatataaatacagataaatcagacgttacagtggtgacgtagtaaccatcatggcaatggaaaggagtccaattcatagcctaaaacttcaaatgtattcttaggagtcagattttactgaatattttacccacaatagctgcctattttgttataataaaatatatataaatatatatataaaactttctttaaactgtaactatgggaattattttctttacatagttgcgcacacacacaaacatatatatatatttaaaatatattttgtttcttttgccacctactcctaactttttgtttggtttttaaattaaatattaattgaatagacttatcttccttaatcatgtgaactgaaaatgggggcatggtggtcatgaggaggaaacatttagggaaattagattataagtaaaagtgtgggcatattctcctcttttctacaaaggttttcaaatggttcctgaggttttttgttgttgtccgtgttgttactgttgttcttgtcatcaggtttgattttggtccttgccctttccttctagttctccttttattaataggaaggcaggcaaaagccccatttatgtgtgtgttttcccctcagacagctttcatccactgctctgcactagaattgcacaaatcttcatggtgagcaattttaagaaatgttagtgaaaggtagaaattatttcacaaatcagtttctctggtccttcatattaataataatatttggcttcccattgctctttggagttgtttattaaatatgtgtttttgacaacctcctcattagtttcttaaatgagtactggtttgtaaagaattatcaacattatccattccatttatgaagaagaggagaacagctaataaactgtattgtaaaatccatatgttaagtgtgtcttgaattttgaaagaaaaaatatattttgcaagctaacattttcttgaaacaatttgaggcatcatgtaacttataaccgaatccaagagccgttaggcagcagagtgtgttaccacattgaaatacacagtgctgctgttagactaaatgtcgtaggttgttaaccacatagaaacacactagtatgaagaaaactgttgtaaaatctcaagagcttcagaaactgccttacaagaccgcagcataagctattttgaagtatttaccaaatagtcacatgttgtaaaatatcaagtggttataaaaggatgccatttatatattaaaatttacataacattgttttctgga

SEQ ID NO: 8510 - DNA, 4929 bp, Homo sapiens
  source 1..4929: mol_type = unassigned DNA
gttggaaacggcactgctgagtgaggttgaggggtgtctcggtatgtgcgccttggatctggtgtaggcgaggtcacgcctctcttcagacagcccgagccttcccggcctggcgcgtttagttcggaactgcgggacgcgccggtgggctagggcaaggtgtgtgccctcttcctgattctggagaaaaatgccggtccggaagcaagatacccagagagcattgcaccttttggaggaatatcgttcaaaactaagccaaactgaagacagacagctcagaagttccatagaacgggttattaacatatttcagagcaacctctttcaggctttaatagatattcaagaattttatgaagtgaccttactggataatccaaaatgtatagatcgttcaaagccgtctgaaccaattcaacctgtgaatacttgggagatttccagccttccaagctctactgtgacttcagagacactgccaagcagccttagccctagtgtagagaaatacaggtatcaggatgaagatacacctcctcaagagcatatttccccacaaatcacaaatgaagtgataggtccagaattggttcatgtctcagagaagaacttatcagagattgagaatgtccatggatttgtttctcattctcatatttcaccaataaagccaacagaagctgttcttccctctcctcccactgtccctgtgatccctgtcctgccagtccctgctgagaatactgtcatcctacccaccataccacaggcaaatcctcccccagtactggtcaacacagatagcttggaaacaccaacttacgttaatggcacagatgcagattatgaatatgaagaaatcacacttgaaaggggaaattcagggcttggtttcagcattgcaggaggtacggacaacccacacattggagatgactcaagtattttcattaccaaaattatcacagggggagcagccgcccaagatggaagattgcgggtcaatgactgtatattacgagtaaatgaagtagatgttcgtgatgtaacacatagcaaagcagttgaagcgttgaaagaagcagggtctattgtacgcttgtatgtaaaaagaaggaaaccagtgtcagaaaaaataatggaaataaagctcattaaaggtcctaaaggtcttgggtttagcattgctggaggtgttggaaatcagcatattcctggggataatagcatctatgtaaccaaaataattgaaggaggtgcagcacataaggatggcaaacttcagattggagataaacttttagcagtgaataacgtatgtttagaagaagttactcatgaagaagcagtaactgccttaaagaacacatctgattttgtttatttgaaagtggcaaaacccacaagtatgtatatgaatgatggctatgcaccacctgatatcaccaactcttcttctcagcctgttgataaccatgttagcccatcttccttcttgggccagacaccagcatctccagccagatactccccagtttctaaagcagtacttggagatgatgaaattacaagggaacctagaaaagttgttcttcatcgtggctcaacgggccttggtttcaacattgtaggaggagaagatggagaaggaatatttatttcctttatcttagccggaggacctgctgatctaagtggagagctcagaaaaggagatcgtattatatcggtaaacagtgttgacctcagagctgctagtcatgagcaggcagcagctgcattgaaaaatgctggccaggctgtcacaattgttgcacaatatcgacctgaagaatacagtcgttttgaagctaaaatacatgatttacgggagcagatgatgaatagtagtattagttcagggtcaggttctcttcgaactagccagaagcgatccctctatgtcagagccctttttgattatgacaagactaaagacagtgggcttcccagtcagggactgaacttcaaatttggagatatcctccatgttattaatgcttctgatgatgaatggtggcaagccaggcaggttacaccagatggtgagagcgatgaggtcggagtgattcccagtaaacgcagagttgagaagaaagaacgagcccgattaaaaacagtgaaattcaattctaaaacgagagataaaggggagatccctgacgacatgggatcaaaaggcctgataggtggtcaagaagaatacgtcttatcttatgaaccagtgaatcaacaagaagttaattatactcgaccagtgatcatattgggacctatgaaagacaggataaatgatgacttgatctcagaatttcctgacaaatttggatcctgtgttcctcatacaactagaccaaaacgagattatgaggtagatggaagagattatcattttgtgacttcaagagagcagatggaaaaagatatccaggaacataaattcattgaagctggccagtataacaatcatctatatggaacaagtgttcagtctgtacgagaagtagcagaaaagggcaaacactgtatccttgatgtgtctggaaatgccataaagagattacagattgcacagctttaccctatctccatttttattaaacccaaatccatggaaaatatcatggaaatgaataagcgtctaacagaagaacaagccagaaaaacatttgagagagccatgaaactggaacaggagtttactgaacatttcacagctattgtacagggggatacgctggaagacatttacaaccaagtgaaacagatcatagaagaacaatctggttcttacatctgggttccggcaaaagaaaagctatgaaaactcatgtttctctgtttctcttttccacaattccattttctttggcatctctttgccctttcctctggagtctttcttgagtactgatttcatgttgaattgtatcccacacatcatggtctgcagcttctttttcacatgtagtgtctccttcaagttacatcgtgtgtattatttaatgtcactattggttagtggccatttttcagaactgaagatggaatggcctgaccagctattaagaacgtggggagacgcagaaattgtggtaaaattccttaatgtttaagggaaagtaactttaagagatttttggaaaagctttatatacattcttttcaaatttcagtacaaatgaaaaagtggttttaatcagtgatttagtagactttgagcaactgtgcacgcttcagtttaatagcatggtttggccagtgtattactctcaagtccttttctcaatcaacttctatcatcaaagcaattgtttcattatagataaataaggacattttttaatttaaaaattcatgtctgagttgactttcataagggatttcattttttcctcaacattcttaaagccttttagtatttgacggttcttttttcccaggacatttgctaggaataacaacgtttcaatgtttttaatctacttgagcaacactatcgtgtcttacaaaagttgttcatatgtaaatgatcatcacatttcgtgaattgaggccatgttcaggtgctaaggaagttcgccttttacacagaagattgagaaaatttcctagatataaatacagataaatcagacgttacagtggtgacgtagtaaccatcatggcaatggaaaggagtccaattcatagcctaaaacttcaaatgtattcttaggagtcagattttactgaatattttacccacaatagctgcctattttgttataataaaatatatataaatatatatataaaactttctttaaactgtaactatgggaattattttctttacatagttgcgcacacacacaaacatatatatatatttaaaatatattttgtttcttttgccacctactcctaactttttgtttggtttttaaattaaatattaattgaatagacttatcttccttaatcatgtgaactgaaaatgggggcatggtggtcatgaggaggaaacatttagggaaattagattataagtaaaagtgtgggcatattctcctcttttctacaaaggttttcaaatggttcctgaggttttttgttgttgtccgtgttgttactgttgttcttgtcatcaggtttgattttggtccttgccctttccttctagttctccttttattaataggaaggcaggcaaaagccccatttatgtgtgtgttttcccctcagacagctttcatccactgctctgcactagaattgcacaaatcttcatggtgagcaattttaagaaatgttagtgaaaggtagaaattatttcacaaatcagtttctctggtccttcatattaataataatatttggcttcccattgctctttggagttgtttattaaatatgtgtttttgacaacctcctcattagtttcttaaatgagtactggtttgtaaagaattatcaacattatccattccatttatgaagaagaggagaacagctaataaactgtattgtaaaatccatatgttaagtgtgtcttgaattttgaaagaaaaaatatattttgcaagctaacattttcttgaaacaatttgaggcatcatgtaacttataaccgaatccaagagccgttaggcagcagagtgtgttaccacattgaaatacacagtgctgctgttagactaaatgtcgtaggttgttaaccacatagaaacacactagtatgaagaaaactgttgtaaaatctcaagagcttcagaaactgccttacaagaccgcagcataagctattttgaagtatttaccaaatagtcacatgttgtaaaatatcaagtggttataaaaggatgccatttatatattaaaatttacataacattgttttctgga

SEQ ID NO: 8511 - DNA, 716 bp, Homo sapiens
  source 1..716: mol_type = unassigned DNA
gcggccgctgccctgtccggcccccgctggagcagcccggaggcagcgagcaaggagaaaggtgtgtgccctcttcctgattctggagaaaaatgccggtccggaagcaagatacccagagagcattgcaccttttggaggaatatcgttcaaaactaagccaaactgaagacagacagctcagaagttccatagaacgggttattaacatatttcagagcaacctctttcaggctttaatagatattcaagaattttatgaagtgaccttactggataatccaaaatgtatagatcgttcaaagccgtctgaaccaattcaacctgtgaatacttgggagatttccagccttccaagctctactgtgacttcagagacactgccaagcagccttagccctagtgtagagaaatacaggtatcaggatgaagatacacctcctcaagagcatatttccccacaaatcacaaatgaagtgataggtccagaattggttcatgtctcagagaagaacttatcagagattgagaatgtccatggatttgtttctcattctcatatttcaccaataaagccaacagaagctgttcttccctctcctcccactgtccctgtgatccctgtcctgccagtccctgctgagaatactgtcatcctacccaccataccacaggcaaatcctcccccagtactggtcaacacagatagcttggaa

SEQ ID NO: 8512 - DNA, 2690 bp, Homo sapiens
  source 1..2690: mol_type = unassigned DNA
ggcggaaagtttcgggggagagcggttgggggcgcggaaggaggtgtgtgccctcttcctgattctggagaaaaatgccggtccggaagcaagatacccagagagcattgcaccttttggaggaatatcgttcaaaactaagccaaactgaagacagacagctcagaagttccatagaacgggttattaacatatttcagagcaacctctttcaggctttaatagatattcaagaattttatgaagtgaccttactggataatccaaaatgtatagatcgttcaaagccgtctgaaccaattcaacctgtgaatacttgggagatttccagccttccaagctctactgtgacttcagagacactgccaagcagccttagccctagtgtagagaaatacaggtatcaggatgaagatacacctcctcaagagcatatttccccacaaatcacaaatgaagtgataggtccagaattggttcatgtctcagagaagaacttatcagagattgagaatgtccatggatttgtttctcattctcatatttcaccaataaaggcaaatcctcccccagtactggtcaacacagatagcttggaaacaccaacttacgttaatggcacagatgcagattatgaatatgaagaaatcacacttgaaaggggaaattcagggcttggtttcagcattgcaggaggtacggacaacccacacattggagatgactcaagtattttcattaccaaaattatcacagggggagcagccgcccaagatggaagattgcgggtcaatgactgtatattacgagtaaatgaagtagatgttcgtgatgtaacacatagcaaagcagttgaagcgttgaaagaagcagggtctattgtacgcttgtatgtaaaaagaaggaaaccagtgtcagaaaaaataatggaaataaagctcattaaaggtcctaaaggtcttgggtttagcattgctggaggtgttggaaatcagcatattcctggggataatagcatctatgtaaccaaaataattgaaggaggtgcagcacataaggatggcaaacttcagattggagataaacttttagcagtgaataacgtatgtttagaagaagttactcatgaagaagcagtaactgccttaaagaacacatctgattttgtttatttgaaagtggcaaaacccacaagtatgtatatgaatgatggctatgcaccacctgatatcaccaactcttcttctcagcctgttgataaccatgttagcccatcttccttcttgggccagacaccagcatctccagccagatactccccagtttctaaagcagtacttggagatgatgaaattacaagggaacctagaaaagttgttcttcatcgtggctcaacgggccttggtttcaacattgtaggaggagaagatggagaaggaatatttatttcctttatcttagccggaggacctgctgatctaagtggagagctcagaaaaggagatcgtattatatcggtaaacagtgttgacctcagagctgctagtcatgagcaggcagcagctgcattgaaaaatgctggccaggctgtcacaattgttgcacaatatcgacctgaagaatacagtcgttttgaagctaaaatacatgatttacgggagcagatgatgaatagtagtattagttcagggtcaggttctcttcgaactagccagaagcgatccctctatgtcagagccctttttgattatgacaagactaaagacagtgggcttcccagtcagggactgaacttcaaatttggagatatcctccatgttattaatgcttctgatgatgaatggtggcaagccaggcaggttacaccagatggtgagagcgatgaggtcggagtgattcccagtaaacgcagagttgagaagaaagaacgagcccgattaaaaacagtgaaattcaattctaaaacgagagataaaggggagatccctgacgacatgggatcaaaaggcctgaagcatgtaacttctaatgccagcgatagtgaaagtagttaccgtggtcaagaagaatacgtcttatcttatgaaccagtgaatcaacaagaagttaattatactcgaccagtgatcatattgggacctatgaaagacaggataaatgatgacttgatctcagaatttcctgacaaatttggatcctgtgttcctcatacaactagaccaaaacgagattatgaggtagatggaagagattatcattttgtgacttcaagagagcagatggaaaaagatatccaggaacataaattcattgaagctggccagtataacaatcatctatatggaacaagtgttcagtctgtacgagaagtagcagaaaagggcaaacactgtatccttgatgtgtctggaaatgccataaagagattacagattgcacagctttaccctatctccatttttattaaacccaaatccatggaaaatatcatggaaatgaataagcgtctaacagaagaacaagccagaaaaacatttgagagagccatgaaactggaacaggagtttactgaacatttcacagctattgtacagggggatacgctggaagacatttacaaccaagtgaaacagatcatagaagaacaatctggttcttacatctgggttccggcaaaagaaaagctatga

SEQ ID NO: 8513 - DNA, 711 bp, Homo sapiens
  source 1..711: mol_type = unassigned DNA
ctggctcaggggccaagggtcggagcgcttcacccgcccgtacccagtagcaggtggggagtgtggatacttgtgcgggggaagaggcggcctcaggtctaggctctttggggaggggacgctttcgaggagagtttggaagccgacttctgtctgttcttaatttggaggggtacccactccaaggaaaagctttccacgttgacagacaactgctgcgttttgagactctttctttgacttggtaaaactttggaacgtggggttttcaaataggctgcgagggttttctatttcgataggggaaaatgctagtttaacatgattctatcctttttcctttccgttgtgtgttttaaaggtgtgtgccctcttcctgattctggagaaaaatgccggtccggaagcaagatacccagagagcattgcaccttttggaggaatatcgttcaaaactaagccaaactgaagacagacagctcagaagttccatagaacgggttattaacatatttcagagcaacctctttcaggctttaatagatattcaagaattttatgaagtgaccttactggataatccaaaatgtatagatcgttcaaagccgtctgaaccaattcaacctgtgaatacttgggagatttccagccttccaagctctactgtgacttcagagacactgccaagcagccttagccctagtgtagaga

SEQ ID NO: 8514 - DNA, 1771 bp, Homo sapiens
  source 1..1771: mol_type = unassigned DNA
gttggaaacggcactgctgagtgaggttgaggggtgtctcggtatgtgcgccttggatctggtgtaggcgaggtcacgcctctcttcagacagcccgagccttcccggcctggcgcgtttagttcggaactgcgggacgcgccggtgggctagggcaaggtgtgtgccctcttcctgattctggagaaaaatgccggtccggaagcaagatacccagagagcattgcaccttttggaggaatatcgttcaaaactaagccaaactgaagacagacagctcagaagttccatagaacgggttattaacatatttcagagcaacctctttcaggctttaatagatattcaagaattttatgaagtgaccttactggataatccaaaatgtatagatcgttcaaagccgtctgaaccaattcaacctgtgaatacttgggagatttccagccttccaagctctactgtgacttcagagacactgccaagcagccttagccctagtgtagagaaatacaggtatcaggatgaagatacacctcctcaagagcatatttccccacaaatcacaaatgaagtgataggtccagaattggttcatgtctcagagaagaacttatcagagattgagaatgtccatggatttgtttctcattctcatatttcaccaataaaggttaatggcacagatgcagattatgaatatgaagaaatcacacttgaaaggggaaattcagggcttggtttcagcattgcaggaggtacggacaacccacacattggagatgactcaagtattttcattaccaaaattatcacagggggagcagccgcccaagatggaagattgcgggtcaatgactgtatattacgagtaaatgaagtagatgttcgtgatgtaacacatagcaaagcagttgaagcgttgaaagaagcagggtctattgtacgcttgtatgtaaaaagaaggaaaccagtgtcagaaaaaataatggaaataaagctcattaaaggtcctaaaggtcttgggtttagcattgctggaggtgttggaaatcagcatattcctggggataatagcatctatgtaaccaaaataattgaaggaggtgcagcacataaggatggcaaacttcagattggagataaacttttagcagtgaataacgtatgtttagaagaagttactcatgaagaagcagtaactgccttaaagaacacatctgattttgtttatttgaaagtggcaaaacccacaagtatgtatatgaatgatggctatgcaccacctgatatcaccaactaatacagtcgttttgaagctaaaatacatgatttacgggagcagatgatgaatagtagtattagttcagggtcaggttctcttcgaactagccagaagcgatccctctatgtcagagccctttttgattatgacaagactaaagacagtgggcttcccagtcagggactgaacttcaaatttggagatatcctccatgttattaatgcttctgatgatgaatggtggcaagccaggcaggttacaccagatggtgagagcgatgaggtcggagtgattcccagtaaacgcagcagtcattcaatgacaagcgtaaaaagaacctcttttcccgaaaattccccttctacaagaacaaggaccagagtgagcaggaaacaagtgatgctgaccgagatccctgacgacatgggatcaaaaggcctgaagcatgtaacttctaatgccagcgatagtgaaagtagttaccgt

SEQ ID NO: 8515 - DNA, 3994 bp, Homo sapiens
  source 1..3994: mol_type = unassigned DNA
agttctgtcactcactcggggtaactttgggcaaattctctctggacctcctaatagggaggtcctcgtcaccccgaggaagttcgaagacgtgggcagtgacttggaaagcttcccgagattccccttctataacctgggtggctcagaccgggagcggggtcccagccggccggtaattccgcccggaggtgcgcacgaaacaaacctgcagcgctggccgagggcggctcagcttcggagggcgcgactccgggtgtgtgccctcttcctgattctggagaaaaatgccggtccggaagcaagatacccagagagcattgcaccttttggaggaatatcgttcaaaactaagccaaactgaagacagacagctcagaagttccatagaacgggttattaacatatttcagagcaacctctttcaggctttaatagatattcaagaattttatgaagtgaccttactggataatccaaaatgtatagatcgttcaaagccgtctgaaccaattcaacctgtgaatacttgggagatttccagccttccaagctctactgtgacttcagagacactgccaagcagccttagccctagtgtagagaaatacaggtatcaggatgaagatacacctcctcaagagcatatttccccacaaatcacaaatgaagtgataggtccagaattggttcatgtctcagagaagaacttatcagagattgagaatgtccatggatttgtttctcattctcatatttcaccaataaagccaacagaagctgttcttccctctcctcccactgtccctgtgatccctgtcctgccagtccctgctgagaatactgtcatcctacccaccataccacaggcaaatcctcccccagtactggtcaacacagatagcttggaaacaccaacttacgttaatggcacagatgcagattatgaatatgaagaaatcacacttgaaaggggaaattcagggcttggtttcagcattgcaggaggtacggacaacccacacattggagatgactcaagtattttcattaccaaaattatcacagggggagcagccgcccaagatggaagattgcgggtcaatgactgtatattacgagtaaatgaagtagatgttcgtgatgtaacacatagcaaagcagttgaagcgttgaaagaagcagggtctattgtacgcttgtatgtaaaaagaaggaaaccagtgtcagaaaaaataatggaaataaagctcattaaaggtcctaaaggtcttgggtttagcattgctggaggtgttggaaatcagcatattcctggggataatagcatctatgtaaccaaaataattgaaggaggtgcagcacataaggatggcaaacttcagattggagataaacttttagcagtgaataacgtatgtttagaagaagttactcatgaagaagcagtaactgccttaaagaacacatctgattttgtttatttgaaagtggcaaaacccacaagtatgtatatgaatgatggctatgcaccacctgatatcaccaactcttcttctcagcctgttgataaccatgttagcccatcttccttcttgggccagacaccagcatctccagccagatactccccagtttctaaagcagtacttggagatgatgaaattacaagggaacctagaaaagttgttcttcatcgtggctcaacgggccttggtttcaacattgtaggaggagaagatggagaaggaatatttatttcctttatcttagccggaggacctgctgatctaagtggagagctcagaaaaggagatcgtattatatcggtaaacagtgttgacctcagagctgctagtcatgagcaggcagcagctgcattgaaaaatgctggccaggctgtcacaattgttgcacaatatcgacctgaagaatacagtcgttttgaagctaaaatacatgatttacgggagcagatgatgaatagtagtattagttcagggtcaggttctcttcgaactagccagaagcgatccctctatgtcagagccctttttgattatgacaagactaaagacagtgggcttcccagtcagggactgaacttcaaatttggagatatcctccatgttattaatgcttctgatgatgaatggtggcaagccaggcaggttacaccagatggtgagagcgatgaggtcggagtgattcccagtaaacgcagagttgagaagaaagaacgagcccgattaaaaacagtgaaattcaattctaaaacgagagataaaggggagatccctgacgacatgggatcaaaaggcctgaagcatgtaacttctaatgccagcgatagtgaaagtagttaccgtggtcaagaagaatacgtcttatcttatgaaccagtgaatcaacaagaagttaattatactcgaccagtgatcatattgggacctatgaaagacaggataaatgatgacttgatctcagaatttcctgacaaatttggatcctgtgttcctcatacaactagaccaaaacgagattatgaggtagatggaagagattatcattttgtgacttcaagagagcagatggaaaaagatatccaggaacataaattcattgaagctggccagtataacaatcatctatatggaacaagtgttcagtctgtacgagaagtagcagaaaagggcaaacactgtatccttgatgtgtctggaaatgccataaagagattacagattgcacagctttaccctatctccatttttattaaacccaaatccatggaaaatatcatggaaatgaataagcgtctaacagaagaacaagccagaaaaacatttgagagagccatgaaactggaacaggagtttactgaacatttcacagctattgtacagggggatacgctggaagacatttacaaccaagtgaaacagatcatagaagaacaatctggttcttacatctgggttccggcaaaagaaaagctatgaaaactcatgtttctctgtttctcttttccacaattccattttctttggcatctctttgccctttcctctggagtctttcttgagtactgatttcatgttgaattgtatcccacacatcatggtctgcagcttctttttcacatgtagtgtctccttcaagttacatcgtgtgtattatttaatgtcactattggttagtggccatttttcagaactgaagatggaatggcctgaccagctattaagaacgtggggagacgcagaaattgtggtaaaattccttaatgtttaagggaaagtaactttaagagatttttggaaaagctttatatacattcttttcaaatttcagtacaaatgaaaaagtggttttaatcagtgatttagtagactttgagcaactgtgcacgcttcagtttaatagcatggtttggccagtgtattactctcaagtccttttctcaatcaacttctatcatcaaagcaattgtttcattatagataaataaggacattttttaatttaaaaattcatgtctgagttgactttcataagggatttcattttttcctcaacattcttaaagccttttagtatttgacggttcttttttcccaggacatttgctaggaataacaacgtttcaatgtttttaatctacttgagcaacactatcgtgtcttacaaaagttgttcatatgtaaatgatcatcacatttcgtgaattgaggccatgttcaggtgctaaggaagttcgccttttacacagaagattgagaaaatttcctagatataaatacagataaatcagacgttacagtggtgacgtagtaaccatcatggcaatggaaaggagtccaattcatagcctaaaacttcaaatgtattcttaggagtcagattttactgaatattttacccacaatagctgcctattttgttataataaaatatatataaatatatatataaaactttctttaaactgtaa

SEQ ID NO: 8516 - DNA, 582 bp, Homo sapiens
  source 1..582: mol_type = unassigned DNA
ggtggggatctacccccggggtcgccaggcgctgtctctgccgcggagttggaaacggcactgctgagtgaggttgaggggtgtctcggtgtgtgccctcttcctgattctggagaaaaatgccggtccggaagcaagatacccagagagcattgcaccttttggaggaatatcgttcaaaactaagccaaactgaagacagacagctcagaagttccatagaacgggttattaacatatttcagagcaacctctttcaggctttaatagatattcaagaattttatgaagtgaccttactggataatccaaaatgtatagatcgttcaaagccgtctgaaccaattcaacctgtgaatacttgggagatttccagccttccaagctctactgtgacttcagagacactgccaagcagccttagccctagtgtagagaaatacaggtatcaggatgaagatacacctcctcaagagcatatttccccacaaatcacaaatgaagtgataggtccagaattggttcatgtctcagagaagaacttatcagagattgagaatgtccatggatttgtttctcatt

SEQ ID NO: 8517 - DNA, 2854 bp, Homo sapiens
  source 1..2854: mol_type = unassigned DNA
atgccggtccggaagcaagatacccagagagcattgcaccttttggaggaatatcgttcaaaactaagccaaactgaagacagacagctcagaagttccatagaacgggttattaacatatttcagagcaacctctttcaggctttaatagatattcaagaattttatgaagtgaccttactggataatccaaaatgtatagatcgttcaaagccgtctgaaccaattcaacctgtgaatacttgggagatttccagccttccaagctctactgtgacttcagagacactgccaagcagccttagccctagtgtagagaaatacaggtatcaggatgaagatacacctcctcaagagcatatttccccacaaatcacaaatgaagtgataggtccagaattggttcatgtctcagagaagaacttatcagagattgagaatgtccatggatttgtttctcattctcatatttcaccaataaaggttaatggcacagatgcagattatgaatatgaagaaatcacacttgaaaggggaaattcagggcttggtttcagcattgcaggaggtacggacaacccacacattggagatgactcaagtattttcattaccaaaattatcacagggggagcagccgcccaagatggaagattgcgggtcaatgactgtatattacgagtaaatgaagtagatgttcgtgatgtaacacatagcaaagcagttgaagcgttgaaagaagcagggtctattgtacgcttgtatgtaaaaagaaggaaaccagtgtcagaaaaaataatggaaataaagctcattaaaggtcctaaaggtcttgggtttagcattgctggaggtgttggaaatcagcatattcctggggataatagcatctatgtaaccaaaataattgaaggaggtgcagcacataaggatggcaaacttcagattggagataaacttttagcagtgaataacgtatgtttagaagaagttactcatgaagaagcagtaactgccttaaagaacacatctgattttgtttatttgaaagtggcaaaacccacaagtatgtatatgaatgatggctatgcaccacctgatatcaccaactcttcttctcagcctgttgataaccatgttagcccatcttccttcttgggccagacaccagcatctccagccagatactccccagtttctaaagcagtacttggagatgatgaaattacaagggaacctagaaaagttgttcttcatcgtggctcaacgggccttggtttcaacattgtaggaggagaagatggagaaggaatatttatttcctttatcttagccggaggacctgctgatctaagtggagagctcagaaaaggagatcgtattatatcggtaaacagtgttgacctcagagctgctagtcatgagcaggcagcagctgcattgaaaaatgctggccaggctgtcacaattgttgcacaatatcgacctgaagaatacagtcgttttgaagctaaaatacatgatttacgggagcagatgatgaatagtagtattagttcagggtcaggttctcttcgaactagccagaagcgatccctctatgtcagagccctttttgattatgacaagactaaagacagtgggcttcccagtcagggactgaacttcaaatttggagatatcctccatgttattaatgcttctgatgatgaatggtggcaagccaggcaggttacaccagatggtgagagcgatgaggtcggagtgattcccagtaaacgcagagttgagaagaaagaacgagcccgattaaaaacagtgaaattcaattctaaaacgagagataaaggggagatccctgacgacatgggatcaaaaggcctgaagcatgtaacttctaatgccagcgatagtgaaagtagttaccgtggtcaagaagaatacgtcttatcttatgaaccagtgaatcaacaagaagttaattatactcgaccagtgatcatattgggacctatgaaagacaggataaatgatgacttgatctcagaatttcctgacaaatttggatcctgtgttcctcatacaactagaccaaaacgagattatgaggtagatggaagagattatcattttgtgacttcaagagagcagatggaaaaagatatccaggaacataaattcattgaagctggccagtataacaatcatctatatggaacaagtgttcagtctgtacgagaagtagcagaaaagggcaaacactgtatccttgatgtgtctggaaatgccataaagagattacagattgcacagctttaccctatctccatttttattaaacccaaatccatggaaaatatcatggaaatgaataagcgtctaacagaagaacaagccagaaaaacatttgagagagccatgaaactggaacaggagtttactgaacatttcacagctattgtacagggggatacgctggaagacatttacaaccaagtgaaacagatcatagaagaacaatctggttcttacatctgggttccggcaaaagaaaagctatgaaaactcatgtttctctgtttctcttttccacaattccattttctttggcatctctttgccctttcctctggagtctttcttgagtactgatttcatgttgaattgtatcccacacatcatggtctgcagcttctttttcacatgtagtgtctccttcaagttacatcgtgtgtattatttaatgtcactattggttagtggccatttttcagaactgaagatggaatggcctgaccagctattaagaacgtggggagacgcagaaattgtggtaaaattccttaatgtttaa

SEQ ID NO: 8518 - DNA, 309 bp, Homo sapiens
  source 1..309: mol_type = unassigned DNA
tgcgggggaagaggcggcctcaggtctaggctctttggggaggggacgctttcgaggagagtttggaagccgacttctgtctgttcttaatttggaggggtacccactccaaggaaaagctttccacgttgacagacaactgctgcgttttgagactctttctttgacttggtgtgtgccctcttcctgattctggagaaaaatgccggtccggaagcaagatacccagagagcattgcaccttttggaggaatatcgttcaaaactaagccaaactgaagacagacagctcagaagttccatagaacg

SEQ ID NO: 8519 - DNA, 543 bp, Homo sapiens
  source 1..543: mol_type = unassigned DNA
agcaaggagaaaggcaagcgagaggagggggcccgagcagggcgggcggccagtcccgctggtcccctctcagcgctctgcggccgctgctggctcaggggccaagggtcggagcgcttcacccgcccgtacccagtagcaggtgtgtgccctcttcctgattctggagaaaaatgccggtccggaagcaagatacccagagagcattgcaccttttggaggaatatcgttcaaaactaagccaaactgaagacagacagctcagaagttccatagaacgggttattaacatatttcagagcaacctctttcaggctttaatagatattcaagaattttatgaagtgaccttactggataatccaaaatgtatagatcgttcaaagccgtctgaaccaattcaacctgtgaatacttgggagatttccagccttccaagctctactgtgacttcagagacactgccaagcagccttagccctagtgtagagaaatacaggtatcaggatgaagatacacctcctcaagagcatatttccccac

SEQ ID NO: 8520 - DNA, 2977 bp, Homo sapiens
  source 1..2977: mol_type = unassigned DNA
gttggaaacggcactgctgagtgaggttgaggggtgtctcggtatgtgcgccttggatctggtgtaggcgaggtcacgcctctcttcagacagcccgagccttcccggcctggcgcgtttagttcggaactgcgggacgcgccggtgggctagggcaaggtgtgtgccctcttcctgattctggagaaaaatgccggtccggaagcaagatacccagagagcattgcaccttttggaggaatatcgttcaaaactaagccaaactgaagacagacagctcagaagttccatagaacgggttattaacatatttcagagcaacctctttcaggctttaatagatattcaagaattttatgaagtgaccttactggataatccaaaatgtatagatcgttcaaagccgtctgaaccaattcaacctgtgaatacttgggagatttccagccttccaagctctactgtgacttcagagacactgccaagcagccttagccctagtgtagagaaatacaggtatcaggatgaagatacacctcctcaagagcatatttccccacaaatcacaaatgaagtgataggtccagaattggttcatgtctcagagaagaacttatcagagattgagaatgtccatggatttgtttctcattctcatatttcaccaataaagccaacagaagctgttcttccctctcctcccactgtccctgtgatccctgtcctgccagtccctgctgagaatactgtcatcctacccaccataccacaggcaaatcctcccccagtactggtcaacacagatagcttggaaacaccaacttacgttaatggcacagatgcagattatgaatatgaagaaatcacacttgaaaggggaaattcagggcttggtttcagcattgcaggaggtacggacaacccacacattggagatgactcaagtattttcattaccaaaattatcacagggggagcagccgcccaagatggaagattgcgggtcaatgactgtatattacgagtaaatgaagtagatgttcgtgatgtaacacatagcaaagcagttgaagcgttgaaagaagcagggtctattgtacgcttgtatgtaaaaagaaggaaaccagtgtcagaaaaaataatggaaataaagctcattaaaggtcctaaaggtcttgggtttagcattgctggaggtgttggaaatcagcatattcctggggataatagcatctatgtaaccaaaataattgaaggaggtgcagcacataaggatggcaaacttcagattggagataaacttttagcagtgaataacgtatgtttagaagaagttactcatgaagaagcagtaactgccttaaagaacacatctgattttgtttatttgaaagtggcaaaacccacaagtatgtatatgaatgatggctatgcaccacctgatatcaccaactcttcttctcagcctgttgataaccatgttagcccatcttccttcttgggccagacaccagcatctccagccagatactccccagtttctaaagcagtacttggagatgatgaaattacaagggaacctagaaaagttgttcttcatcgtggctcaacgggccttggtttcaacattgtaggaggagaagatggagaaggaatatttatttcctttatcttagccggaggacctgctgatctaagtggagagctcagaaaaggagatcgtattatatcggtaaacagtgttgacctcagagctgctagtcatgagcaggcagcagctgcattgaaaaatgctggccaggctgtcacaattgttgcacaatatcgacctgaagaatacagtcgttttgaagctaaaatacatgatttacgggagcagatgatgaatagtagtattagttcagggtcaggttctcttcgaactagccagaagcgatccctctatgtcagagccctttttgattatgacaagactaaagacagtgggcttcccagtcagggactgaacttcaaatttggagatatcctccatgttattaatgcttctgatgatgaatggtggcaagccaggcaggttacaccagatggtgagagcgatgaggtcggagtgattcccagtaaacgcagagttgagaagaaagaacgagcccgattaaaaacagtgaaattcaattctaaaacgagagataaaggggagatccctgacgacatgggatcaaaaggcctgaagcatgtaacttctaatgccagcgatagtgaaagtagttaccgtggtcaagaagaatacgtcttatcttatgaaccagtgaatcaacaagaagttaattatactcgaccagtgatcatattgggacctatgaaagacaggataaatgatgacttgatctcagaatttcctgacaaatttggatcctgtgttcctcatacaactagaccaaaacgagattatgaggtagatggaagagattatcattttgtgacttcaagagagcagatggaaaaagatatccaggaacataaattcattgaagctggccagtataacaatcatctatatggaacaagtgttcagtctgtacgagaagtagcagaaaagggcaaacactgtatccttgatgtgtctggaaatgccataaagagattacagattgcacagctttaccctatctccatttttattaaacccaaatccatggaaaatatcatggaaatgaataagcgtctaacagaagaacaagccagaaaaacatttgagagagccatgaaactggaacaggagtttactgaacatttcacagctattgtacagggggatacgctggaagacatttacaaccaagtgaaacagatcatagaagaacaatctggttcttacatctgggttccggcaaaagaaaagctatgaaaactcatgtttctctgtttctcttttccacaattccattttctttggcatctctttgccctttcctctgga

SEQ ID NO: 8521 - DNA, 2682 bp, Homo sapiens
  source 1..2682: mol_type = unassigned DNA
atgccggtccggaagcaagatacccagagagcattgcaccttttggaggaatatcgttcaaaactaagccaaactgaagacagacagctcagaagttccatagaacgggttattaacatatttcagagcaacctctttcaggctttaatagatattcaagaattttatgaagtgaccttactggataatccaaaatgtatagatcgttcaaagccgtctgaaccaattcaacctgtgaatacttgggagatttccagccttccaagctctactgtgacttcagagacactgccaagcagccttagccctagtgtagagaaatacaggtatcaggatgaagatacacctcctcaagagcatatttccccacaaatcacaaatgaagtgataggtccagaattggttcatgtctcagagaagaacttatcagagattgagaatgtccatggatttgtttctcattctcatatttcaccaataaaggcaaatcctcccccagtactggtcaacacagatagcttggaaacaccaacttacgttaatggcacagatgcagattatgaatatgaagaaatcacacttgaaaggggaaattcagggcttggtttcagcattgcaggaggtacggacaacccacacattggagatgactcaagtattttcattaccaaaattatcacagggggagcagccgcccaagatggaagattgcgggtcaatgactgtatattacgagtaaatgaagtagatgttcgtgatgtaacacatagcaaagcagttgaagcgttgaaagaagcagggtctattgtacgcttgtatgtaaaaagaaggaaaccagtgtcagaaaaaataatggaaataaagctcattaaaggtcctaaaggtcttgggtttagcattgctggaggtgttggaaatcagcatattcctggggataatagcatctatgtaaccaaaataattgaaggaggtgcagcacataaggatggcaaacttcagattggagataaacttttagcagtgaataacgtatgtttagaagaagttactcatgaagaagcagtaactgccttaaagaacacatctgattttgtttatttgaaagtggcaaaacccacaagtatgtatatgaatgatggctatgcaccacctgatatcaccaactcttcttctcagcctgttgataaccatgttagcccatcttccttcttgggccagacaccagcatctccagccagatactccccagtttctaaagcagtacttggagatgatgaaattacaagggaacctagaaaagttgttcttcatcgtggctcaacgggccttggtttcaacattgtaggaggagaagatggagaaggaatatttatttcctttatcttagccggaggacctgctgatctaagtggagagctcagaaaaggagatcgtattatatcggtaaacagtgttgacctcagagctgctagtcatgagcaggcagcagctgcattgaaaaatgctggccaggctgtcacaattgttgcacaatatcgacctgaagaatacagtcgttttgaagctaaaatacatgatttacgggagcagatgatgaatagtagtattagttcagggtcaggttctcttcgaactagccagaagcgatccctctatgtcagagccctttttgattatgacaagactaaagacagtgggcttcccagtcagggactgaacttcaaatttggagatatcctccatgttattaatgcttctgatgatgaatggtggcaagccaggcaggttacaccagatggtgagagcgatgaggtcggagtgattcccagtaaacgcagagttgagaagaaagaacgagcccgattaaaaacagtgaaattcaattctaaaacgagagataaagggcagtcattcaatgacaagcgtaaaaagaacctcttttcccgaaaattccccttctacaagaacaaggaccagagtgagcaggaaacaagtgatgctgaccagcatgtaacttctaatgccagcgatagtgaaagtagttaccgtggtcaagaagaatacgtcttatcttatgaaccagtgaatcaacaagaagttaattatactcgaccagtgatcatattgggacctatgaaagacaggataaatgatgacttgatctcagaatttcctgacaaatttggatcctgtgttcctcatacaactagaccaaaacgagattatgaggtagatggaagagattatcattttgtgacttcaagagagcagatggaaaaagatatccaggaacataaattcattgaagctggccagtataacaatcatctatatggaacaagtgttcagtctgtacgagaagtagcagaaaagggcaaacactgtatccttgatgtgtctggaaatgccataaagagattacagattgcacagctttaccctatctccatttttattaaacccaaatccatggaaaatatcatggaaatgaataagcgtctaacagaagaacaagccagaaaaacatttgagagagccatgaaactggaacaggagtttactgaacatttcacagctattgtacagggggatacgctggaagacatttacaaccaagtgaaacagatcatagaagaacaatctggttcttacatctgggttccggcaaaagaaaagctatga

SEQ ID NO: 8522 - DNA, 3482 bp, Homo sapiens
  source 1..3482: mol_type = unassigned DNA
atgaatgcatacctcaccaagcaacacagctgcagccgggggtccgatgggatggatgccgtcaggagtgcgcccaccctgatcagggatgcccactgtgcttgtggctggcagaggaactgtcaggggctcgggtacagttctcagaccatgccctcctcaggaccagggggcccagcttcaaacaggaccggggggtccagcttcaacaggaccttgtgggacagtgtgcggaaaagcccccacaagacgagcaccaagggcaaagggacttgtggggagcattgtacctgcccacatggttggttcagcccagcacaggccagtcctgctcctataattgtcaacacagatactttggacacaattccttatgtcaatgggacagaaattgaatatgaatttgaagaaattacactggagagggggaattctggcctgggattcagtattgctggggggacagataatccccacattggagatgaccctggcatatttattacgaagattataccaggaggtgctgcagcagaggatggcagactcagggtcaatgattgtatcttgcgggtgaatgaggttgatgtgtcagaggtttcccacagtaaagcggtggaagccctgaaggaagcagggtctatcgttcggctgtatgtgcgtagaagacgacctattttggagaccgttgtggaaatcaaactgttcaaaggccctaaaggtttaggcttcagtattgcaggaggtgtggggaaccaacacattcctggagacaacagcatttatgtaactaaaattatagatggaggagctgcacaaaaagatggaaggttgcaagtaggagatagactactaatggtaaacaactacagtttagaagaagtaacacacgaagaggcagtagcaatattaaagaacacatcagaggtagtttatttaaaagttggcaaacccactaccatttatatgactgatccttatggtccacctgatattactcactcttattctccaccaatggaaaaccatctactctctggcaacaatggcactttagaatataaaacctccctgccacccatctctccaggaaggtactcaccaattccaaagcacatgcttgttgacgacgactacaccaggcctccggaacctgtttacagcactgtgaacaaactatgtgataagcctgcttctcccaggcactattcccctgttgagtgtgacaaaagcttcctcctctcagctccctattcccactaccacctaggcctgctacctgactctgagatgaccagtcattcccaacatagcaccgcaactcgtcagccttcaatgactctccaacgggccgtctccctggaaggagagcctcgcaaggtagtcctgcacaaaggctccactggcctgggcttcaacattgtcggtggggaagatggagaaggtatttttgtgtccttcattctggctggtggaccagcagacctaagtggggagctccagagaggagaccagatcctatcggtgaatggcattgacctccgtggtgcatcccacgagcaggcagctgctgcactaaagggggctggacagacagtgacgattatagcacaatatcaacctgaagattacgctcgatttgaggccaaaatccatgacctacgagagcagatgatgaaccacagcatgagctccgggtccggatccctgcgaaccaatcagaaacgctccctctacgtcagagccatgttcgactacgacaagagcaaggacagtgggctgccaagtcaaggacttagttttaaatatggagatattctccacgttatcaatgcctctgatgatgagtggtggcaagccaggagagtcatgctggagggagacagtgaggagatgggggtcatccccagcaaaaggagggtggaaagaaaggaacgtgcccgattgaagacagtgaagtttaatgccaaacctggagtgattgattcgaaagggtcattcaatgacaagcgtaaaaagagcttcatcttttcacgaaaattcccattctacaagaacaaggagcagagtgagcaggaaaccagtgatcctgaacgaggacaagaagacctcattctttcctatgagcctgttacaaggcaggaaataaactacacccggccggtgattatcctggggcccatgaaggatcggatcaatgacgacttgatatctgaattccctgataaatttggctcctgtgtgcctcatactacgaggccaaagcgagactacgaggtggatggcagagactatcactttgtcatttccagagaacaaatggagaaagatatccaagagcacaagtttatagaagccggccagtacaatgacaatttatatggaaccagtgtgcagtctgtgagatttgtagcagaaagaggcaaacactgtatacttgatgtatcaggaaatgctatcaagcggttacaagttgcccagctctatcccattgccatcttcataaaacccaggtctctggaacctcttatggagatgaataagcgtctaacagaggaacaagccaagaaaacctatgatcgagcaattaagctagaacaagaatttggagaatattttacagctattgtccaaggagatactttagaagatatatataaccaatgcaagcttgttattgaagagcaatctgggcctttcatctggattccctcaaaggaaaagttataaattagctactgcgcctctgacaacgacagaagagcatttagaagaacaaaatatatataacatactacttggaggcttttatgtttttgttgcatttatgtttttgcagtcaatgtgaattcttacgaatgtacaacacaaactgtatgaagccatgaaggaaacagaggggccaaagggtgggacagaaaagacattgcagtatgaaggaaggctttggtttgctcaaagtgccaggtgtagggatgaacctctgacgggctttctgcccaagagatgagatgagagcctcctcaccccagcagatgtccagagctgatttagctgcagagctctctgtgtcttttgctttaaagaaaaattgccagcactcgaacctcatcagccttcccattacccacatctgtaattggtacactttgaattttataactatgcacatcttttgatttcttaacaagcaaatgaaagaaagaaggaaaaaagaaaggaatccctttggagatgacatactatcagggaaggataagtgtgtagttttttgactggcatctgcaaagacaagaatttcataaaatttgcaagtgtatggaggactaacctcactgacaggaggggattccacctgggattagctttatgattgttgattgcctattttgccatttataaactgaaagaaggcactaaagatgagaataatttatacaataaaaatatattaaatgtatagaaacaaatttctataggtt

SEQ ID NO: 8523 - DNA, 2789 bp, Homo sapiens
  source 1..2789: mol_type = unassigned DNA
aacaatgtgaacaagctatgcaacatgcatttattccggccagtcctgctcctataattgtcaacacagatactttggacacaattccttatgtcaatgggacagaaattgaatatgaatttgaagaaattacactggagagggggaattctggcctgggattcagtattgctggggggacagataatccccacattggagatgaccctggcatatttattacgaagattataccaggaggtgctgcagcagaggatggcagactcagggtcaatgattgtatcttgcgggtgaatgaggttgatgtgtcagaggtttcccacagtaaagcggtggaagccctgaaggaagcagggtctatcgttcggctgtatgtgcgtagaagacgacctattttggagaccgttgtggaaatcaaactgttcaaaggccctaaaggtttaggcttcagtattgcaggaggtgtggggaaccaacacattcctggagacaacagcatttatgtaactaaaattatagatggaggagctgcacaaaaagatggaaggttgcaagtaggagatagactactaatggtaaacaactacagtttagaagaagtaacacacgaagaggcagtagcaatattaaagaacacatcagaggtagtttatttaaaagttggcaaacccactaccatttatatgactgatccttatggtccacctgatattactcactcttattctccaccaatggaaaaccatctactctctggcaacaatggcactttagaatataaaacctccctgccacccatctctccaggaaggtactcaccaattccaaagcacatgcttgttgacgacgactacaccaggcctccggaacctgtttacagcactgtgaacaaactatgtgataagcctgcttctcccaggcactattcccctgttgagtgtgacaaaagcttcctcctctcagctccctattcccactaccacctaggcctgctacctgactctgagatgaccagtcattcccaacatagcaccgcaactcgtcagccttcaatgactctccaacgggccgtctccctggaaggagagcctcgcaaggtagtcctgcacaaaggctccactggcctgggcttcaacattgtcggtggggaagatggagaaggtatttttgtgtccttcattctggctggtggaccagcagacctaagtggggagctccagagaggagaccagatcctatcggtgaatggcattgacctccgtggtgcatcccacgagcaggcagctgctgcactaaagggggctggacagacagtgacgattatagcacaatatcaacctgaagattacgctcgatttgaggccaaaatccatgacctacgagagcagatgatgaaccacagcatgagctccgggtccggatccctgcgaaccaatcagaaacgctccctctacgtcagagccatgttcgactacgacaagagcaaggacagtgggctgccaagtcaaggacttagttttaaatatggagatattctccacgttatcaatgcctctgatgatgagtggtggcaagccaggagagtcatgctggagggagacagtgaggagatgggggtcatccccagcaaaaggagggtggaaagaaaggaacgtgcccgattgaagacagtgaagtttaatgccaaacctggagtgattgattcgaaaggggacatccccggattaggtgacgacggttatggaacaaagactctgagaggacaagaagacctcattctttcctatgagcctgttacaaggcaggaaataaactacacccggccggtgattatcctggggcccatgaaggatcggatcaatgacgacttgatatctgaattccctgataaatttggctcctgtgtgcctcatactacgaggccaaagcgagactacgaggtggatggcagagactatcactttgtcatttccagagaacaaatggagaaagatatccaagagcacaagtttatagaagccggccagtacaatgacaatttatatggaaccagtgtgcagtctgtgagatttgtagcagaaagaggcaaacactgtatacttgatgtatcaggaaatgctatcaagcggttacaagttgcccagctctatcccattgccatcttcataaaacccaggtctctggaacctcttatggagatgaataagcgtctaacagaggaacaagccaagaaaacctatgatcgagcaattaagctagaacaagaatttggagaatattttacagctattgtccaaggagatactttagaagatatatataaccaatgcaagcttgttattgaagagcaatctgggcctttcatctggattccctcaaaggaaaagttataaattagctactgcgcctctgacaacgacagaagagcatttagaagaacaaaatatatataacatactacttggaggcttttatgtttttgttgcatttatgtttttgcagtcaatgtgaattcttacgaatgtacaacacaaactgtatgaagccatgaaggaaacagaggggccaaagggtgggacagaaaagacattgcagtatgaaggaaggctttggtttgctcaaagtgccaggtgtagggatgaacctctgacgggctttctgcccaagagatgagatgagagcctcctcaccccagcagatgtccagagctgatttagctgcagagctctctgtgtcttttgctttaaagaaaaattgccagcactcgaacctcatcagccttcccatta

SEQ ID NO: 8524 - DNA, 5139 bp, Homo sapiens
  source 1..5139: mol_type = unassigned DNA
acagaagaaaaaaatgaaagggacagcaagctggattctgagttactgaggggaagactcagcctggatttcaaaactgaacactgaagtggtttgcaacagttacctggctcttggcctcaatccagctggatcaaactgagacctgaaaagagatattgactcctgtggcagtggaaagacccaagaatgccagtcaagaagacaggtgggccataagatactgaccgagctttatcattactggaagaatactgcaaaaaattaaggaaaccagaggagcagctgttgaaaaatgcggttaaaaaggtgatgggtatctttaagagcagcttattccaagctttgctagatatccaagaattttatgaggtgacattgctaaattctcaaaaaagttgtgagcagaagatagaagaagccaatcaagttttacagaaatgggagaagacatcccttcttgctccgtgccatgacagacttcaaaaatcttcagagcttacagattgcagtggatcaaaggaaaatgcttcatgtattgagcaaaataaagaaaatcagagttttgaaaatgaaactgatgagacgacaactcaaaaccaaggcagatgcccagcccagaattgttcagtggaagcccctgcttggatgcctgtccaccactgtactaagtatcgatatcaagatgaggacgctccacatgatcattccttacctcgactaacccacgaagtaagaggcccagaactcgtgcatgtatcagaaaagaacctctctcaaatagaaaatgtccatggatatgtcttgcagtctcatatttctcctctgaaggccagtcctgctcctataattgtcaacacagatactttggacacaattccttatgtcaatgggacagaaattgaatatgaatttgaagaaattacactggagagggggaattctggcctgggattcagtattgctggggggacagataatccccacattggagatgaccctggcatatttattacgaagattataccaggaggtgctgcagcagaggatggcagactcagggtcaatgattgtatcttgcgggtgaatgaggttgatgtgtcagaggtttcccacagtaaagcggtggaagccctgaaggaagcagggtctatcgttcggctgtatgtgcgtagaagacgacctattttggagaccgttgtggaaatcaaactgttcaaaggccctaaaggtttaggcttcagtattgcaggaggtgtggggaaccaacacattcctggagacaacagcatttatgtaactaaaattatagatggaggagctgcacaaaaagatggaaggttgcaagtaggagatagactactaatggtaaacaactacagtttagaagaagtaacacacgaagaggcagtagcaatattaaagaacacatcagaggtagtttatttaaaagttggcaaacccactaccatttatatgactgatccttatggtccacctgatattactcactcttattctccaccaatggaaaaccatctactctctggcaacaatggcactttagaatataaaacctccctgccacccatctctccaggaaggtactcaccaattccaaagcacatgcttgttgacgacgactacaccaggcctccggaacctgtttacagcactgtgaacaaactatgtgataagcctgcttctcccaggcactattcccctgttgagtgtgacaaaagcttcctcctctcagctccctattcccactaccacctaggcctgctacctgactctgagatgaccagtcattcccaacatagcaccgcaactcgtcagccttcaatgactctccaacgggccgtctccctggaaggagagcctcgcaaggtagtcctgcacaaaggctccactggcctgggcttcaacattgtcggtggggaagatggagaaggtatttttgtgtccttcattctggctggtggaccagcagacctaagtggggagctccagagaggagaccagatcctatcggtgaatggcattgacctccgtggtgcatcccacgagcaggcagctgctgcactaaagggggctggacagacagtgacgattatagcacaatatcaacctgaagattacgctcgatttgaggccaaaatccatgacctacgagagcagatgatgaaccacagcatgagctccgggtccggatccctgcgaaccaatcagaaacgctccctctacgtcagagccatgttcgactacgacaagagcaaggacagtgggctgccaagtcaaggacttagttttaaatatggagatattctccacgttatcaatgcctctgatgatgagtggtggcaagccaggagagtcatgctggagggagacagtgaggagatgggggtcatccccagcaaaaggagggtggaaagaaaggaacgtgcccgattgaagacagtgaagtttaatgccaaacctggagtgattgattcgaaagggtcattcaatgacaagcgtaaaaagagcttcatcttttcacgaaaattcccattctacaagaacaaggagcagagtgagcaggaaaccagtgatcctgaacgaggacaagaagacctcattctttcctatgagcctgttacaaggcaggaaataaactacacccggccggtgattatcctggggcccatgaaggatcggatcaatgacgacttgatatctgaattccctgataaatttggctcctgtgtgcctcatactacgaggccaaagcgagactacgaggtggatggcagagactatcactttgtcatttccagagaacaaatggagaaagatatccaagagcacaagtttatagaagccggccagtacaatgacaatttatatggaaccagtgtgcagtctgtgagatttgtagcagaaagaggcaaacactgtatacttgatgtatcaggaaatgctatcaagcggttacaagttgcccagctctatcccattgccatcttcataaaacccaggtctctggaacctcttatggagatgaataagcgtctaacagaggaacaagccaagaaaacctatgatcgagcaattaagctagaacaagaatttggagaatattttacagctattgtccaaggagatactttagaagatatatataaccaatgcaagcttgttattgaagagcaatctgggcctttcatctggattccctcaaaggaaaagttataaattagctactgcgcctctgacaacgacagaagagcatttagaagaacaaaatatatataacatactacttggaggcttttatgtttttgttgcatttatgtttttgcagtcaatgtgaattcttacgaatgtacaacacaaactgtatgaagccatgaaggaaacagaggggccaaagggtgggacagaaaagacattgcagtatgaaggaaggctttggtttgctcaaagtgccaggtgtagggatgaacctctgacgggctttctgcccaagagatgagatgagagcctcctcaccccagcagatgtccagagctgatttagctgcagagctctctgtgtcttttgctttaaagaaaaattgccagcactcgaacctcatcagccttcccattacccacatctgtaattggtacactttgaattttataactatgcacatcttttgatttcttaacaagcaaatgaaagaaagaaggaaaaaagaaaggaatccctttggagatgacatactatcagggaaggataagtgtgtagttttttgactggcatctgcaaagacaagaatttcataaaatttgcaagtgtatggaggactaacctcactgacaggaggggattccacctgggattagctttatgattgttgattgcctattttgccatttataaactgaaagaaggcactaaagatgagaataatttatacaataaaaatatattaaatgtatagaaacaaatttctataggttaaaaaagttttgtgaaatattttgtaaagactaatattgaaagactaaatgtatgcaacatcagcagatgatcaaattcaagacctgaaagttgcactctcccttttgttgccaatgatctgttaagagcatctgagttccttttaagtctgacaaagacttcttcctcacttacctcccttccacattagtgatacactctcatgcagcacatcccttaatgagttgccctcatggatatttttggaagacatttggttaatgcatttttttatgctgatggcttttcagagacaaacttatgcaaatgatctaaagggaagtttttgctttcctctagttaaataacctgagcctgccatgcaaatagttgaataactttgttcctagttactgacatacaattcttaaaggaccatttagcattttggccaacaatgagtaattaggattagtacctttttgttttacagagtaactgagagttttgtaacatccagagatggtactagagccaatgagagatctgttcctagatgcactatttctttgaggaagagagagaagagaagtgtctggttgggggtgagggggtgcagacttttttgtttctatgtacagagcaaagagatagagtcacaaggaaagacaattaatgactttgagctcaaccaactgaactgcctttcttggagctgcacctggaccaagtttattttttaacaattataataacgatgatttaaaaaaagaaacctcccaaagcctataaactgaactagaagagttggtttcccactttagagtggatggcgacatcagcattgcttttgcccatggtgtttggggagagacttttcagtgataataaccactctactctgggttctgtgcatgcccagactaagccccatcgccttatttctggggtacatccagacctggcagggattctgccacactgtgcagcaaaccagcatgtaggctgggtaggagagcaagagatagagccatcagagtgatggggcttcttcacagtaagaacatcggagcttagaatgagagtctctttccaaaaacaggcattgttcatcttacgctaaacatcattgtctgcctggctacagtcaccaaaacaaaacagaaa

SEQ ID NO: 8525 - DNA, 2789 bp, Homo sapiens; identical to SEQ ID NO: 8523
  source 1..2789: mol_type = unassigned DNA

SEQ ID NO: 8526 - DNA, 7890 bp, Homo sapiens
  source 1..7890: mol_type = unassigned DNA
atttacagtctgcgatgcgatcccattgtaaagtatttaataggataacaccggggctctccagaaatataagtaactcattggttaaatttcaattcttcacctttccccccctccttcctgagtgagctcattcccccctccttcttcttcttcttttttttttttaatccagtgatttaaaatgctagaaggaaaagcaactgaggtcttaactttcagacgctgaattctcatctaattgaaattactgggcataatgctatatatagccaatgaagagattttgagctctcactcagtgccttcaagacatgtcgttttgtagtcagagaaaacagagatcaatgcattttcaaactgacagagggaacggatgctctttagtagcacatgcccaggatcgtgtgtgtggggcttgcgctgtgctgagaagctgaataccggtccatatgctccttatttactgcaatgttctttgcatgttactgtgcactccggactaacgtgaagaagtatcgatatcaagatgaggacgctccacatgatcattccttacctcgactaacccacgaagtaagaggcccagaactcgtgcatgtatcagaaaagaacctctctcaaatagaaaatgtccatggatatgtcttgcagtctcatatttctcctctgaaggccagtcctgctcctataattgtcaacacagatactttggacacaattccttatgtcaatgggacagaaattgaatatgaatttgaagaaattacactggagagggggaattctggcctgggattcagtattgctggggggacagataatccccacattggagatgaccctggcatatttattacgaagattataccaggaggtgctgcagcagaggatggcagactcagggtcaatgattgtatcttgcgggtgaatgaggttgatgtgtcagaggtttcccacagtaaagcggtggaagccctgaaggaagcagggtctatcgttcggctgtatgtgcgtagaagacgacctattttggagaccgttgtggaaatcaaactgttcaaaggccctaaaggtttaggcttcagtattgcaggaggtgtggggaaccaacacattcctggagacaacagcatttatgtaactaaaattatagatggaggagctgcacaaaaagatggaaggttgcaagtaggagatagactactaatggtaaacaactacagtttagaagaagtaacacacgaagaggcagtagcaatattaaagaacacatcagaggtagtttatttaaaagttggcaaacccactaccatttatatgactgatccttatggtccacctgatattactcactcttattctccaccaatggaaaaccatctactctctggcaacaatggcactttagaatataaaacctccctgccacccatctctccaggaaggtactcaccaattccaaagcacatgcttgttgacgacgactacaccaggcctccggaacctgtttacagcactgtgaacaaactatgtgataagcctgcttctcccaggcactattcccctgttgagtgtgacaaaagcttcctcctctcagctccctattcccactaccacctaggcctgctacctgactctgagatgaccagtcattcccaacatagcaccgcaactcgtcagccttcaatgactctccaacgggccgtctccctggaaggagagcctcgcaaggtagtcctgcacaaaggctccactggcctgggcttcaacattgtcggtggggaagatggagaaggtatttttgtgtccttcattctggctggtggaccagcagacctaagtggggagctccagagaggagaccagatcctatcggtgaatggcattgacctccgtggtgcatcccacgagcaggcagctgctgcactaaagggggctggacagacagtgacgattatagcacaatatcaacctgaagattacgctcgatttgaggccaaaatccatgacctacgagagcagatgatgaaccacagcatgagctccgggtccggatccctgcgaaccaatcagaaacgctccctctacgtcagagccatgttcgactacgacaagagcaaggacagtgggctgccaagtcaaggacttagttttaaatatggagatattctccacgttatcaatgcctctgatgatgagtggtggcaagccaggagagtcatgctggagggagacagtgaggagatgggggtcatccccagcaaaaggagggtggaaagaaaggaacgtgcccgattgaagacagtgaagtttaatgccaaacctggagtgattgattcgaaagggtcattcaatgacaagcgtaaaaagagcttcatcttttcacgaaaattcccattctacaagaacaaggagcagagtgagcaggaaaccagtgatcctgaacgaggacaagaagacctcattctttcctatgagcctgttacaaggcaggaaataaactacacccggccggtgattatcctggggcccatgaaggatcggatcaatgacgacttgatatctgaattccctgataaatttggctcctgtgtgcctcatactacgaggccaaagcgagactacgaggtggatggcagagactatcactttgtcatttccagagaacaaatggagaaagatatccaagagcacaagtttatagaagccggccagtacaatgacaatttatatggaaccagtgtgcagtctgtgagatttgtagcagaaagaggcaaacactgtatacttgatgtatcaggaaatgctatcaagcggttacaagttgcccagctctatcccattgccatcttcataaaacccaggtctctggaacctcttatggagatgaataagcgtctaacagaggaacaagccaagaaaacctatgatcgagcaattaagctagaacaagaatttggagaatattttacagctattgtccaaggagatactttagaagatatatataaccaatgcaagcttgttattgaagagcaatctgggcctttcatctggattccctcaaaggaaaagttataaattagctactgcgcctctgacaacgacagaagagcatttagaagaacaaaatatatataacatactacttggaggcttttatgtttttgttgcatttatgtttttgcagtcaatgtgaattcttacgaatgtacaacacaaactgtatgaagccatgaaggaaacagaggggccaaagggtgggacagaaaagacattgcagtatgaaggaaggctttggtttgctcaaagtgccaggtgtagggatgaacctctgacgggctttctgcccaagagatgagatgagagcctcctcaccccagcagatgtccagagctgatttagctgcagagctctctgtgtcttttgctttaaagaaaaattgccagcactcgaacctcatcagccttcccattacccacatctgtaattggtacactttgaattttataactatgcacatcttttgatttcttaacaagcaaatgaaagaaagaaggaaaaaagaaaggaatccctttggagatgacatactatcagggaaggataagtgtgtagttttttgactggcatctgcaaagacaagaatttcataaaatttgcaagtgtatggaggactaacctcactgacaggaggggattccacctgggattagctttatgattgttgattgcctattttgccatttataaactgaaagaaggcactaaagatgagaataatttatacaataaaaatatattaaatgtatagaaacaaatttctataggttaaaaaagttttgtgaaatattttgtaaagactaatattgaaagactaaatgtatgcaacatcagcagatgatcaaattcaagacctgaaagttgcactctcccttttgttgccaatgatctgttaagagcatctgagttccttttaagtctgacaaagacttcttcctcacttacctcccttccacattagtgatacactctcatgcagcacatcccttaatgagttgccctcatggatatttttggaagacatttggttaatgcatttttttatgctgatggcttttcagagacaaacttatgcaaatgatctaaagggaagtttttgctttcctctagttaaataacctgagcctgccatgcaaatagttgaataactttgttcctagttactgacatacaattcttaaaggaccatttagcattttggccaacaatgagtaattaggattagtacctttttgttttacagagtaactgagagttttgtaacatccagagatggtactagagccaatgagagatctgttcctagatgcactatttctttgaggaagagagagaagagaagtgtctggttgggggtgagggggtgcagacttttttgtttctatgtacagagcaaagagatagagtcacaaggaaagacaattaatgactttgagctcaaccaactgaactgcctttcttggagctgcacctggaccaagtttattttttaacaattataataacgatgatttaaaaaaagaaacctcccaaagcctataaactgaactagaagagttggtttcccactttagagtggatggcgacatcagcattgcttttgcccatggtgtttggggagagacttttcagtgataataaccactctactctgggttctgtgcatgcccagactaagccccatcgccttatttctggggtacatccagacctggcagggattctgccacactgtgcagcaaaccagcatgtaggctgggtaggagagcaagagatagagccatcagagtgatggggcttcttcacagtaagaacatcggagcttagaatgagagtctctttccaaaaacaggcattgttcatcttacgctaaacatcattgtctgcctggctacagtcaccaaaacaaaacagaaatgcaaaattatgcatcttcccatagtcctgaggcttcctttgccaatggaagggctagcaatgcattctccctctcatgaaagttaaatttccagagacttccttagattgctcaaaatgttaaagatatgtccatgtctgcaattcgccagtttcaggtcaaggcctactttcatcaatattgctcccagaagttttctgacaccagaatgccattcctgatcccagctctatttttaggccaccacgataacttctttggtttctcaactgagcatgcaaccatttatttaaaagactgtcattaatgagtagatgttttcgcgggtcgtgtgatgtgctttccatttactagtgttgctgtggctaagtacaatcaaattgaaccaccaacccttggttttgtagtaatataactatttattttcctagtgtagatgctttcagattagaattggcatttgcactgatttttttatgtagatttatataaatatatagatacatatatatttgcttgaagaatcaccaagcaaattggtgagagggtcttttccaatagaatttacacctccatttgttgtgttgtcttgcacttcccaatgttgatgtctctatggctccaatgaactggtgtattttgcagcaaatctgatgacttgtatggaaatggcatgaaagttacccagattacatctggtgcaaatgcactcggagcctggggccagactggtgctaacactgcaaactttgtccagagctctctccaacctgaaggcttgctgggggtgcaatgtcaccttcacacatgctgggccctttcagaaaagtgccagatcgtgtaactggtgctatttttcatgctctggtacaatgtgtagcaccacgggggtctcagctttaccaaaatcaaaattccatttgtcagctaagtgcagaggcatttgttttttgctctcctcccacagaattgtcggccatttatttgcaggccttttgcgggatttcttggctatttatttgcaggccttttttcccagccccaaattcttgggttggctctgtctgcttaaagagcctgtcttcacaaagctgcactcgggtgcctctgtgcgctgtcttagatcctactgccggcccttcaggactccgagccaggaaagaactctccaacctctggctcgagactctactttttttctcattcttttccttactctcctcctccttctacttccgactaattccatctctttttttttttgttcctctccttttcctattcctccttcccaccatctctgagttgttgactttctcctataatccttctctattccctttctctttttgtccacctctcctttagtctctgtttctctgcccttcttattcctcttctgtcctttctcctctcctcaaatctctgatcatcttctcccgtacatccctgtattgatttttctgtcctctaaagggctcatggctgattcagacagcaagtccatgcactggactaatgacacaaatactttaggtcgccgtttcacctactcagcccagaaagtaaagctgagcgtgaggccctgacctggagcctgctccagcccgcctcccggagccagcctgcaccgttgccctggcagcgatgatgcatgtgctgtgggccctgccggcgcctgagtgcctctgcctgaacactgctcctaagcgagcccactcccagcactaccgcatggctctgaggacattttctttcaataaaggcagactctggccccaattattctgatagcaaacctcttcctcctcattgaagccatgccatcaccttggtttggagagagacatttttttcccattcataagctttctttttcccatttttatgtgaagccccctctgcttttcagctggtgattgctctggtgagactgaatggacttgctggtgaaatgaaatctcttctttcctgtcttggtcctgcctaaattcctacaaatatatttaagccaaggactcaggctaattcctaagttgatcacattaatttgttactcctagagggaaaaagatcaattcccttgaagcatgtggagtacctcctgtgacagctgacttgccaggggactccctacagaattctgtgatatacattttacttctgtgtatgtatggtatatatggtatgtataccatgtacacacgttacattgagtatgaatgactgtggttggaaacacacacacacactcaagtctgtaaatatccttcctcactgaaacctgtgctttggaaatcatttcttgtacagctgtgcagtttcttgtaacagctgaggacaaagctaagacaggcggacaatttagacaaagatcatctaaagagtatagtatctccctagcaactcatgaggacagacaaccaagtggcaaggttgactcccaatgggatggcagacttttcttctctcctttttgagtttgtgtttcctaagtgtttcttaacttctgagtgcaccaggctgtacccgttagatcctttcaatatgacagttttgtgcttctctctgacaggatgtttctccaccgagctgtagcacaggatgggagggaggtgggaatactccttgcctaggctggagtttacagagacactgcacagcttacactcctgttaagtgtaaatattcaacacttccattccatttgtgtaaaaaataaagcacacacgattataaaatcaagatgtatatttcatactcagtgtgtctgtgcatatttattgcgtttctagttgtcagcggtgggtggccccattgtaaaaatgcctgatagagtgtttataaacatgtcatggttttattataagatataaatattaaaacattttatactttatggcaaa

SEQ ID NO: 8527 - DNA, 1831 bp, Homo sapiens
  source 1..1831: mol_type = unassigned DNA
atatttatcaggatgagttacaaggaaatatatgtacccagtgagcgagaatgctgcatggtcaccccctgtgatgtaaaatatgagaatctaggaggggctgttttataattcatcaggttccgctagtgagttctgtcagagtcttagttataaaggcaagtgtgaaccggacagcagacaggagaacctggcaccaaggagacggagaagctgcctttggtgcctcctgcctcctccctgctttgttccaataattttgtgctcgattacgctcgatttgaggccaaaatccatgacctacgagagcagatgatgaaccacagcatgagctccgggtccggatccctgcgaaccaatcagaaacgctccctctacgtcagagccatgttcgactacgacaagagcaaggacagtgggctgccaagtcaaggacttagttttaaatatggagatattctccacgttatcaatgcctctgatgatgagtggtggcaagccaggagagtcatgctggagggagacagtgaggagatgggggtcatccccagcaaaaggagggtggaaagaaaggaacgtgcccgattgaagacagtgaagtttaatgccaaacctggagtgattgattcgaaaggggacatccccggattaggtgacgacggttatggaacaaagactctgaaacatgtttcttctaatgccagcgatagcgaaagtagctaccgaggacaagaagacctcattctttcctatgagcctgttacaaggcaggaaataaactacacccggccggtgattatcctggggcccatgaaggatcggatcaatgacgacttgatatctgaattccctgataaatttggctcctgtgtgcctcatactacgaggccaaagcgagactacgaggtggatggcagagactatcactttgtcatttccagagaacaaatggagaaagatatccaagagcacaagtttatagaagccggccagtacaatgacaatttatatggaaccagtgtgcagtctgtgagatttgtagcagaaagaggcaaacactgtatacttgatgtatcaggaaatgctatcaagcggttacaagttgcccagctctatcccattgccatcttcataaaacccaggtctctggaacctcttatggagatgaataagcgtctaacagaggaacaagccaagaaaacctatgatcgagcaattaagctagaacaagaatttggagaatattttacagctattgtccaaggagatactttagaagatatatataaccaatgcaagcttgttattgaagagcaatctgggcctttcatctggattccctcaaaggaaaagttataaattagctactgcgcctctgacaacgacagaagagcatttagaagaacaaaatatatataacatactacttggaggcttttatgtttttgttgcatttatgtttttgcagtcaatgtgaattcttacgaatgtacaacacaaactgtatgaagccatgaaggaaacagaggggccaaagggtgggacagaaaagacattgcagtatgaaggaaggctttggtttgctcaaagtgccaggtgtagggatgaacctctgacgggctttctgcccaagagatgagatgagagcctcctcaccccagcagatgtccagagctgatttagctgcagagctctctgtgtcttttgctttaaagaaaaattgccagcactcgaacctcatcagccttcccattacccacatctgtaattggtacactttgaattttataactatgcacatcttttgatttcttaacaagcaaatgaaaga

SEQ ID NO: 8528 - DNA, 3027 bp, Homo sapiens
  source 1..3027: mol_type = unassigned DNA
agtttgagtgttaccagctttcgctatgcaacggccaagtgtttctcgggctgagaattatcagcttttgtgggatactattgcttccttaaaacaatgtgaacaagctatgcaacatgcatttattccggtcaatgggacagaaattgaatatgaatttgaagaaattacactggagagggggaattctggcctgggattcagtattgctggggggacagataatccccacattggagatgaccctggcatatttattacgaagattataccaggaggtgctgcagcagaggatggcagactcagggtcaatgattgtatcttgcgggtgaatgaggttgatgtgtcagaggtttcccacagtaaagcggtggaagccctgaaggaagcagggtctatcgttcggctgtatgtgcgtagaagacgacctattttggagaccgttgtggaaatcaaactgttcaaaggccctaaaggtttaggcttcagtattgcaggaggtgtggggaaccaacacattcctggagacaacagcatttatgtaactaaaattatagatggaggagctgcacaaaaagatggaaggttgcaagtaggagatagactactaatggtaaacaactacagtttagaagaagtaacacacgaagaggcagtagcaatattaaagaacacatcagaggtagtttatttaaaagttggcaaacccactaccatttatatgactgatccttatggtccacctgatattactcactcttattctccaccaatggaaaaccatctactctctggcaacaatggcactttagaatataaaacctccctgccacccatctctccaggaaggtactcaccaattccaaagcacatgcttgttgacgacgactacaccagtcattcccaacatagcaccgcaactcgtcagccttcaatgactctccaacgggccgtctccctggaaggagagcctcgcaaggtagtcctgcacaaaggctccactggcctgggcttcaacattgtcggtggggaagatggagaaggtatttttgtgtccttcattctggctggtggaccagcagacctaagtggggagctccagagaggagaccagatcctatcggtgaatggcattgacctccgtggtgcatcccacgagcaggcagctgctgcactaaagggggctggacagacagtgacgattatagcacaatatcaacctgaagattacgctcgatttgaggccaaaatccatgacctacgagagcagatgatgaaccacagcatgagctccgggtccggatccctgcgaaccaatcagaaacgctccctctacgtcagagccatgttcgactacgacaagagcaaggacagtgggctgccaagtcaaggacttagttttaaatatggagatattctccacgttatcaatgcctctgatgatgagtggtggcaagccaggagagtcatgctggagggagacagtgaggagatgggggtcatccccagcaaaaggagggtggaaagaaaggaacgtgcccgattgaagacagtgaagtttaatgccaaacctggagtgattgattcgaaaggggacatccccggattaggtgacgacggttatggaacaaagactctgagaggacaagaagacctcattctttcctatgagcctgttacaaggcaggaaataaactacacccggccggtgattatcctggggcccatgaaggatcggatcaatgacgacttgatatctgaattccctgataaatttggctcctgtgtgcctcatactacgaggccaaagcgagactacgaggtggatggcagagactatcactttgtcatttccagagaacaaatggagaaagatatccaagagcacaagtttatagaagccggccagtacaatgacaatttatatggaaccagtgtgcagtctgtgagatttgtagcagaaagaggcaaacactgtatacttgatgtatcaggaaatgctatcaagcggttacaagttgcccagctctatcccattgccatcttcataaaacccaggtctctggaacctcttatggagatgaataagcgtctaacagaggaacaagccaagaaaacctatgatcgagcaattaagctagaacaagaatttggagaatattttacagctattgtccaaggagatactttagaagatatatataaccaatgcaagcttgttattgaagagcaatctgggcctttcatctggattccctcaaaggaaaagttataaattagctactgcgcctctgacaacgacagaagagcatttagaagaacaaaatatatataacatactacttggaggcttttatgtttttgttgcatttatgtttttgcagtcaatgtgaattcttacgaatgtacaacacaaactgtatgaagccatgaaggaaacagaggggccaaagggtgggacagaaaagacattgcagtatgaaggaaggctttggtttgctcaaagtgccaggtgtagggatgaacctctgacgggctttctgcccaagagatgagatgagagcctcctcaccccagcagatgtccagagctgatttagctgcagagctctctgtgtcttttgctttaaagaaaaattgccagcactcgaacctcatcagccttcccattacccacatctgtaattggtacactttgaattttataactatgcacatcttttgatttcttaacaagcaaatgaaagaaagaaggaaaaaagaaaggaatccctttggagatgacatactatcagggaaggataagtgtgtagttttttgactggcatctgcaaagacaagaatttcataaaatttgcaagtgtatggaggactaacctcactgacaggaggggattccacctgggattagctttatgattgttgattgcctattttgccatttataaactgaaagaaggcactaaagatgagaataatttatacaataaaaatatattaaatgtatagaaacaaatttctataggtt

SEQ ID NO: 8529 - DNA, 5927 bp, Homo sapiens
  source 1..5927: mol_type = unassigned DNA
atgtacccagtgagcgagaatgctgcatggtcaccccctgtgatgtaaaatatgagaatctaggaggggctgttttataattcatcaggttccgctagtgagttctgtcagagtcttagttataaaggcaagtgtgaaccggacagcagacaggagaacctggcaccaaggagacggagaagctgcctttggtgcctcctgcctcctccctgctttgttccaataattttgtgctcgattacgctcgatttgaggccaaaatccatgacctacgagagcagatgatgaaccacagcatgagctccgggtccggatccctgcgaaccaatcagaaacgctccctctacgtcagagccatgttcgactacgacaagagcaaggacagtgggctgccaagtcaaggacttagttttaaatatggagatattctccacgttatcaatgcctctgatgatgagtggtggcaagccaggagagtcatgctggagggagacagtgaggagatgggggtcatccccagcaaaaggagggtggaaagaaaggaacgtgcccgattgaagacagtgaagtttaatgccaaacctggagtgattgattcgaaaggggacatccccggattaggtgacgacggttatggaacaaagactctgagaggacaagaagacctcattctttcctatgagcctgttacaaggcaggaaataaactacacccggccggtgattatcctggggcccatgaaggatcggatcaatgacgacttgatatctgaattccctgataaatttggctcctgtgtgcctcatactacgaggccaaagcgagactacgaggtggatggcagagactatcactttgtcatttccagagaacaaatggagaaagatatccaagagcacaagtttatagaagccggccagtacaatgacaatttatatggaaccagtgtgcagtctgtgagatttgtagcagaaagaggcaaacactgtatacttgatgtatcaggaaatgctatcaagcggttacaagttgcccagctctatcccattgccatcttcataaaacccaggtctctggaacctcttatggagatgaataagcgtctaacagaggaacaagccaagaaaacctatgatcgagcaattaagctagaacaagaatttggagaatattttacagctattgtccaaggagatactttagaagatatatataaccaatgcaagcttgttattgaagagcaatctgggcctttcatctggattccctcaaaggaaaagttataaattagctactgcgcctctgacaacgacagaagagcatttagaagaacaaaatatatataacatactacttggaggcttttatgtttttgttgcatttatgtttttgcagtcaatgtgaattcttacgaatgtacaacacaaactgtatgaagccatgaaggaaacagaggggccaaagggtgggacagaaaagacattgcagtatgaaggaaggctttggtttgctcaaagtgccaggtgtagggatgaacctctgacgggctttctgcccaagagatgagatgagagcctcctcaccccagcagatgtccagagctgatttagctgcagagctctctgtgtcttttgctttaaagaaaaattgccagcactcgaacctcatcagccttcccattacccacatctgtaattggtacactttgaattttataactatgcacatcttttgatttcttaacaagcaaatgaaagaaagaaggaaaaaagaaaggaatccctttggagatgacatactatcagggaaggataagtgtgtagttttttgactggcatctgcaaagacaagaatttcataaaatttgcaagtgtatggaggactaacctcactgacaggaggggattccacctgggattagctttatgattgttgattgcctattttgccatttataaactgaaagaaggcactaaagatgagaataatttatacaataaaaatatattaaatgtatagaaacaaatttctataggttaaaaaagttttgtgaaatattttgtaaagactaatattgaaagactaaatgtatgcaacatcagcagatgatcaaattcaagacctgaaagttgcactctcccttttgttgccaatgatctgttaagagcatctgagttccttttaagtctgacaaagacttcttcctcacttacctcccttccacattagtgatacactctcatgcagcacatcccttaatgagttgccctcatggatatttttggaagacatttggttaatgcatttttttatgctgatggcttttcagagacaaacttatgcaaatgatctaaagggaagtttttgctttcctctagttaaataacctgagcctgccatgcaaatagttgaataactttgttcctagttactgacatacaattcttaaaggaccatttagcattttggccaacaatgagtaattaggattagtacctttttgttttacagagtaactgagagttttgtaacatccagagatggtactagagccaatgagagatctgttcctagatgcactatttctttgaggaagagagagaagagaagtgtctggttgggggtgagggggtgcagacttttttgtttctatgtacagagcaaagagatagagtcacaaggaaagacaattaatgactttgagctcaaccaactgaactgcctttcttggagctgcacctggaccaagtttattttttaacaattataataacgatgatttaaaaaaagaaacctcccaaagcctataaactgaactagaagagttggtttcccactttagagtggatggcgacatcagcattgcttttgcccatggtgtttggggagagacttttcagtgataataaccactctactctgggttctgtgcatgcccagactaagccccatcgccttatttctggggtacatccagacctggcagggattctgccacactgtgcagcaaaccagcatgtaggctgggtaggagagcaagagatagagccatcagagtgatggggcttcttcacagtaagaacatcggagcttagaatgagagtctctttccaaaaacaggcattgttcatcttacgctaaacatcattgtctgcctggctacagtcaccaaaacaaaacagaaatgcaaaattatgcatcttcccatagtcctgaggcttcctttgccaatggaagggctagcaatgcattctccctctcatgaaagttaaatttccagagacttccttagattgctcaaaatgttaaagatatgtccatgtctgcaattcgccagtttcaggtcaaggcctactttcatcaatattgctcccagaagttttctgacaccagaatgccattcctgatcccagctctatttttaggccaccacgataacttctttggtttctcaactgagcatgcaaccatttatttaaaagactgtcattaatgagtagatgttttcgcgggtcgtgtgatgtgctttccatttactagtgttgctgtggctaagtacaatcaaattgaaccaccaacccttggttttgtagtaatataactatttattttcctagtgtagatgctttcagattagaattggcatttgcactgatttttttatgtagatttatataaatatatagatacatatatatttgcttgaagaatcaccaagcaaattggtgagagggtcttttccaatagaatttacacctccatttgttgtgttgtcttgcacttcccaatgttgatgtctctatggctccaatgaactggtgtattttgcagcaaatctgatgacttgtatggaaatggcatgaaagttacccagattacatctggtgcaaatgcactcggagcctggggccagactggtgctaacactgcaaactttgtccagagctctctccaacctgaaggcttgctgggggtgcaatgtcaccttcacacatgctgggccctttcagaaaagtgccagatcgtgtaactggtgctatttttcatgctctggtacaatgtgtagcaccacgggggtctcagctttaccaaaatcaaaattccatttgtcagctaagtgcagaggcatttgttttttgctctcctcccacagaattgtcggccatttatttgcaggccttttgcgggatttcttggctatttatttgcaggccttttttcccagccccaaattcttgggttggctctgtctgcttaaagagcctgtcttcacaaagctgcactcgggtgcctctgtgcgctgtcttagatcctactgccggcccttcaggactccgagccaggaaagaactctccaacctctggctcgagactctactttttttctcattcttttccttactctcctcctccttctacttccgactaattccatctctttttttttttgttcctctccttttcctattcctccttcccaccatctctgagttgttgactttctcctataatccttctctattccctttctctttttgtccacctctcctttagtctctgtttctctgcccttcttattcctcttctgtcctttctcctctcctcaaatctctgatcatcttctcccgtacatccctgtattgatttttctgtcctctaaagggctcatggctgattcagacagcaagtccatgcactggactaatgacacaaatactttaggtcgccgtttcacctactcagcccagaaagtaaagctgagcgtgaggccctgacctggagcctgctccagcccgcctcccggagccagcctgcaccgttgccctggcagcgatgatgcatgtgctgtgggccctgccggcgcctgagtgcctctgcctgaacactgctcctaagcgagcccactcccagcactaccgcatggctctgaggacattttctttcaataaaggcagactctggccccaattattctgatagcaaacctcttcctcctcattgaagccatgccatcaccttggtttggagagagacatttttttcccattcataagctttctttttcccatttttatgtgaagccccctctgcttttcagctggtgattgctctggtgagactgaatggacttgctggtgaaatgaaatctcttctttcctgtcttggtcctgcctaaattcctacaaatatatttaagccaaggactcaggctaattcctaagttgatcacattaatttgttactcctagagggaaaaagatcaattcccttgaagcatgtggagtacctcctgtgacagctgacttgccaggggactccctacagaattctgtgatatacattttacttctgtgtatgtatggtatatatggtatgtataccatgtacacacgttacattgagtatgaatgactgtggttggaaacacacacacacactcaagtctgtaaatatccttcctcactgaaacctgtgctttggaaatcatttcttgtacagctgtgcagtttcttgtaacagctgaggacaaagctaagacaggcggacaatttagacaaagatcatctaaagagtatagtatctccctagcaactcatgaggacagacaaccaagtggcaaggttgactcccaatgggatggcagacttttcttctctcctttttgagtttgtgtttcctaagtgtttcttaacttctgagtgcaccaggctgtacccgttagatcctttcaatatgacagttttgtgcttctctctgacaggatgtttctccaccgagctgtagcacaggatgggagggaggtgggaatactccttgcctaggctggagtttacagagacactgcacagcttacactcctgttaagtgtaaatattcaacacttccattccatttgtgtaaaaaataaagcacacacgattataaaa

SEQ ID NO: 8530 - DNA, 2872 bp, Homo sapiens
  source 1..2872: mol_type = unassigned DNA
gtgtggggcttgcgctgtgctgagaagctgaataccggtccatatgctccttatttactgcaatgttctttgcatgttactgtgcactccggactaacgtgaagaagtatcgatatcaagatgaggacgctccacatgatcattccttacctcgactaacccacgaagtaagaggcccagaactcgtgcatgtatcagaaaagaacctctctcaaatagaaaatgtccatggatatgtcttgcagtctcatatttctcctctgaaggccagtcctgctcctataattgtcaacacagatactttggacacaattccttatgtcaatgggacagaaattgaatatgaatttgaagaaattacactggagagggggaattctggcctgggattcagtattgctggggggacagataatccccacattggagatgaccctggcatatttattacgaagattataccaggaggtgctgcagcagaggatggcagactcagggtcaatgattgtatcttgcgggtgaatgaggttgatgtgtcagaggtttcccacagtaaagcggtggaagccctgaaggaagcagggtctatcgttcggctgtatgtgcgtagaagacgacctattttggagaccgttgtggaaatcaaactgttcaaaggccctaaaggtttaggcttcagtattgcaggaggtgtggggaaccaacacattcctggagacaacagcatttatgtaactaaaattatagatggaggagctgcacaaaaagatggaaggttgcaagtaggagatagactactaatggtaaacaactacagtttagaagaagtaacacacgaagaggcagtagcaatattaaagaacacatcagaggtagtttatttaaaagttggcaaacccactaccatttatatgactgatccttatggtccacctgatattactcactcttattctccaccaatggaaaaccatctactctctggcaacaatggcactttagaatataaaacctccctgccacccatctctccaggaaggtactcaccaattccaaagcacatgcttgttgacgacgactacaccaggcctccggaacctgtttacagcactgtgaacaaactatgtgataagcctgcttctcccaggcactattcccctgttgagtgtgacaaaagcttcctcctctcagctccctattcccactaccacctaggcctgctacctgactctgagatgaccagtcattcccaacatagcaccgcaactcgtcagccttcaatgactctccaacgggccgtctccctggaaggagagcctcgcaaggtagtcctgcacaaaggctccactggcctgggcttcaacattgtcggtggggaagatggagaaggtatttttgtgtccttcattctggctggtggaccagcagacctaagtggggagctccagagaggagaccagatcctatcggtgaatggcattgacctccgtggtgcatcccacgagcaggcagctgctgcactaaagggggctggacagacagtgacgattatagcacaatatcaacctgaagattacgctcgatttgaggccaaaatccatgacctacgagagcagatgatgaaccacagcatgagctccgggtccggatccctgcgaaccaatcagaaacgctccctctacgtcagagccatgttcgactacgacaagagcaaggacagtgggctgccaagtcaaggacttagttttaaatatggagatattctccacgttatcaatgcctctgatgatgagtggtggcaagccaggagagtcatgctggagggagacagtgaggagatgggggtcatccccagcaaaaggagggtggaaagaaaggaacgtgcccgattgaagacagtgaagtttaatgccaaacctggagtgattgattcgaaaggggacatccccggattaggtgacgacggttatggaacaaagactctgaaacatgtttcttctaatgccagcgatagcgaaagtagctaccgaggacaagaagacctcattctttcctatgagcctgttacaaggcaggaaataaactacacccggccggtgattatcctggggcccatgaaggatcggatcaatgacgacttgatatctgaattccctgataaatttggctcctgtgtgcctcatactacgaggccaaagcgagactacgaggtggatggcagagactatcactttgtcatttccagagaacaaatggagaaagatatccaagagcacaagtttatagaagccggccagtacaatgacaatttatatggaaccagtgtgcagtctgtgagatttgtagcagaaagaggcaaacactgtatacttgatgtatcaggaaatgctatcaagcggttacaagttgcccagctctatcccattgccatcttcataaaacccaggtctctggaacctcttatggagatgaataagcgtctaacagaggaacaagccaagaaaacctatgatcgagcaattaagctagaacaagaatttggagaatattttacagctattgtccaaggagatactttagaagatatatataaccaatgcaagcttgttattgaagagcaatctgggcctttcatctggattccctcaaaggaaaagttataaattagctactgcgcctctgacaacgacagaagagcatttagaagaacaaaatatatataacatactacttggaggcttttatgtttttgttgcatttatgtttttgcagtcaatgtgaattcttacgaatgtacaacacaaactgtatgaagccatgaaggaaacagaggggccaaagggtgggacagaaaagacattgcagtatgaag

SEQ ID NO: 8531 - DNA, 559 bp, Homo sapiens
  source 1..559: mol_type = unassigned DNA
attaacactacgctgtgaataactttgtttactctcttccacattttaaaagaagataccagactaccacttcagagttggaatttcaaacaccagcagctagctgggaggcaggattgaatttggagataagaattcttcctggcgtccttcagcagcctccccaggcaggttttcacctcttcgacttttccaggactaagcctttttaactgagaagagaaagaaaaagagattacgctcgatttgaggccaaaatccatgacctacgagagcagatgatgaaccacagcatgagctccgggtccggatccctgcgaaccaatcagaaacgctccctctacgtcagagccatgttcgactacgacaagagcaaggacagtgggctgccaagtcaaggacttagttttaaatatggagatattctccacgttatcaatgcctctgatgatgagtggtggcaagccaggagagtcatgctggagggagacagtgaggagatgggggtcatccccagcaaaaggagggtggaaagaaaggaacgtgcccgattgaagac

SEQ ID NO: 8532 - DNA, 2891 bp, Homo sapiens
  source 1..2891: mol_type = unassigned DNA
aatccagtgatttaaaatgctagaaggaaaagcaactgaggtcttaactttcagacgctgaattctcatctaattgaaattactgggcataatgctatatatagccaatgaagagattttgagctctcactcagtgccttcaagacatgtcgttttgtagtcagagaaaacagagatcaatgcattttcaaactgacagagggaacggatgctctttagtagcacatgcccaggatcgtgtgtgtggggcttgcgctgtgctgagaagctgaataccggtccatatgctccttatttactgcaatgttctttgcatgttactgtgcactccggactaacgtgaagaagtatcgatatcaagatgaggacgctccacatgatcattccttacctcgactaacccacgaagtaagaggcccagaactcgtgcatgtatcagaaaagaacctctctcaaatagaaaatgtccatggatatgtcttgcagtctcatatttctcctctgaaggccagtcctgctcctataattgtcaacacagatactttggacacaattccttatgtcaatgggacagaaattgaatatgaatttgaagaaattacactggagagggggaattctggcctgggattcagtattgctggggggacagataatccccacattggagatgaccctggcatatttattacgaagattataccaggaggtgctgcagcagaggatggcagactcagggtcaatgattgtatcttgcgggtgaatgaggttgatgtgtcagaggtttcccacagtaaagcggtggaagccctgaaggaagcagggtctatcgttcggctgtatgtgcgtagaagacgacctattttggagaccgttgtggaaatcaaactgttcaaaggccctaaaggtttaggcttcagtattgcaggaggtgtggggaaccaacacattcctggagacaacagcatttatgtaactaaaattatagatggaggagctgcacaaaaagatggaaggttgcaagtaggagatagactactaatggtaaacaactacagtttagaagaagtaacacacgaagaggcagtagcaatattaaagaacacatcagaggtagtttatttaaaagttggcaaacccactaccatttatatgactgatccttatggtccacctgatattactcactcttattctccaccaatggaaaaccatctactctctggcaacaatggcactttagaatataaaacctccctgccacccatctctccaggaaggtactcaccaattccaaagcacatgcttgttgacgacgactacaccaggcctccggaacctgtttacagcactgtgaacaaactatgtgataagcctgcttctcccaggcactattcccctgttgagtgtgacaaaagcttcctcctctcagctccctattcccactaccacctaggcctgctacctgactctgagatgaccagtcattcccaacatagcaccgcaactcgtcagccttcaatgactctccaacgggccgtctccctggaaggagagcctcgcaaggtagtcctgcacaaaggctccactggcctgggcttcaacattgtcggtggggaagatggagaaggtatttttgtgtccttcattctggctggtggaccagcagacctaagtggggagctccagagaggagaccagatcctatcggtgaatggcattgacctccgtggtgcatcccacgagcaggcagctgctgcactaaagggggctggacagacagtgacgattatagcacaatatcaacctgaagattacgctcgatttgaggccaaaatccatgacctacgagagcagatgatgaaccacagcatgagctccgggtccggatccctgcgaaccaatcagaaacgctccctctacgtcagagccatgttcgactacgacaagagcaaggacagtgggctgccaagtcaaggacttagttttaaatatggagatattctccacgttatcaatgcctctgatgatgagtggtggcaagccaggagagtcatgctggagggagacagtgaggagatgggggtcatccccagcaaaaggagggtggaaagaaaggaacgtgcccgattgaagacagtgaagtttaatgccaaacctggagtgattgattcgaaaggggacatccccggattaggtgacgacggttatggaacaaagactctgagaggacaagaagacctcattctttcctatgagcctgttacaaggcaggaaataaactacacccggccggtgattatcctggggcccatgaaggatcggatcaatgacgacttgatatctgaattccctgataaatttggctcctgtgtgcctcatactacgaggccaaagcgagactacgaggtggatggcagagactatcactttgtcatttccagagaacaaatggagaaagatatccaagagcacaagtttatagaagccggccagtacaatgacaatttatatggaaccagtgtgcagtctgtgagatttgtagcagaaagaggcaaacactgtatacttgatgtatcaggaaatgctatcaagcggttacaagttgcccagctctatcccattgccatcttcataaaacccaggtctctggaacctcttatggagatgaataagcgtctaacagaggaacaagccaagaaaacctatgatcgagcaattaagctagaacaagaatttggagaatattttacagctattgtccaaggagatactttagaagatatatataaccaatgcaagcttgttattgaagagcaatctgggcctttcatctggattccctcaaaggaaaagttataaattagctactgcgcctctgacaacgacag

SEQ ID NO: 8533 - DNA, 2831 bp, Homo sapiens
  source 1..2831: mol_type = unassigned DNA
aacaatgtgaacaagctatgcaacatgcatttattccggccagtcctgctcctataattgtcaacacagatactttggacacaattccttatgtcaatgggacagaaattgaatatgaatttgaagaaattacactggagagggggaattctggcctgggattcagtattgctggggggacagataatccccacattggagatgaccctggcatatttattacgaagattataccaggaggtgctgcagcagaggatggcagactcagggtcaatgattgtatcttgcgggtgaatgaggttgatgtgtcagaggtttcccacagtaaagcggtggaagccctgaaggaagcagggtctatcgttcggctgtatgtgcgtagaagacgacctattttggagaccgttgtggaaatcaaactgttcaaaggccctaaaggtttaggcttcagtattgcaggaggtgtggggaaccaacacattcctggagacaacagcatttatgtaactaaaattatagatggaggagctgcacaaaaagatggaaggttgcaagtaggagatagactactaatggtaaacaactacagtttagaagaagtaacacacgaagaggcagtagcaatattaaagaacacatcagaggtagtttatttaaaagttggcaaacccactaccatttatatgactgatccttatggtccacctgatattactcactcttattctccaccaatggaaaaccatctactctctggcaacaatggcactttagaatataaaacctccctgccacccatctctccaggaaggtactcaccaattccaaagcacatgcttgttgacgacgactacaccaggcctccggaacctgtttacagcactgtgaacaaactatgtgataagcctgcttctcccaggcactattcccctgttgagtgtgacaaaagcttcctcctctcagctccctattcccactaccacctaggcctgctacctgactctgagatgaccagtcattcccaacatagcaccgcaactcgtcagccttcaatgactctccaacgggccgtctccctggaaggagagcctcgcaaggtagtcctgcacaaaggctccactggcctgggcttcaacattgtcggtggggaagatggagaaggtatttttgtgtccttcattctggctggtggaccagcagacctaagtggggagctccagagaggagaccagatcctatcggtgaatggcattgacctccgtggtgcatcccacgagcaggcagctgctgcactaaagggggctggacagacagtgacgattatagcacaatatcaacctgaagattacgctcgatttgaggccaaaatccatgacctacgagagcagatgatgaaccacagcatgagctccgggtccggatccctgcgaaccaatcagaaacgctccctctacgtcagagccatgttcgactacgacaagagcaaggacagtgggctgccaagtcaaggacttagttttaaatatggagatattctccacgttatcaatgcctctgatgatgagtggtggcaagccaggagagtcatgctggagggagacagtgaggagatgggggtcatccccagcaaaaggagggtggaaagaaaggaacgtgcccgattgaagacagtgaagtttaatgccaaacctggagtgattgattcgaaaggggacatccccggattaggtgacgacggttatggaacaaagactctgaaacatgtttcttctaatgccagcgatagcgaaagtagctaccgaggacaagaagacctcattctttcctatgagcctgttacaaggcaggaaataaactacacccggccggtgattatcctggggcccatgaaggatcggatcaatgacgacttgatatctgaattccctgataaatttggctcctgtgtgcctcatactacgaggccaaagcgagactacgaggtggatggcagagactatcactttgtcatttccagagaacaaatggagaaagatatccaagagcacaagtttatagaagccggccagtacaatgacaatttatatggaaccagtgtgcagtctgtgagatttgtagcagaaagaggcaaacactgtatacttgatgtatcaggaaatgctatcaagcggttacaagttgcccagctctatcccattgccatcttcataaaacccaggtctctggaacctcttatggagatgaataagcgtctaacagaggaacaagccaagaaaacctatgatcgagcaattaagctagaacaagaatttggagaatattttacagctattgtccaaggagatactttagaagatatatataaccaatgcaagcttgttattgaagagcaatctgggcctttcatctggattccctcaaaggaaaagttataaattagctactgcgcctctgacaacgacagaagagcatttagaagaacaaaatatatataacatactacttggaggcttttatgtttttgttgcatttatgtttttgcagtcaatgtgaattcttacgaatgtacaacacaaactgtatgaagccatgaaggaaacagaggggccaaagggtgggacagaaaagacattgcagtatgaaggaaggctttggtttgctcaaagtgccaggtgtagggatgaacctctgacgggctttctgcccaagagatgagatgagagcctcctcaccccagcagatgtccagagctgatttagctgcagagctctctgtgtcttttgctttaaagaaaaattgccagcactcgaacctcatcagccttcccatta

SEQ ID NO: 8534 - DNA, 3680 bp, Homo sapiens
  source 1..3680: mol_type = unassigned DNA
atgggtatctttaagagcagcttattccaagctttgctagatatccaagaattttatgaggtgacattgctaaattctcaaaaaagttgtgagcagaagatagaagaagccaatcaagttttacagaaatgggagaagacatcccttcttgctccgtgccatgacagacttcaaaaatcttcagagcttacagattgcagtggatcaaaggaaaatgcttcatgtattgagcaaaataaagaaaatcagagttttgaaaatgaaactgatgagacgacaactcaaaaccaaggcagatgcccagcccagaattgttcagtggaagcccctgcttggatgcctgtccaccactgtactaagtatcgatatcaagatgaggacgctccacatgatcattccttacctcgactaacccacgaagtaagaggcccagaactcgtgcatgtatcagaaaagaacctctctcaaatagaaaatgtccatggatatgtcttgcagtctcatatttctcctctgaaggccagtcctgctcctataattgtcaacacagatactttggacacaattccttatgtcaatgggacagaaattgaatatgaatttgaagaaattacactggagagggggaattctggcctgggattcagtattgctggggggacagataatccccacattggagatgaccctggcatatttattacgaagattataccaggaggtgctgcagcagaggatggcagactcagggtcaatgattgtatcttgcgggtgaatgaggttgatgtgtcagaggtttcccacagtaaagcggtggaagccctgaaggaagcagggtctatcgttcggctgtatgtgcgtagaagacgacctattttggagaccgttgtggaaatcaaactgttcaaaggccctaaaggtttaggcttcagtattgcaggaggtgtggggaaccaacacattcctggagacaacagcatttatgtaactaaaattatagatggaggagctgcacaaaaagatggaaggttgcaagtaggagatagactactaatggtaaacaactacagtttagaagaagtaacacacgaagaggcagtagcaatattaaagaacacatcagaggtagtttatttaaaagttggcaaacccactaccatttatatgactgatccttatggtccacctgatattactcactcttattctccaccaatggaaaaccatctactctctggcaacaatggcactttagaatataaaacctccctgccacccatctctccaggaaggtactcaccaattccaaagcacatgcttgttgacgacgactacaccaggcctccggaacctgtttacagcactgtgaacaaactatgtgataagcctgcttctcccaggcactattcccctgttgagtgtgacaaaagcttcctcctctcagctccctattcccactaccacctaggcctgctacctgactctgagatgaccagtcattcccaacatagcaccgcaactcgtcagccttcaatgactctccaacgggccgtctccctggaaggagagcctcgcaaggtagtcctgcacaaaggctccactggcctgggcttcaacattgtcggtggggaagatggagaaggtatttttgtgtccttcattctggctggtggaccagcagacctaagtggggagctccagagaggagaccagatcctatcggtgaatggcattgacctccgtggtgcatcccacgagcaggcagctgctgcactaaagggggctggacagacagtgacgattatagcacaatatcaacctgaagattacgctcgatttgaggccaaaatccatgacctacgagagcagatgatgaaccacagcatgagctccgggtccggatccctgcgaaccaatcagaaacgctccctctacgtcagagccatgttcgactacgacaagagcaaggacagtgggctgccaagtcaaggacttagttttaaatatggagatattctccacgttatcaatgcctctgatgatgagtggtggcaagccaggagagtcatgctggagggagacagtgaggagatgggggtcatccccagcaaaaggagggtggaaagaaaggaacgtgcccgattgaagacagtgaagtttaatgccaaacctggagtgattgattcgaaagggtcattcaatgacaagcgtaaaaagagcttcatcttttcacgaaaattcccattctacaagaacaaggagcagagtgagcaggaaaccagtgatcctgaacgaggacaagaagacctcattctttcctatgagcctgttacaaggcaggaaataaactacacccggccggtgattatcctggggcccatgaaggatcggatcaatgacgacttgatatctgaattccctgataaatttggctcctgtgtgcctcatactacgaggccaaagcgagactacgaggtggatggcagagactatcactttgtcatttccagagaacaaatggagaaagatatccaagagcacaagtttatagaagccggccagtacaatgacaatttatatggaaccagtgtgcagtctgtgagatttgtagcagaaagaggcaaacactgtatacttgatgtatcaggaaatgctatcaagcggttacaagttgcccagctctatcccattgccatcttcataaaacccaggtctctggaacctcttatggagatgaataagcgtctaacagaggaacaagccaagaaaacctatgatcgagcaattaagctagaacaagaatttggagaatattttacagctattgtccaaggagatactttagaagatatatataaccaatgcaagcttgttattgaagagcaatctgggcctttcatctggattccctcaaaggaaaagttataaattagctactgcgcctctgacaacgacagaagagcatttagaagaacaaaatatatataacatactacttggaggcttttatgtttttgttgcatttatgtttttgcagtcaatgtgaattcttacgaatgtacaacacaaactgtatgaagccatgaaggaaacagaggggccaaagggtgggacagaaaagacattgcagtatgaaggaaggctttggtttgctcaaagtgccaggtgtagggatgaacctctgacgggctttctgcccaagagatgagatgagagcctcctcaccccagcagatgtccagagctgatttagctgcagagctctctgtgtcttttgctttaaagaaaaattgccagcactcgaacctcatcagccttcccattacccacatctgtaattggtacactttgaattttataactatgcacatcttttgatttcttaacaagcaaatgaaagaaagaaggaaaaaagaaaggaatccctttggagatgacatactatcagggaaggataagtgtgtagttttttgactggcatctgcaaagacaagaatttcataaaatttgcaagtgtatggaggactaacctcactgacaggaggggattccacctgggattagctttatgattgttgattgcctattttgccatttataaactgaaagaaggcactaaagatgagaataatttatacaataaaaatatattaaatgtatagaaacaaatttctataggtt

SEQ ID NO: 8535 - DNA, 2928 bp, Homo sapiens
  source 1..2928: mol_type = unassigned DNA
tttggttttatagtctctgttcattttcaaagttacttaaatatccaagaattttatgaggtgacattgctaaattctcaaaaaagttgtgagcagaagatagaagaagccaatcaagttttacagaaatgggagaagacatcccttcttgctccgtgccatgacagacttcaaaaatcttcagagcttacagattgcagtggatcaaaggaaaatgcttcatgtattgagcaaaataaagaaaatcagagttttgaaaatgaaactgatgagacgacaactcaaaaccaaggcagatgcccagcccagaattgttcagtggaagcccctgcttggatgcctgtccaccactgtactaagtatcgatatcaagatgaggacgctccacatgatcattccttacctcgactaacccacgaagtaagaggcccagaactcgtgcatgtatcagaaaagaacctctctcaaatagaaaatgtccatggatatgtcttgcagtctcatatttctcctctgaaggccagtcctgctcctataattgtcaacacagatactttggacacaattccttatgtcaatgggacagaaattgaatatgaatttgaagaaattacactggagagggggaattctggcctgggattcagtattgctggggggacagataatccccacattggagatgaccctggcatatttattacgaagattataccaggaggtgctgcagcagaggatggcagactcagggtcaatgattgtatcttgcgggtgaatgaggttgatgtgtcagaggtttcccacagtaaagcggtggaagccctgaaggaagcagggtctatcgttcggctgtatgtgcgtagaagacgacctattttggagaccgttgtggaaatcaaactgttcaaaggccctaaaggtttaggcttcagtattgcaggaggtgtggggaaccaacacattcctggagacaacagcatttatgtaactaaaattatagatggaggagctgcacaaaaagatggaaggttgcaagtaggagatagactactaatggtaaacaactacagtttagaagaagtaacacacgaagaggcagtagcaatattaaagaacacatcagaggtagtttatttaaaagttggcaaacccactaccatttatatgactgatccttatggtccacctgatattactcactcttattctccaccaatggaaaaccatctactctctggcaacaatggcactttagaatataaaacctccctgccacccatctctccaggaaggtactcaccaattccaaagcacatgcttgttgacgacgactacaccaggcctccggaacctgtttacagcactgtgaacaaactatgtgataagcctgcttctcccaggcactattcccctgttgagtgtgacaaaagcttcctcctctcagctccctattcccactaccacctaggcctgctacctgactctgagatgaccagtcattcccaacatagcaccgcaactcgtcagccttcaatgactctccaacgggccgtctccctggaaggagagcctcgcaaggtagtcctgcacaaaggctccactggcctgggcttcaacattgtcggtggggaagatggagaaggtatttttgtgtccttcattctggctggtggaccagcagacctaagtggggagctccagagaggagaccagatcctatcggtgaatggcattgacctccgtggtgcatcccacgagcaggcagctgctgcactaaagggggctggacagacagtgacgattatagcacaatatcaacctgaagattacgctcgatttgaggccaaaatccatgacctacgagagcagatgatgaaccacagcatgagctccgggtccggatccctgcgaaccaatcagaaacgctccctctacgtcagagccatgttcgactacgacaagagcaaggacagtgggctgccaagtcaaggacttagttttaaatatggagatattctccacgttatcaatgcctctgatgatgagtggtggcaagccaggagagtcatgctggagggagacagtgaggagatgggggtcatccccagcaaaaggagggtggaaagaaaggaacgtgcccgattgaagacagtgaagtttaatgccaaacctggagtgattgattcgaaagggtcattcaatgacaagcgtaaaaagagcttcatcttttcacgaaaattcccattctacaagaacaaggagcagagtgagcaggaaaccagtgatcctgaacgaggacaagaagacctcattctttcctatgagcctgttacaaggcaggaaataaactacacccggccggtgattatcctggggcccatgaaggatcggatcaatgacgacttgatatctgaattccctgataaatttggctcctgtgtgcctcatactacgaggccaaagcgagactacgaggtggatggcagagactatcactttgtcatttccagagaacaaatggagaaagatatccaagagcacaagtttatagaagccggccagtacaatgacaatttatatggaaccagtgtgcagtctgtgagatttgtagcagaaagaggcaaacactgtatacttgatgtatcaggaaatgctatcaagcggttacaagttgcccagctctatcccattgccatcttcataaaacccaggtctctggaacctcttatggagatgaataagcgtctaacagaggaacaagccaagaaaacctatgatcgagcaattaagctagaacaagaatttggagaatattttacagctattgtccaaggagatactttagaagatatatataaccaatgcaagcttgttattgaagagcaatctgggcctttcatctggattccctcaaaggaaaagttataa

SEQ ID NO: 8536 - DNA, 6109 bp, Homo sapiens
  source 1..6109: mol_type = unassigned DNA
cagagcagaagcggtcctcacagcacccattctctgcttgagctcccgcttcttctttgccgctgggcctcggcccagaagccacgacgggcgacacggagccgccagtgctggagggggagccgtgggtgcggggcagcgtgggggccgaggccccgggacgcccgcccggccccaggccccgctcagcccgggcgcccccacgggtgccccccccttcttggtccgagcagtgtgagtgtgccagggagcccggcggcggcggcggcggtggtggcggcggtggcggcggcgtggaatccggcgtgggctggggggtccgagccgcggggggcagtgccatgcacaagcaccagcactgctgtaagtgccctgagtgctatgaggtgacccgcctggccgccctgcggcgcctcgagcctccgggctacggcgactggcaagtccccgacccttacgggccaggtgggggcaacggcgccagcgcgggttatgggggctacagctcgcagaccttgccctcgcaggcgggggccacccccacccctcgcaccaaggccaagctcatccccaccggccgggatgtggggccggtgcctcctaagccagtcccgggcaagagcacccccaaactcaacggcagcggccccagctggtggccagagtgcacctgtaccaaccgggactggtatgagcaggccaggcctgcacccctcctagtgaaccctgagacactgaagcacagcctctcggtgaatggcagtgatggcatgttcaaatatgaggaaatcgtacttgagaggggcaactctggcctgggcttcagtatcgcaggtggcatcgacaatccccatgtccctgatgaccctggcatctttattaccaagattatccctggtggagcagctgccatggatgggaggctgggggtgaatgactgtgtgctgcgggtgaatgaggtggacgtgtcggaggtggtacacagccgggcggtggaggcgctgaaggaggcaggccctgtggtgcgattggtggtgcggaggcgacagcctccacccgagaccatcatggaggtcaacctgctcaaagggcccaaaggcctgggtttcagcattgctgggggtattggcaaccagcacatcccaggagacaacagcatctacatcaccaagatcattgaggggggtgctgctcagaaggatggacgcctacagattggggaccggctgctggcggtgaacaacaccaatctgcaggatgtgaggcacgaggaagctgtggcctcactgaagaacacatctgatatggtgtatttgaaggtggccaagccaggcagcctccacctcaacgacatgtacgctccccctgactacgccagcacttttactgccttggctgacaaccacataagccataattccagcctgggttatctcggggctgtggagagcaaggtcagctaccctgctcctcctcaggttccccccacccgctactctcctattcccaggcacatgctggctgaggaggacttcaccagagagcctcgcaagatcatcctgcacaaaggctccacaggcctgggcttcaacatcgtaggaggagaggatggagaaggcatttttgtctccttcatcctggcaggaggcccagctgacctgagtggggagctgcgcaggggagaccggatcttatcggtgaatggagtgaatctgaggaatgcaactcatgagcaggctgcagctgctctgaaacgggccggccagtcagtcaccattgtggcccagtacagacctgaagaatacagtcgctttgaatcgaagatacatgacttacgagaacaaatgatgaacagcagcatgagctctgggtctgggtccctccgaacaagtgaaaagaggtccttgtatgtcagggccctgtttgattatgatcggactcgggacagctgcctgccaagccaggggctcagcttctcttatggtgacattctgcatgtcattaatgcctctgatgatgagtggtggcaggcaaggctggtgaccccacacggagaaagtgagcagatcggtgtgatccccagtaagaagagggtggaaaagaaagaaagagctcgattgaaaactgtgaagttccatgccaggacggggatgattgagtctaacagggacttcccggggttaagtgacgattattatggagcaaagaacctgaagggagtgacatccaacaccagtgacagcgaaagcagttccaaaggacaagaggatgctattttgtcatatgagccagtgacacggcaagaaattcactatgcaaggcctgtgatcatcctgggcccaatgaaggaccgagtcaatgatgacctgatctccgaatttccacataaatttggatcctgtgtgccacatactacccggcctcgacgtgataatgaggtggatggacaagactaccactttgtggtgtcccgagaacaaatggagaaagatattcaggacaacaagttcatcgaggcgggccaatttaatgataacctctatgggaccagcatccagtcagtgcgggcagttgcagagaggggcaagcactgcatcttagatgtttccggcaatgctatcaagagactgcagcaagcacaactttaccccattgccattttcatcaagcccaagtccattgaagcccttatggaaatgaaccgaaggcagacatatgaacaagcaaataagatctatgacaaagccatgaaactggagcaggaatttggagagtactttacagccattgtacagggtgactcactggaagagatttataacaaaatcaaacaaatcattgaggaccagtctgggcactacatttgggtcccatcccctgaaaaactctgaagaatcccctccaaccattctcttgtgaacagaagaaatcaagtccctcttccctcctccctcttcattcctgtccccatggggagaacaaatgctactgttcttgtccccttttttagatatgtcaaaaaaaattaagttttctagtcctgttctttttttttttttaagtttttgtttgtttcagtttattttttgggatgatgccatctcattcatcatgtgactgtgcccattcctgcatggacctttcccaagcgctagcacaggtgcaaaatccatcagagccattgttttcataaaaaccaagcagaagtgaagagaaaagaggaggactgatggaaagacagactctggacagctgcacggcttgtgaagtgagctaaatgcaccacatgatgagatgctcctgggcatttctccctatctgtactgctgtcttgcagctctgaacggtgcaacgtaatggcgacagaaagtatcttatttatatatagatatatatatgtaatttatataaaatatatagaaattattatatatatatattatacactctcatataatatatatatattcacacacatttgggttagaaaatctatggagacttcatcaatggtactatgttattagagaaatgctttaattttcatattccaatcagatggcatcttctatcccagctggttgggaagggattgaagatggtagcaagtgctgcactaagggcactcgcatttggtcattctcttgagagctaggaggggtcagcctgaggccggagaggaagggcttttgcctggggtgagagggtgagagacttgacctgaaagcagctgctgcccctgaggtgcagccagagtcctgtgtgcggacagagagaatggctaatgatgctccgcgtggaattgcctattgttttatgccacctgatgtgtctgcatgagaggtttcctttttgttcctttttaagctgctgttaaaccaaaaccatgttgtgctactgtgtcagccttttcattattgcaaattttacttttactatttaagtgaatgcatagaatccaatttgccaaggttctaaaggcttatgaggtcctgaaggagccaggccttgtgatggagtaggtgacacaggcctggttgtcctgtcagcagaagggaaagcaggggctgggctgagaggaggacacggagggctctgctgaggttccttcctgggttccaccaacagggacagggagtcacttgccttccagttctgtgctgggatggcgggacagcacttggcttgcttggccagctgcgtcatgagtttgatttggtttttttttttttgcagctgcttcatatgctctgctccagcccctccccaacagctggtagcttatggtttcttcaagaggaaagtagactttatgctgtacatttgagctgtagagctaagattcgcttactggtgagctgtgaaaccttgttgctttttcccagagtctgatggcagtgactgtgatcaagggaatcttcaccgccacaagtgcaggcagcaggtgtggttcaggtccccccccaccccactgtgctcctttgaagccaacgtgcctccctcgcctccatactggagggacgacgcaggggagaacagagaagtgcttggccctaggattgaggcacttgtttcctagcccgctgggttagggctggtgcaagcgaggcaatgttgaggatgctttaagcactaccagccgaatccgggaactctgttaacagttgtccaaccagcagaatgaggctaactgtataaagcatgggacccaggatgaggataaggaaaggacagcggctttccctgggcagtacaatggcttgaaggcaaaaagggataaagtgacagccgactgtgactctggtgaggaggggtgagcagggaggttgattctctgatgttaactaagtggcaaagtctcaaccgtgctcagccctccccctcccagggaagagaaacaaagattcaaagtaagcatgatactagtgggtttaccagtgtttcttccaaggagacatatattttttaataaacgatagttgcaatgaactgtggctcagagaccttcttaaagtagttgagaagggagggcgtgggcaaagcagtgggaagaacatcccaaacttttgggggccagagggctctctccttagtgatgatcagctagccgagctgggccgtcctggggatcggtacagctccctggggtggtgacaggccctttgtgaaagttgtgtgcttggtcttccaccccagccccagacactgcttcaaatagcaccaaccagatgggagtccacatctgtggtggcaaaatgctgacattttcccaagaggtacacaaggtgggagaggcctgctgtagcagaggtgtgtgttagagaaagcaggggcctgatttagtagcagagaactgggtgagaaaaatggccagagaaagtgacctgccagctaccagtgtttccgaaaatgagggtgggatgggcccatttgcagagcaggacagcagtcatccccatagccctctgaggaggggagggatgcttagagcaggcagttctggcagttctgacgtggcaggtgccattgcaacttgtgcggaggagtcttaggaagtgctgtcataattcataaggtcaagagcaacatctggatgaatgagccacctgaaatgtgtgtgggctgagccacaggaagggtgagtcctcttgcttgtggtgctttatggtgtgcaggttgcttgctttcccacattctctcatttgcttgaaggcagcctaacaaaagggagtccccaaagagctccatgagagcttaagaaaattcatctcctgaggacaaagagaacaaagatctgtcctgtggtcacactgttgaggctctgtcttcacagctgatgttctcctagtggaggtacagctgaagaacattcagccccagcacgagaagatacagagcaacttggaaaccccaaagggagacacacccttaacactgccgtgctgtgctgtgccgtgtcctgaaggaggagagagccctatctcctcctggttttgttgctgacattgcagctgatcatgccttgactccttcatctctaacagaggaagaactgtattatcaaaccttatggtctacccatgaataaataaaatatttgttcaagcac

SEQ ID NO: 8537 - DNA, 5905 bp, Homo sapiens
  source 1..5905: mol_type = unassigned DNA
tgctggagggggagccgtgggtgcggggcagcgtgggggccgaggccccgggacgcccgcccggccccaggccccgctcagcccgggcgcccccacgggtgccccccccttcttggtccgagcagtgtgagtgtgccagggagcccggcggcggcggcggcggtggtggcggcggtggcggcggcgtggaatccggcgtgggctggggggtccgagccgcggggggcagtgccatgcacaagcaccagcactgctgtaagtgccctgagtgctatgaggtgacccgcctggccgccctgcggcgcctcgagcctccgggctacggcgactggcaagtccccgacccttacgggccaggtgggggcaacggcgccagcgcgggttatgggggctacagctcgcagaccttgccctcgcaggcgggggccacccccacccctcgcaccaaggccaagctcatccccaccggccgggatgtggggccggtgcctcctaagccagtcccgggcaagagcacccccaaactcaacggcagcggccccagctggtggccagagtgcacctgtaccaaccgggactggtatgagcaggtgaatggcagtgatggcatgttcaaatatgaggaaatcgtacttgagaggggcaactctggcctgggcttcagtatcgcaggtggcatcgacaatccccatgtccctgatgaccctggcatctttattaccaagattatccctggtggagcagctgccatggatgggaggctgggggtgaatgactgtgtgctgcgggtgaatgaggtggacgtgtcggaggtggtacacagccgggcggtggaggcgctgaaggaggcaggccctgtggtgcgattggtggtgcggaggcgacagcctccacccgagaccatcatggaggtcaacctgctcaaagggcccaaaggcctgggtttcagcattgctgggggtattggcaaccagcacatcccaggagacaacagcatctacatcaccaagatcattgaggggggtgctgctcagaaggatggacgcctacagattggggaccggctgctggcggtgaacaacaccaatctgcaggatgtgaggcacgaggaagctgtggcctcactgaagaacacatctgatatggtgtatttgaaggtggccaagccaggcagcctccacctcaacgacatgtacgctccccctgactacgccagcacttttactgccttggctgacaaccacataagccataattccagcctgggttatctcggggctgtggagagcaaggtcagctaccctgctcctcctcaggttccccccacccgctactctcctattcccaggcacatgctggctgaggaggacttcaccagagagcctcgcaagatcatcctgcacaaaggctccacaggcctgggcttcaacatcgtaggaggagaggatggagaaggcatttttgtctccttcatcctggcaggaggcccagctgacctgagtggggagctgcgcaggggagaccggatcttatcggtgaatggagtgaatctgaggaatgcaactcatgagcaggctgcagctgctctgaaacgggccggccagtcagtcaccattgtggcccagtacagacctgaagaatacagtcgctttgaatcgaagatacatgacttacgagaacaaatgatgaacagcagcatgagctctgggtctgggtccctccgaacaagtgaaaagaggtccttgtatgtcagggccctgtttgattatgatcggactcgggacagctgcctgccaagccaggggctcagcttctcttatggtgacattctgcatgtcattaatgcctctgatgatgagtggtggcaggcaaggctggtgaccccacacggagaaagtgagcagatcggtgtgatccccagtaagaagagggtggaaaagaaagaaagagctcgattgaaaactgtgaagttccatgccaggacggggatgattgagtctaacagggacttcccggggttaagtgacgattattatggagcaaagaacctgaaaggacaagaggatgctattttgtcatatgagccagtgacacggcaagaaattcactatgcaaggcctgtgatcatcctgggcccaatgaaggaccgagtcaatgatgacctgatctccgaatttccacataaatttggatcctgtgtgccacatactacccggcctcgacgtgataatgaggtggatggacaagactaccactttgtggtgtcccgagaacaaatggagaaagatattcaggacaacaagttcatcgaggcgggccaatttaatgataacctctatgggaccagcatccagtcagtgcgggcagttgcagagaggggcaagcactgcatcttagatgtttccggcaatgctatcaagagactgcagcaagcacaactttaccccattgccattttcatcaagcccaagtccattgaagcccttatggaaatgaaccgaaggcagacatatgaacaagcaaataagatctatgacaaagccatgaaactggagcaggaatttggagagtactttacagccattgtacagggtgactcactggaagagatttataacaaaatcaaacaaatcattgaggaccagtctgggcactacatttgggtcccatcccctgaaaaactctgaagaatcccctccaaccattctcttgtgaacagaagaaatcaagtccctcttccctcctccctcttcattcctgtccccatggggagaacaaatgctactgttcttgtccccttttttagatatgtcaaaaaaaattaagttttctagtcctgttctttttttttttttaagtttttgtttgtttcagtttattttttgggatgatgccatctcattcatcatgtgactgtgcccattcctgcatggacctttcccaagcgctagcacaggtgcaaaatccatcagagccattgttttcataaaaaccaagcagaagtgaagagaaaagaggaggactgatggaaagacagactctggacagctgcacggcttgtgaagtgagctaaatgcaccacatgatgagatgctcctgggcatttctccctatctgtactgctgtcttgcagctctgaacggtgcaacgtaatggcgacagaaagtatcttatttatatatagatatatatatgtaatttatataaaatatatagaaattattatatatatatattatacactctcatataatatatatatattcacacacatttgggttagaaaatctatggagacttcatcaatggtactatgttattagagaaatgctttaattttcatattccaatcagatggcatcttctatcccagctggttgggaagggattgaagatggtagcaagtgctgcactaagggcactcgcatttggtcattctcttgagagctaggaggggtcagcctgaggccggagaggaagggcttttgcctggggtgagagggtgagagacttgacctgaaagcagctgctgcccctgaggtgcagccagagtcctgtgtgcggacagagagaatggctaatgatgctccgcgtggaattgcctattgttttatgccacctgatgtgtctgcatgagaggtttcctttttgttcctttttaagctgctgttaaaccaaaaccatgttgtgctactgtgtcagccttttcattattgcaaattttacttttactatttaagtgaatgcatagaatccaatttgccaaggttctaaaggcttatgaggtcctgaaggagccaggccttgtgatggagtaggtgacacaggcctggttgtcctgtcagcagaagggaaagcaggggctgggctgagaggaggacacggagggctctgctgaggttccttcctgggttccaccaacagggacagggagtcacttgccttccagttctgtgctgggatggcgggacagcacttggcttgcttggccagctgcgtcatgagtttgatttggtttttttttttttgcagctgcttcatatgctctgctccagcccctccccaacagctggtagcttatggtttcttcaagaggaaagtagactttatgctgtacatttgagctgtagagctaagattcgcttactggtgagctgtgaaaccttgttgctttttcccagagtctgatggcagtgactgtgatcaagggaatcttcaccgccacaagtgcaggcagcaggtgtggttcaggtccccccccaccccactgtgctcctttgaagccaacgtgcctccctcgcctccatactggagggacgacgcaggggagaacagagaagtgcttggccctaggattgaggcacttgtttcctagcccgctgggttagggctggtgcaagcgaggcaatgttgaggatgctttaagcactaccagccgaatccgggaactctgttaacagttgtccaaccagcagaatgaggctaactgtataaagcatgggacccaggatgaggataaggaaaggacagcggctttccctgggcagtacaatggcttgaaggcaaaaagggataaagtgacagccgactgtgactctggtgaggaggggtgagcagggaggttgattctctgatgttaactaagtggcaaagtctcaaccgtgctcagccctccccctcccagggaagagaaacaaagattcaaagtaagcatgatactagtgggtttaccagtgtttcttccaaggagacatatattttttaataaacgatagttgcaatgaactgtggctcagagaccttcttaaagtagttgagaagggagggcgtgggcaaagcagtgggaagaacatcccaaacttttgggggccagagggctctctccttagtgatgatcagctagccgagctgggccgtcctggggatcggtacagctccctggggtggtgacaggccctttgtgaaagttgtgtgcttggtcttccaccccagccccagacactgcttcaaatagcaccaaccagatgggagtccacatctgtggtggcaaaatgctgacattttcccaagaggtacacaaggtgggagaggcctgctgtagcagaggtgtgtgttagagaaagcaggggcctgatttagtagcagagaactgggtgagaaaaatggccagagaaagtgacctgccagctaccagtgtttccgaaaatgagggtgggatgggcccatttgcagagcaggacagcagtcatccccatagccctctgaggaggggagggatgcttagagcaggcagttctggcagttctgacgtggcaggtgccattgcaacttgtgcggaggagtcttaggaagtgctgtcataattcataaggtcaagagcaacatctggatgaatgagccacctgaaatgtgtgtgggctgagccacaggaagggtgagtcctcttgcttgtggtgctttatggtgtgcaggttgcttgctttcccacattctctcatttgcttgaaggcagcctaacaaaagggagtccccaaagagctccatgagagcttaagaaaattcatctcctgaggacaaagagaacaaagatctgtcctgtggtcacactgttgaggctctgtcttcacagctgatgttctcctagtggaggtacagctgaagaacattcagccccagcacgagaagatacagagcaacttggaaaccccaaagggagacacacccttaacactgccgtgctgtgctgtgccgtgtcctgaaggaggagagagccctatctcctcctggttttgttgctgacattgcagctgatcatgccttgactccttcatctctaacagaggaagaactgtattatcaaaccttatggtctacccatgaataaataaaatatttgttcaagcac

SEQ ID NO: 8538 - DNA, 4529 bp, Homo sapiens
  source 1..4529: mol_type = unassigned DNA
cccatcgcgcgcctcaggcgtctcctcctcctccctccttccccctcctctctcctcccctcctcccgcgcgccccgctttgtgtccgtggtctcccgcgcgggacggagggactggccggagctggcgctttctcagcactagatctggactccgacccggcgccagaatacagtcgctttgaatcgaagatacatgacttacgagaacaaatgatgaacagcagcatgagctctgggtctgggtccctccgaacaagtgaaaagaggtccttgtatgtcagggccctgtttgattatgatcggactcgggacagctgcctgccaagccaggggctcagcttctcttatggtgacattctgcatgtcattaatgcctctgatgatgagtggtggcaggcaaggctggtgaccccacacggagaaagtgagcagatcggtgtgatccccagtaagaagagggtggaaaagaaagaaagagctcgattgaaaactgtgaagttccatgccaggacggggatgattgagtctaacaggtcgatcaaaacgaaacgtaaaaagagtttccgcctctctcgaaagtttccattttacaagagcaaagaaaacatggcccaggagagcagcatacaggaacagggagtgacatccaacaccagtgacagcgaaagcagttccaaaggacaagaggatgctattttgtcatatgagccagtgacacggcaagaaattcactatgcaaggcctgtgatcatcctgggcccaatgaaggaccgagtcaatgatgacctgatctccgaatttccacataaatttggatcctgtgtgccacatactacccggcctcgacgtgataatgaggtggatggacaagactaccactttgtggtgtcccgagaacaaatggagaaagatattcaggacaacaagttcatcgaggcgggccaatttaatgataacctctatgggaccagcatccagtcagtgcgggcagttgcagagaggggcaagcactgcatcttagatgtttccggcaatgctatcaagagactgcagcaagcacaactttaccccattgccattttcatcaagcccaagtccattgaagcccttatggaaatgaaccgaaggcagacatatgaacaagcaaataagatctatgacaaagccatgaaactggagcaggaatttggagagtactttacagccattgtacagggtgactcactggaagagatttataacaaaatcaaacaaatcattgaggaccagtctgggcactacatttgggtcccatcccctgaaaaactctgaagaatcccctccaaccattctcttgtgaacagaagaaatcaagtccctcttccctcctccctcttcattcctgtccccatggggagaacaaatgctactgttcttgtccccttttttagatatgtcaaaaaaaattaagttttctagtcctgttctttttttttttttaagtttttgtttgtttcagtttattttttgggatgatgccatctcattcatcatgtgactgtgcccattcctgcatggacctttcccaagcgctagcacaggtgcaaaatccatcagagccattgttttcataaaaaccaagcagaagtgaagagaaaagaggaggactgatggaaagacagactctggacagctgcacggcttgtgaagtgagctaaatgcaccacatgatgagatgctcctgggcatttctccctatctgtactgctgtcttgcagctctgaacggtgcaacgtaatggcgacagaaagtatcttatttatatatagatatatatatgtaatttatataaaatatatagaaattattatatatatatattatacactctcatataatatatatatattcacacacatttgggttagaaaatctatggagacttcatcaatggtactatgttattagagaaatgctttaattttcatattccaatcagatggcatcttctatcccagctggttgggaagggattgaagatggtagcaagtgctgcactaagggcactcgcatttggtcattctcttgagagctaggaggggtcagcctgaggccggagaggaagggcttttgcctggggtgagagggtgagagacttgacctgaaagcagctgctgcccctgaggtgcagccagagtcctgtgtgcggacagagagaatggctaatgatgctccgcgtggaattgcctattgttttatgccacctgatgtgtctgcatgagaggtttcctttttgttcctttttaagctgctgttaaaccaaaaccatgttgtgctactgtgtcagccttttcattattgcaaattttacttttactatttaagtgaatgcatagaatccaatttgccaaggttctaaaggcttatgaggtcctgaaggagccaggccttgtgatggagtaggtgacacaggcctggttgtcctgtcagcagaagggaaagcaggggctgggctgagaggaggacacggagggctctgctgaggttccttcctgggttccaccaacagggacagggagtcacttgccttccagttctgtgctgggatggcgggacagcacttggcttgcttggccagctgcgtcatgagtttgatttggtttttttttttttgcagctgcttcatatgctctgctccagcccctccccaacagctggtagcttatggtttcttcaagaggaaagtagactttatgctgtacatttgagctgtagagctaagattcgcttactggtgagctgtgaaaccttgttgctttttcccagagtctgatggcagtgactgtgatcaagggaatcttcaccgccacaagtgcaggcagcaggtgtggttcaggtccccccccaccccactgtgctcctttgaagccaacgtgcctccctcgcctccatactggagggacgacgcaggggagaacagagaagtgcttggccctaggattgaggcacttgtttcctagcccgctgggttagggctggtgcaagcgaggcaatgttgaggatgctttaagcactaccagccgaatccgggaactctgttaacagttgtccaaccagcagaatgaggctaactgtataaagcatgggacccaggatgaggataaggaaaggacagcggctttccctgggcagtacaatggcttgaaggcaaaaagggataaagtgacagccgactgtgactctggtgaggaggggtgagcagggaggttgattctctgatgttaactaagtggcaaagtctcaaccgtgctcagccctccccctcccagggaagagaaacaaagattcaaagtaagcatgatactagtgggtttaccagtgtttcttccaaggagacatatattttttaataaacgatagttgcaatgaactgtggctcagagaccttcttaaagtagttgagaagggagggcgtgggcaaagcagtgggaagaacatcccaaacttttgggggccagagggctctctccttagtgatgatcagctagccgagctgggccgtcctggggatcggtacagctccctggggtggtgacaggccctttgtgaaagttgtgtgcttggtcttccaccccagccccagacactgcttcaaatagcaccaaccagatgggagtccacatctgtggtggcaaaatgctgacattttcccaagaggtacacaaggtgggagaggcctgctgtagcagaggtgtgtgttagagaaagcaggggcctgatttagtagcagagaactgggtgagaaaaatggccagagaaagtgacctgccagctaccagtgtttccgaaaatgagggtgggatgggcccatttgcagagcaggacagcagtcatccccatagccctctgaggaggggagggatgcttagagcaggcagttctggcagttctgacgtggcaggtgccattgcaacttgtgcggaggagtcttaggaagtgctgtcataattcataaggtcaagagcaacatctggatgaatgagccacctgaaatgtgtgtgggctgagccacaggaagggtgagtcctcttgcttgtggtgctttatggtgtgcaggttgcttgctttcccacattctctcatttgcttgaaggcagcctaacaaaagggagtccccaaagagctccatgagagcttaagaaaattcatctcctgaggacaaagagaacaaagatctgtcctgtggtcacactgttgaggctctgtcttcacagctgatgttctcctagtggaggtacagctgaagaacattcagccccagcacgagaagatacagagcaacttggaaaccccaaagggagacacacccttaacactgccgtgctgtgctgtgccgtgtcctgaaggaggagagagccctatctcctcctggttttgttgctgacattgcagctgatcatgccttgactccttcatctctaacagaggaagaactgtattatcaaaccttatggtctacccatgaataaataaaatatttgttcaagc

SEQ ID NO: 8539 - DNA, 4323 bp, Homo sapiens
  source 1..4323: mol_type = unassigned DNA
agaccttccgcccccgagcctcagcagctgccgccccaagctcgcggccatccgagccgcctgcatctccgaatctctccgggcgccgctggctcgagctctgacccagctctggcgtcctgcacgcccacgtcctggcgcccctaaccctgactcatcgtccacagtgcaccgggcggcggacggttgcgggccccggggcatgctgggagctgtagttccctggagcccggccctgcgttccgctgacttagagggatctccaagcgtccctcgtctcccccaaactccttaatcccgcccgtccgacctagagtctagtcctccgacggggtgatgggataggatgggacagaagaggaaggggcttaagtcactgcagccagagggatggaggtggactgaagggagggcttctccggtggggttagaagggaaaagtagggaaagagaagtgtaaggtagatggcagaggcagagacatggaaagacagactctagggttcctgatgaaatctatctcggccaacacaaaagggagggtacagtggtggggggcacccaagctagggtgtgagtaccctaagtgtattcttctgagatgtaggccattcactaactcttggaacagctacagtttcacagtaggaagacccccccagattcactgcccctcccttagtaaagcctctgagaccttcctgaacattcccttctgtctttgccctctgttccttccagagaccatgtgcccaggcagatggattcctcccgggcctgagaggaactgcaggaattctcctgcctcttacccgtaaaaccccaacttctctagccctagggcaggaagtcccaaacaatttctacccctttttctgcaattctcattggggtgagaggaggcccaggaggagagagagctgggctcagcttctttttgagctgctggagccctctgtgaggaggccctctttgctggcttctcaggagagcgtggctaggttctgcctgcctatgggaagagggggccagggtgtgtggagcaagatggtggcggtgctggtgccttgggacctgggggaatgggacagctggtcggctcagagacggcctactttactcacagctggaatttagtggggagaagcagctcaactccaatcctggaggattagggagattaaagtgagagaagagagagatgtcccagagaccaagagctcccaggtcagccctctggctcctggcacccccactgctgcggtgggcacccccactcctcacagtgctgcatagcgacctcttccaggccttgctggacatcctggactattatgaggcttccctctcagagagtcagaaataccgctaccaagatgaagacacgccccctctggagcacagcccggcccacctccccaaccaggccaattctcccccagtgattgtcaacacagataccctagaagccccaggatatgagttgcaggtgaacgggaccgagggggagatggaatacgaggaaatcacattggaaaggggtaactcaggtctgggcttcagcatcgcaggtggcactgacaacccacacatcggtgacgacccatccattttcatcaccaagatcattcctggtggggctgcggcccaggatggccgcctcagggtcaacgacagcatcctgtttgtaaatgaagtggacgtgcgcgaggtgacccactcagcggcggtggaagccctcaaagaggcaggctccatcgttcgcctctatgtcatgcgccggaagcccccggctgagaaggtcatggagatcaagctcatcaaggggcctaaaggtcttggcttcagcatcgcagggggcgtagggaaccagcacatcccaggagataatagcatctatgtaacaaagatcatcgaagggggtgctgcccacaaggatgggaggttgcagattggagacaagatcctggcggtcaacagtgtggggctagaggacgtcatgcatgaagatgctgtggcagccctgaagaacacgtatgatgttgtctacctaaaggtggccaagcccagcaatgcctacctgagtgacagctatgctcccccagacatcacaacctcttattcccagcacctggacaatgagatcagtcacagcagctacctgggcaccgactaccccacagccatgacccccacttcccctcggcgctactctccagtggccaaggacctgctcggggaggaagacattccccgagaaccgaggcgaattgtgatccaccggggctccacgggcctgggcttcaacatcgtgggtggcgaggacggtgaaggcatcttcatctcctttatcctggccgggggccctgcagacctcagtggggagctgcggaagggggaccagatcctgtcggtcaacggtgtggacctccgaaatgccagccatgagcaggctgccattgccctgaagaatgcgggtcagacggtcacgatcatcgctcagtataaaccagaagagtacagccgattcgaggccaagatccacgaccttcgggaacagctcatgaacagcagcctgggctcagggactgcgtccctgcggagcaaccccaaaaggggtttctacatcagggccctgtttgattacgacaagaccaaggactgcggcttcctgagccaggccctgagcttccgctttggggatgtgctgcatgtcatcgatgctagtgatgaggagtggtggcaggcacggcgggtccactctgacagtgagaccgacgacattgggttcatccccagcaaacggcgggttgagcgacgagagtggtcaaggttaaaggccaaggactggggctccagctctggatcgcagggtcgagaagactcggttctgagctacgagacagtgacgcagatggaagtgcactatgctcgccccatcatcatccttgggcccaccaaggaccgcgccaacgatgatcttctctccgagttccccgacaagtttggatcctgtgttccccatacgacacggcccaagcgggagtatgagatagatggccgggattaccactttgtgtcgtcccgggagaaaatggagaaggacattcaggcgcacaagttcattgaggccggccagtacaacagccacctctatgggaccagcgtccagtccgtgcgagaggtggcagagcaggggaagcactgcatcctcgatgtctcggccaatgccgtgcggcggctgcaggcggcccacctgcaccccatcgccatcttcatccgcccccgctccctggagaatgtgctagagattaacaagcggatcacagaggagcaagcccgcaaagccttcgacagagccaccaagctggagcaggagttcacagagtgcttctcagccatcgtggagggtgacagctttgaggagatctaccacaaggtgaagcgtgtcatcgaggacctctcaggcccctacatctgggttccagcccgagagagactctgattcctgccctggcttggcctggactcgccctgcctccatcacctgggcccttggtctggactgaattgcccaagcccttggctccccccggcctccctcccaccccttcttatttatttcctttctaactggatccagcctgttggaggggggacactcctctgcatgtatccccgcaccccagaactgggctcctgaacgccaggaacctggggtctgggggggagctgggctccttgttccgagcccttgctccttaggatccccgcccccacctgcccccaatgcacacacagacccaccgggggccacctgccctcccccatcctctcccacacacattccagaagtcagggccccctcgaggagcacccgctgcagggatgcagggccacaggcctccgctctctcctaaggcagggtctggggtcacccctgccctcatcgtaattccccatgttccttgatttctcatttattttttccactttttttcttctcaaaggtggttttttggggggagaagcaggggactccgcagcgggcccctgccttccacatgcccccaccatttttctttgccggtttgcatgagtggaaggtctaaatgtggcttttttttttttttttcctgggaatttttttggggaaaagggagggatgggtctagggagtgggaaatgcgggagggagggtggggggcaggggtcgggggtcgggtgtccgggagccagggaagactggaaatgctgccgccttctgcaatttatttatttttttcttttgagagagtgaaaggaagagacagatacttgaaa

SEQ ID NO: 8540 - DNA, 3184 bp, Homo sapiens
  source 1..3184: mol_type = unassigned DNA
gcccccttcccctccctcccacgctcccctccccttcccttctccaaccccctccttcccctctcacccctccccccatcctggccccccctgcaaaagtggggtgcggaggggggaggggtgagaacccacggaggggaggaacgaaactccgatgaagtcagagccccttacccgccgccgcggccaggccccccaacatggactgtctctgtatagtgacaaccaagaaataccgctaccaagatgaagacacgccccctctggagcacagcccggcccacctccccaaccaggccaattctcccccagtgattgtcaacacagataccctagaagccccaggatatgtgaacgggaccgagggggagatggaatacgaggaaatcacattggaaaggggtaactcaggtctgggcttcagcatcgcaggtggcactgacaacccacacatcggtgacgacccatccattttcatcaccaagatcattcctggtggggctgcggcccaggatggccgcctcagggtcaacgacagcatcctgtttgtaaatgaagtggacgtgcgcgaggtgacccactcagcggcggtggaagccctcaaagaggcaggctccatcgttcgcctctatgtcatgcgccggaagcccccggctgagaaggtcatggagatcaagctcatcaaggggcctaaaggtcttggcttcagcatcgcagggggcgtagggaaccagcacatcccaggagataatagcatctatgtaacaaagatcatcgaagggggtgctgcccacaaggatgggaggttgcagattggagacaagatcctggcggtcaacagtgtggggctagaggacgtcatgcatgaagatgctgtggcagccctgaagaacacgtatgatgttgtctacctaaaggtggccaagcccagcaatgcctacctgagtgacagctatgctcccccagacatcacaacctcttattcccagcacctggacaatgagatcagtcacagcagctacctgggcaccgactaccccacagccatgacccccacttcccctcggcgctactctccagtggccaaggacctgctcggggaggaagacattccccgagaaccgaggcgaattgtgatccaccggggctccacgggcctgggcttcaacatcgtgggtggcgaggacggtgaaggcatcttcatctcctttatcctggccgggggccctgcagacctcagtggggagctgcggaagggggaccagatcctgtcggtcaacggtgtggacctccgaaatgccagccatgagcaggctgccattgccctgaagaatgcgggtcagacggtcacgatcatcgctcagtataaaccagaagagtacagccgattcgaggccaagatccacgaccttcgggaacagctcatgaacagcagcctgggctcagggactgcgtccctgcggagcaaccccaaaaggggtttctacatcagggccctgtttgattacgacaagaccaaggactgcggcttcctgagccaggccctgagcttccgctttggggatgtgctgcatgtcatcgatgctagtgatgaggagtggtggcaggcacggcgggtccactctgacagtgagaccgacgacattgggttcatccccagcaaacggcgggttgagcgacgagagtggtcaaggttaaaggccaaggactggggctccagctctggatcgcagggtcgagaagactcggttctgagctacgagacagtgacgcagatggaagtgcactatgctcgccccatcatcatccttgggcccaccaaggaccgcgccaacgatgatcttctctccgagttccccgacaagtttggatcctgtgttccccatacgacacggcccaagcgggagtatgagatagatggccgggattaccactttgtgtcgtcccgggagaaaatggagaaggacattcaggcgcacaagttcattgaggccggccagtacaacagccacctctatgggaccagcgtccagtccgtgcgagaggtggcagagcaggggaagcactgcatcctcgatgtctcggccaatgccgtgcggcggctgcaggcggcccacctgcaccccatcgccatcttcatccgcccccgctccctggagaatgtgctagagattaacaagcggatcacagaggagcaagcccgcaaagccttcgacagagccaccaagctggagcaggagttcacagagtgcttctcagccatcgtggagggtgacagctttgaggagatctaccacaaggtgaagcgtgtcatcgaggacctctcaggcccctacatctgggttccagcccgagagagactctgattcctgccctggcttggcctggactcgccctgcctccatcacctgggcccttggtctggactgaattgcccaagcccttggctccccccggcctccctcccaccccttcttatttatttcctttctaactggatccagcctgttggaggggggacactcctctgcatgtatccccgcaccccagaactgggctcctgaacgccaggaacctggggtctgggggggagctgggctccttgttccgagcccttgctccttaggatccccgcccccacctgcccccaatgcacacacagacccaccgggggccacctgccctcccccatcctctcccacacacattccagaagtcagggccccctcgaggagcacccgctgcagggatgcagggccacaggcctccgctctctcctaaggcagggtctggggtcacccctgccctcatcgtaattccccatgttccttgatttctcatttattttttccactttttttcttctcaaaggtggttttttggggggagaagcaggggactccgcagcgggcccctgccttccacatgcccccaccatttttctttgccggtttgcatgagtggaaggtctaaatgtggcttttttttttttttttcctgggaatttttttggggaaaagggagggatgggtctagggagtgggaaatgcgggagggagggtggggggcaggggtcgggggtcgggtgtccgggagccagggaagactggaaatgctgccgccttctgcaatttatttatttttttcttttgagagagtgaaaggaagagacagatacttgaaa

SEQ ID NO: 8541 - DNA, 2712 bp, Homo sapiens
  source 1..2712: mol_type = unassigned DNA
aggttattcaggatgcgctgcgcccacaaacctcttcagcccggcctcctctcggcctggctaacgtggggcggggcccagggcaggagaggcggggctagcggatcccttctgcgctcaggagtttggtcggccccaggccacgccccacccccctgttgtcctgacgacagggcctcctggaggccaattctcccccagtgattgtcaacacagataccctagaagccccaggatatgagttgcaggtgaacgggaccgagggggagatggaatacgaggaaatcacattggaaaggggtaactcaggtctgggcttcagcatcgcaggtggcactgacaacccacacatcggtgacgacccatccattttcatcaccaagatcattcctggtggggctgcggcccaggatggccgcctcagggtcaacgacagcatcctgtttgtaaatgaagtggacgtgcgcgaggtgacccactcagcggcggtggaagccctcaaagaggcaggctccatcgttcgcctctatgtcatgcgccggaagcccccggctgagaaggtcatggagatcaagctcatcaaggggcctaaaggtcttggcttcagcatcgcagggggcgtagggaaccagcacatcccaggagataatagcatctatgtaacaaagatcatcgaagggggtgctgcccacaaggatgggaggttgcagattggagacaagatcctggcggtcaacagtgtggggctagaggacgtcatgcatgaagatgctgtggcagccctgaagaacacgtatgatgttgtctacctaaaggtggccaagcccagcaatgcctacctgagtgacagctatgctcccccagacatcacaacctcttattcccagcacctggacaatgagatcagtcacagcagctacctgggcaccgactaccccacagccatgacccccacttcccctcggcgctactctccagtggccaaggacctgctcggggaggaagacattccccgagaaccgaggcgaattgtgatccaccggggctccacgggcctgggcttcaacatcgtgggtggcgaggacggtgaaggcatcttcatctcctttatcctggccgggggccctgcagacctcagtggggagctgcggaagggggaccagatcctgtcggtcaacggtgtggacctccgaaatgccagccatgagcaggctgccattgccctgaagaatgcgggtcagacggtcacgatcatcgctcagtataaaccagaagagtacagccgattcgaggccaagatccacgaccttcgggaacagctcatgaacagcagcctgggctcagggactgcgtccctgcggagcaaccccaaaaggggtttctacatcagggccctgtttgattacgacaagaccaaggactgcggcttcctgagccaggccctgagcttccgctttggggatgtgctgcatgtcatcgatgctagtgatgaggagtggtggcaggcacggcgggtccactctgacagtgagaccgacgacattgggttcatccccagcaaacggcgggttgagcgacgagagtggtcaaggttaaaggccaaggactggggctccagctctggatcgcagggtcgagaagactcggttctgagctacgagacagtgacgcagatggaagtgcactatgctcgccccatcatcatccttgggcccaccaaggaccgcgccaacgatgatcttctctccgagttccccgacaagtttggatcctgtgttccccatacgacacggcccaagcgggagtatgagatagatggccgggattaccactttgtgtcgtcccgggagaaaatggagaaggacattcaggcgcacaagttcattgaggccggccagtacaacagccacctctatgggaccagcgtccagtccgtgcgagaggtggcagagcaggggaagcactgcatcctcgatgtctcggccaatgccgtgcggcggctgcaggcggcccacctgcaccccatcgccatcttcatccgcccccgctccctggagaatgtgctagagattaacaagcggatcacagaggagcaagcccgcaaagccttcgacagagccaccaagctggagcaggagttcacagagtgcttctcagccatcgtggagggtgacagctttgaggagatctaccacaaggtgaagcgtgtcatcgaggacctctcaggcccctacatctgggttccagcccgagagagactctgattcctgccctggcttggcctggactcgccctgcctccatcacctgggcccttggtctggactgaattgcccaagcccttggctccccccggcctccctcccaccccttcttatttatttcctttctaactggatccagcctgttggaggggggacactcctctgcatgtatccccgcaccccagaactgggctcctgaacgccaggaacctggggtctgggggggagctgggctccttgttccgagcccttgctccttaggatccccgcccccacctgcccccaatgcacacacagacccaccgggggccacctgccctcccccatcctctcccacacacattccagaagtcagggccccctcgaggagcacccgctgcagggatgcagggccacaggcctccgctctctcctaaggcagggtctggggtcacccctgccctcatcgt

SEQ ID NO: 8542 - DNA, 3185 bp, Homo sapiens
  source 1..3185: mol_type = unassigned DNA
cccctccctcccacgctcccctccccttcccttctccaaccccctccttcccctctcacccctccccccatcctggccccccctgcaaaagtggggtgcggaggggggaggggtgagaacccacggaggggaggaacgaaactccgatgaagtcagagccccttacccgccgccgcggccaggccccccaacatggactgtctctgtatagtgacaaccaagaaataccgctaccaagatgaagacacgccccctctggagcacagcccggcccacctccccaaccaggccaattctcccccagtgattgtcaacacagataccctagaagccccaggatatgtgttgcaggtgaacgggaccgagggggagatggaatacgaggaaatcacattggaaaggggtaactcaggtctgggcttcagcatcgcaggtggcactgacaacccacacatcggtgacgacccatccattttcatcaccaagatcattcctggtggggctgcggcccaggatggccgcctcagggtcaacgacagcatcctgtttgtaaatgaagtggacgtgcgcgaggtgacccactcagcggcggtggaagccctcaaagaggcaggctccatcgttcgcctctatgtcatgcgccggaagcccccggctgagaaggtcatggagatcaagctcatcaaggggcctaaaggtcttggcttcagcatcgcagggggcgtagggaaccagcacatcccaggagataatagcatctatgtaacaaagatcatcgaagggggtgctgcccacaaggatgggaggttgcagattggagacaagatcctggcggtcaacagtgtggggctagaggacgtcatgcatgaagatgctgtggcagccctgaagaacacgtatgatgttgtctacctaaaggtggccaagcccagcaatgcctacctgagtgacagctatgctcccccagacatcacaacctcttattcccagcacctggacaatgagatcagtcacagcagctacctgggcaccgactaccccacagccatgacccccacttcccctcggcgctactctccagtggccaaggacctgctcggggaggaagacattccccgagaaccgaggcgaattgtgatccaccggggctccacgggcctgggcttcaacatcgtgggtggcgaggacggtgaaggcatcttcatctcctttatcctggccgggggccctgcagacctcagtggggagctgcggaagggggaccagatcctgtcggtcaacggtgtggacctccgaaatgccagccatgagcaggctgccattgccctgaagaatgcgggtcagacggtcacgatcatcgctcagtataaaccagaagagtacagccgattcgaggccaagatccacgaccttcgggaacagctcatgaacagcagcctgggctcagggactgcgtccctgcggagcaaccccaaaaggggtttctacatcagggccctgtttgattacgacaagaccaaggactgcggcttcctgagccaggccctgagcttccgctttggggatgtgctgcatgtcatcgatgctagtgatgaggagtggtggcaggcacggcgggtccactctgacagtgagaccgacgacattgggttcatccccagcaaacggcgggttgagcgacgagagtggtcaaggttaaaggccaaggactggggctccagctctggatcgcagggtcgagaagactcggttctgagctacgagacagtgacgcagatggaagtgcactatgctcgccccatcatcatccttgggcccaccaaggaccgcgccaacgatgatcttctctccgagttccccgacaagtttggatcctgtgttccccatacgacacggcccaagcgggagtatgagatagatggccgggattaccactttgtgtcgtcccgggagaaaatggagaaggacattcaggcgcacaagttcattgaggccggccagtacaacagccacctctatgggaccagcgtccagtccgtgcgagaggtggcagagcaggggaagcactgcatcctcgatgtctcggccaatgccgtgcggcggctgcaggcggcccacctgcaccccatcgccatcttcatccgcccccgctccctggagaatgtgctagagattaacaagcggatcacagaggagcaagcccgcaaagccttcgacagagccaccaagctggagcaggagttcacagagtgcttctcagccatcgtggagggtgacagctttgaggagatctaccacaaggtgaagcgtgtcatcgaggacctctcaggcccctacatctgggttccagcccgagagagactctgattcctgccctggcttggcctggactcgccctgcctccatcacctgggcccttggtctggactgaattgcccaagcccttggctccccccggcctccctcccaccccttcttatttatttcctttctaactggatccagcctgttggaggggggacactcctctgcatgtatccccgcaccccagaactgggctcctgaacgccaggaacctggggtctgggggggagctgggctccttgttccgagcccttgctccttaggatccccgcccccacctgcccccaatgcacacacagacccaccgggggccacctgccctcccccatcctctcccacacacattccagaagtcagggccccctcgaggagcacccgctgcagggatgcagggccacaggcctccgctctctcctaaggcagggtctggggtcacccctgccctcatcgtaattccccatgttccttgatttctcatttattttttccactttttttcttctcaaaggtggttttttggggggagaagcaggggactccgcagcgggcccctgccttccacatgcccccaccatttttctttgccggtttgcatgagtggaaggtctaaatgtggcttttttttttttttttcctgggaatttttttggggaaaagggagggatgggtctagggagtgggaaatgcgggagggagggtggggggcaggggtcgggggtcgggtgtccgggagccagggaagactggaaatgctgccgccttctgcaatttatttatttttttcttttgagagagtgaaaggaagagacagatacttgaaa

SEQ ID NO: 8543 - DNA, 3975 bp, Homo sapiens
  source 1..3975: mol_type = unassigned DNA
gggacagaagaggaaggggcttaagtcactgcagccagagggatggaggtggactgaagggagggcttctccggtggggttagaagggaaaagtagggaaagagaagtgtaaggtagatggcagaggcagagacatggaaagacagactctagggttcctgatgaaatctatctcggccaacacaaaagggagggtacagtggtggggggcacccaagctagggtgtgagtaccctaagtgtattcttctgagatgtaggccattcactaactcttggaacagctacagtttcacagtaggaagacccccccagattcactgcccctcccttagtaaagcctctgagaccttcctgaacattcccttctgtctttgccctctgttccttccagagaccatgtgcccaggcagatggattcctcccgggcctgagaggaactgcaggaattctcctgcctcttacccgtaaaaccccaacttctctagccctagggcaggaagtcccaaacaatttctacccctttttctgcaattctcattggggtgagaggaggcccaggaggagagagagctgggctcagcttctttttgagctgctggagccctctgtgaggaggccctctttgctggcttctcaggagagcgtggctaggttctgcctgcctatgggaagagggggccagggtgtgtggagcaagatggtggcggtgctggtgccttgggacctgggggaatgggacagctggtcggctcagagacggcctactttactcacagctggaatttagtggggagaagcagctcaactccaatcctggaggattagggagattaaagtgagagaagagagagatgtcccagagaccaagagctcccaggtcagccctctggctcctggcacccccactgctgcggtgggcacccccactcctcacagtgctgcatagcgacctcttccaggccttgctggacatcctggactattatgaggcttccctctcagagagtcagaaataccgctaccaagatgaagacacgccccctctggagcacagcccggcccacctccccaaccaggccaattctcccccagtgattgtcaacacagataccctagaagccccaggatatgtgttgcaggtgaacgggaccgagggggagatggaatacgaggaaatcacattggaaaggggtaactcaggtctgggcttcagcatcgcaggtggcactgacaacccacacatcggtgacgacccatccattttcatcaccaagatcattcctggtggggctgcggcccaggatggccgcctcagggtcaacgacagcatcctgtttgtaaatgaagtggacgtgcgcgaggtgacccactcagcggcggtggaagccctcaaagaggcaggctccatcgttcgcctctatgtcatgcgccggaagcccccggctgagaaggtcatggagatcaagctcatcaaggggcctaaaggtcttggcttcagcatcgcagggggcgtagggaaccagcacatcccaggagataatagcatctatgtaacaaagatcatcgaagggggtgctgcccacaaggatgggaggttgcagattggagacaagatcctggcggtcaacagtgtggggctagaggacgtcatgcatgaagatgctgtggcagccctgaagaacacgtatgatgttgtctacctaaaggtggccaagcccagcaatgcctacctgagtgacagctatgctcccccagacatcacaacctcttattcccagcacctggacaatgagatcagtcacagcagctacctgggcaccgactaccccacagccatgacccccacttcccctcggcgctactctccagtggccaaggacctgctcggggaggaagacattccccgagaaccgaggcgaattgtgatccaccggggctccacgggcctgggcttcaacatcgtgggtggcgaggacggtgaaggcatcttcatctcctttatcctggccgggggccctgcagacctcagtggggagctgcggaagggggaccagatcctgtcggtcaacggtgtggacctccgaaatgccagccatgagcaggctgccattgccctgaagaatgcgggtcagacggtcacgatcatcgctcagtataaaccagaagagtacagccgattcgaggccaagatccacgaccttcgggaacagctcatgaacagcagcctgggctcagggactgcgtccctgcggagcaaccccaaaaggggtttctacatcagggccctgtttgattacgacaagaccaaggactgcggcttcctgagccaggccctgagcttccgctttggggatgtgctgcatgtcatcgatgctagtgatgaggagtggtggcaggcacggcgggtccactctgacagtgagaccgacgacattgggttcatccccagcaaacggcgggttgagcgacgagagtggtcaaggttaaaggccaaggactggggctccagctctggatcgcagggtcgagaagactcggttctgagctacgagacagtgacgcagatggaagtgcactatgctcgccccatcatcatccttgggcccaccaaggaccgcgccaacgatgatcttctctccgagttccccgacaagtttggatcctgtgttccccatacgacacggcccaagcgggagtatgagatagatggccgggattaccactttgtgtcgtcccgggagaaaatggagaaggacattcaggcgcacaagttcattgaggccggccagtacaacagccacctctatgggaccagcgtccagtccgtgcgagaggtggcagagcaggggaagcactgcatcctcgatgtctcggccaatgccgtgcggcggctgcaggcggcccacctgcaccccatcgccatcttcatccgcccccgctccctggagaatgtgctagagattaacaagcggatcacagaggagcaagcccgcaaagccttcgacagagccaccaagctggagcaggagttcacagagtgcttctcagccatcgtggagggtgacagctttgaggagatctaccacaaggtgaagcgtgtcatcgaggacctctcaggcccctacatctgggttccagcccgagagagactctgattcctgccctggcttggcctggactcgccctgcctccatcacctgggcccttggtctggactgaattgcccaagcccttggctccccccggcctccctcccaccccttcttatttatttcctttctaactggatccagcctgttggaggggggacactcctctgcatgtatccccgcaccccagaactgggctcctgaacgccaggaacctggggtctgggggggagctgggctccttgttccgagcccttgctccttaggatccccgcccccacctgcccccaatgcacacacagacccaccgggggccacctgccctcccccatcctctcccacacacattccagaagtcagggccccctcgaggagcacccgctgcagggatgcagggccacaggcctccgctctctcctaaggcagggtctggggtcacccctgccctcatcgtaattccccatgttccttgatttctcatttattttttccactttttttcttctcaaaggtggttttttggggggagaagcaggggactccgcagcgggcccctgccttccacatgcccccaccatttttctttgccggtttgcatgagtggaaggtctaaatgtggcttttttttttttttttcctgggaatttttttggggaaaagggagggatgggtctagggagtgggaaatgcgggagggagggtggggggcaggggtcgggggtcgggtgtccgggagccagggaagactggaaatgctgccgccttctgcaatttatttatttttttcttttgagagagtgaaaggaagagacagatacttgaaa

SEQ ID NO: 8544 - DNA, 3103 bp, Homo sapiens
  source 1..3103: mol_type = unassigned DNA
agagtctagtcctccgacggggtgatgggataggatgggacagaagaggaaggggcttaagtcactgcagccagagggatggaggtggactgaagggagggcttctccggtggggttagaagggaaaagtagggaaagagaagtgtaaggtagatggcagaggcagagacatggaaagacagactctagggttcctgatgaaatctatctcggccaacacaaaagggagggtacagtggtggggggcacccaagctagggtgtgagtaccctaagtgtattcttctgagatgtaggccattcactaactcttggaacagctacagtttcacagtaggaagacccccccagattcactgcccctcccttagtaaagcctctgagaccttcctgaacattcccttctgtctttgccctctgttccttccagagaccatgtgcccaggcagatggattcctcccgggcctgagaggaactgcaggaattctcctgcctcttacccgtaaaaccccaacttctctagccctagggcaggaagtcccaaacaatttctacccctttttctgcaattctcattggggtgagaggaggcccaggaggagagagagctgggctcagcttctttttgagctgctggagccctctgtgaggaggccctctttgctggcttctcaggagagcgtggctaggttctgcctgcctatgggaagagggggccagggtgtgtggagcaagatggtggcggtgctggtgccttgggacctgggggaatgggacagctggtcggctcagagacggcctactttactcacagctggaatttagtggggagaagcagctcaactccaatcctggaggattagggagattaaagtgagagaagagagagatgtcccagagaccaagagctcccaggtcagccctctggctcctggcacccccactgctgcggtgggcacccccactcctcacagtgctgcatagcgacctcttccaggccttgctggacatcctggactattatgaggcttccctctcagagagtcagaaataccgctaccaagatgaagacacgccccctctggagcacagcccggcccacctccccaaccaggccaattctcccccagtgattgtcaacacagataccctagaagccccaggatatgagttgcaggtgaacgggaccgagggggagatggaatacgaggaaatcacattggaaaggggtaactcaggtctgggcttcagcatcgcaggtggcactgacaacccacacatcggtgacgacccatccattttcatcaccaagatcattcctggtggggctgcggcccaggatggccgcctcagggtcaacgacagcatcctgtttgtaaatgaagtggacgtgcgcgaggtgacccactcagcggcggtggaagccctcaaagaggcaggctccatcgttcgcctctatgtcatgcgccggaagcccccggctgagaaggtcatggagatcaagctcatcaaggggcctaaaggtcttggcttcagcatcgcagggggcgtagggaaccagcacatcccaggagataatagcatctatgtaacaaagatcatcgaagggggtgctgcccacaaggatgggaggttgcagattggagacaagatcctggcggtcaacagtgtggggctagaggacgtcatgcatgaagatgctgtggcagccctgaagaacacgtatgatgttgtctacctaaaggtggccaagcccagcaatgcctacctgagtgacagctatgctcccccagacatcacaacctcttattcccagcacctggacaatgagatcagtcacagcagctacctgggcaccgactaccccacagccatgacccccacttcccctcggcgctactctccagtggccaaggacctgctcggggaggaagacattccccgagaaccgaggcgaattgtgatccaccggggctccacgggcctgggcttcaacatcgtgggtggcgaggacggtgaaggcatcttcatctcctttatcctggccgggggccctgcagacctcagtggggagctgcggaagggggaccagatcctgtcggtcaacggtgtggacctccgaaatgccagccatgagcaggctgccattgccctgaagaatgcgggtcagacggtcacgatcatcgctcagtataaaccagaagagtacagccgattcgaggccaagatccacgaccttcgggaacagctcatgaacagcagcctgggctcagggactgcgtccctgcggagcaaccccaaaaggggtttctacatcagggccctgtttgattacgacaagaccaaggactgcggcttcctgagccaggccctgagcttccgctttggggatgtgctgcatgtcatcgatgctagtgatgaggagtggtggcaggcacggcgggtccactctgacagtgagaccgacgacattgggttcatccccagcaaacggcgggttgagcgacgagagtggtcaaggttaaaggccaaggactggggctccagctctggatcgcagggtcgagaagactcggttctgagctacgagacagtgacgcagatggaagtgcactatgctcgccccatcatcatccttgggcccaccaaggaccgcgccaacgatgatcttctctccgagttccccgacaagtttggatcctgtgttccccatacgacacggcccaagcgggagtatgagatagatggccgggattaccactttgtgtcgtcccgggagaaaatggagaaggacattcaggcgcacaagttcattgaggccggccagtacaacagccacctctatgggaccagcgtccagtccgtgcgagaggtggcagagcagagagattaacaagcggatcacagaggagcaagcccgcaaagccttcgacagagccaccaagctggagcaggagttcacagagtgcttctcagccatcgtggagggtgacagctttgaggagatctaccacaaggtgaagcgtgtcatcgaggacctctcaggcccctacatctgggttccagcccgagagagactctgattcctgccctggcttggcct

SEQ ID NO: 8545 - DNA, 6487 bp, Homo sapiens
  source 1..6487: mol_type = unassigned DNA
cggcgccctagggctgctgccgaggtgctcgcctgcccgcccgccggcctcggggggcccgggaggcgtccggcggggcggggcggcgcggcccgccaccatggagccccagcgccgggagctgctcgcccagtgtcagcagagcctggcccaggccatgacggaggtggaagccgtgctcgggctgctcgaggccgcgggagcgctcagtcccggcgagcggcggcagctggacgaggaggcgggaggcgccaaggcggagctgctgctcaagctgctcttggccaaggagcgggaccacttccaggacctgcgggcggcgctggagaagacgcagcctcacctgctgcccattctctacctgaacggcgtcgtcgggccgccgcagcccgccgaaggcgcgggttctacctacagcgtcctgtccaccatgccctcagactcagaaagcagcagctccctcagcagtgtgggcactaccgggaaggcgccgtccccaccacccctcctcactgaccagcaagtgaatgagaaggtggagaacctctccattcagctgcggctgatgacccgggagagaaacgagctccgcaagcgcctggcctttgctacgcatggcacggcctttgacaagaggccctaccacaggctgaatcctgactatgagaggctgaagatccagtgcgtgcgagccatgtcggacctgcagagcctgcagaaccagcacaccaacgccttgaagaggtgtgaggaggtggccaaggagactgacttctaccacacactccacagccggctcctgagtgaccagactcggctgaaggatgacgtggacatgctgaggcgggagaatgggcagctgctgcgggagcgaaacctgctgcagcagtcatgggaggacatgaagcggctccacgaggaggaccagaaggagatcggtgacctccgtgcccagcagcagcaggtgttgaagcacaacgggtcatccgagattctcaacaaactgtatgacacggccatggacaagttggaggtggtcaagaaggactatgacgcccttcggaagaggtacagtgagaaagtcgccatccacaatgcagacctgagccgcctggagcagctgggggaggagaaccagcggttgctgaagcagacagagatgctgacccagcagagggacacggccatccagctgcagcaccagtgcgccctctccctgaggaggtttgaggcgatccaccatgagctgaacaaggccacggcgcagaacaaggacctgcagtgggagatggagctgctgcagtcagagctgaccgagctgagaaccacgcaggtgaagacagcaaaggagtcggagaaatacagggaggagcgggacgctgtgtacagcgagtacaagctcatcatgagtgagcgtgaccaggtcatctctgagctggacaagctgcagaccgaagtggagctggccgagtccaagctcaagagcagcacatctgagaagaaggcggccaatgaggagatggaggcgctgcggcagatcaaagacacggtgacaatggatgctgggagagccaacaaggaggttgaaatccttcgaaagcagtgcaaggctctgtgccaggagctgaaggaagccctccaggaggcggatgtggccaagtgccggcgggactgggccttccaggagcgagacaagattgtagcagagcgtgacagcatccggacactgtgtgacaacctgaggcgggagcgggaccgtgcggtgagcgagctggctgaggccctgcgcagcctggatgacacccgcaagcagaagaatgatgtcagccgcgagctgaaggagctcaaggaacagatggaatcccagttggaaaaggaggcccggttccgacagctgatggcccacagctcccacgactcggccattgacacggattccatggagtgggaaacggaagttgtagagttcgagagggagacggaggatattgacttgaaggcactggggtttgatatggcagaaggtgtgaatgagccttgtttcccgggggactgtggcatatttgtcactaaagtggacaaaggaagcattgctgatggccgcttaagggtcaatgactggctgctgagaatcaacgatgtggacctcatcaacaaggacaagaagcaggccatcaaggcgctcctcaatggggagggggccatcaacatggtcgtgcggcggaggaagtccctgggtgggaaggtggtcacgccgctgcacatcaacctcagtggacagaaagacagtggcatcagtctggagaatggagtgtatgctgccgctgtgctgcctggaagccctgccgctaaagaagggtcccttgctgtgggagacaggatcgttgcgatcaatggcattgcactggacaacaagtctctgaatgaatgtgaatctctgctgcgcagctgccaggactccctgaccctgtccctcctgaaggaacagaagtgtgtcccggccagtggagaactctccccggagctccaggagtgggcaccttactcgcctgggcattccagccggcacagcaaccccccgctataccctagcaggccgtctgtgggcactgttccccggagtttgacccccagcaccactgtgagctccatcctgcggaaccccatctacactgtgcgcagtcacagggtcggcccctgcagctctccacctgcggcccgagatgctggcccccagggtttgcatcccagtgtccagcaccagggacgcctgagcctggacctgagccacaggacctgcagcgactactccgagatgagagccacccatgggtccaactcactgccctccagcgcccgcctgggttcttcgagtaacttgcagttcaaggcggaacgcattaaaatcccatcaacaccaagatatccgcggagtgtcgtgggctccgagagaggttcagtgtcacattctgaatgcagcactcctccacagtcacccctgaacatcgacaccctgtcctcttgtagccagtcccagacctcagcctccacattgcccagaatcgctgtcaaccccgcgtccctcggggagcggagaaaggacaggccttatgtggaggagccacgccacgtgaaggtgcagaagggctcagagccgctgggcatctccatcgtgagtggagagaagggcggcatctacgtctccaaggtgaccgtggggagcatcgctcaccaggctggcctcgagtatggggatcagttactggagttcaacggcataaacctgcggagcgccacggagcagcaggcgcggctcatcatcgggcagcagtgtgataccatcaccatcctggcccagtacaacccccacgtgcaccagctcagcagccactcccggtccagctcacacctggaccctgccggtacccactccactctccagggcagtggcaccaccaccccggagcatccatctgtcatcgacccactgatggagcaggacgaggggcctagcacccccccagccaagcagagcagctccaggattgcgggagatgccaacaagaagaccctggagccacgcgttgtcttcatcaaaaagtcccagctggagcttggggtgcacttgtgtggtgggaacctgcatggggtgtttgtggccgaggtggaggatgacagtcctgccaagggtcctgacggcctcgtgccaggggacctcatcctggagtatggcagcctggacgtgcggaacaagacagtggaggaagtctatgtggagatgctgaagcccagggatggcgtccgcctgaaggtgcagtaccgccctgaggagttcacgaaggccaagggcctgcctggtgacagcttctacatcagggccctgtacgaccggctggcagatgtggagcaagagttgagctttaagaaggacgacatcctctacgtggatgacaccttaccccagggcacgttcgggtcctggatggcttggcagctggacgagaatgcccagaagatccagcgcgggcagattcccagcaaatatgtgatggaccaagaattctccaggaggctcagcatgtctgaagtcaaagatgacaatagcgccacaaagacgctgtcagcggctgcacgccggtccttttttcggaggaaacacaagcacaaacgcagcgggtccaaggacgggaaagacctgctcgccttggatgccttttccagtgactccattccactctttgaagattcggtgagcctggcctatcagcgggtccagaaggtggactgcaccgctctgaggcctgtcctgattctggggcctttgctggacgtggtgaaggagatgctggtgaatgaggctcctggcaagttctgcagatgtccccttgaggtgatgaaggcctcccagcaggccattgagcggggtgtcaaagattgcctgtttgtcgactataagcggagaagcggccatttcgatgtgaccactgtggcgtcaataaaggagatcacagaaaagaaccgacactgcctcctggacattgctccgcacgctattgagcggctccaccacatgcacatctaccccattgtcatcttcatccactacaagagcgccaagcacatcaaggagcagagagaccccatctacctgagggacaaggtgactcagaggcattccaaagagcagtttgaggcggcgcagaagcttgagcaggagtacagcaggtacttcacaggggtcatccagggaggagccctgtcaagcatttgcactcagatcttggcaatggtcaatcaagaacaaaataaagtcctgtggattccagcctgcccgctctaggagaatgctgtgctgtggatgactgcagctggccgcctgaggggacaccagactcagctcttttctagcgactgaaagtagaagtctgtccgtctatgaacatgcgggggaaggatccggaaccaggacccagaagcacctcctttgtagacagagggccacggctgcgtgcgatccaggcccaggcccacacactctgcccgtgtcacacgtgtgctttaacacaaaacagataacactaaagacgggttcagcacccacctttctttagccagctgatcagagatgctgcaaagagaacctttcggatcactcgtttacaagccttttctaagtatttggtggtttatgtttacttgaacggctccatgttgccggtgcccagcccctgtcccctctgtcaaccccctgtcgctttggtgttggtttcgttcccgtcttcagcaaaacgaccttggaacctcaatgggggctgctttgctttgggaggttcttgttggtgggaccagagctttgacaaacctcctgctccttggtggcacctctcctggaaggacgtcacaactccaggtgctcagactgcctgtggcagcagaaccagtgcctttggcattttcctcccacaatggggaaggtgactttggcattcttacaaactcgtctctcggcctttctctcctgccttccacagcctctcgtttctcctccatctgtgcttattacttgaggactgtgtctgctccgtgagagctgcgtgggcagggctgcagtggggtccaggtggtgttcagctgtgctgatgcctgccattgggtcctccttaggctctgtaagtcgtgacagccttcatcagtgcaatgtttgcagggtaattcttaaactttttagagggtggcaggtacatcagttctttttgatatgaaaacattcatgtttcagacattgaattgagagcttttaggggaagcataatggttattgtcactatcaacagtctaaaaagaaaaactgaggtctttttaatcttgattacagcactcacggcatgcaccctactcagtgtgggtgtcttcgtttgggggctttttttttttttgcacttctgaggctagatatgtctggctgaagatttgatgtggttcctccttaagctatgcgtcctgttaataataggtactgtactgggctctgtgtaagtgtcgttggggtaggacctatattttaatactgttcctaacatttcattttactagcgagaaatctttgatttcattttattctttgtaattctagacactagattgtagtttagccataactgatgttttttaaaaagggatatattttcttgcacagttgttcaaaaaagagacaagtttcagtcctcaatgctgtcctttgttttacaggtacaagttttctagctcagacaaactatgaaaaactgtagactattctcaaggtattaactcgcagaccctctgggggtaggggctgttttctaagttacaggcagagtgggactgagatggtacagtgtgcacagacaggtactgagctgacagactgggattttctgtactaaaatgttactttgtatcaaaagttaaacaggctttagtacaacaaataaaggtcaatttctgt

SEQ ID NO: 8546 - DNA, 7415 bp, Homo sapiens
  source 1..7415: mol_type = unassigned DNA
gccaccatggagccccagcgccgggagctgctcgcccagtgtcagcagagcctggcccaggccatgacggaggtggaagccgtgctcgggctgctcgaggccgcgggagcgctcagtcccggcgagcggcggcagctggacgaggaggcgggaggcgccaaggcggagctgctgctcaagctgctcttggccaaggagcgggaccacttccaggacctgcgggcggcgctggagaagacgcagcctcacctgctgcccattctctacctgaacggcgtcgtcgggccgccgcagcccgccgaaggcgcgggttctacctacagcgtcctgtccaccatgccctcagactcagaaagcagcagctccctcagcagtgtgggcactaccgggaaggcgccgtccccaccacccctcctcactgaccagcaagtgaatgagaaggtggagaacctctccattcagctgcggctgatgacccgggagagaaacgagctccgcaagcgcctggcctttgctacgcatggcacggcctttgacaagaggccctaccacaggctgaatcctgactatgagaggctgaagatccagtgcgtgcgagccatgtcggacctgcagagcctgcagaaccagcacaccaacgccttgaagaggtgtgaggaggtggccaaggagactgacttctaccacacactccacagccggctcctgagtgaccagactcggctgaaggatgacgtggacatgctgaggcgggagaatgggcagctgctgcgggagcgaaacctgctgcagcagtcatgggaggacatgaagcggctccacgaggaggaccagaaggagatcggtgacctccgtgcccagcagcagcaggtgttgaagcacaacgggtcatccgagattctcaacaaactgtatgacacggccatggacaagttggaggtggtcaagaaggactatgacgcccttcggaagaggtacagtgagaaagtcgccatccacaatgcagacctgagccgcctggagcagctgggggaggagaaccagcggttgctgaagcagacagagatgctgacccagcagagggacacggccatccagctgcagcaccagtgcgccctctccctgaggaggtttgaggcgatccaccatgagctgaacaaggccacggcgcagaacaaggacctgcagtgggagatggagctgctgcagtcagagctgaccgagctgagaaccacgcaggtgaagacagcaaaggagtcggagaaatacagggaggagcgggacgctgtgtacagcgagtacaagctcatcatgagtgagcgtgaccaggtcatctctgagctggacaagctgcagaccgaagtggagctggccgagtccaagctcaagagcagcacatctgagaagaaggcggccaatgaggagatggaggcgctgcggcagatcaaagacacggtgacaatggatgctgggagagccaacaaggaggttgaaatccttcgaaagcagtgcaaggctctgtgccaggagctgaaggaagccctccaggaggcggatgtggccaagtgccggcgggactgggccttccaggagcgagacaagattgtagcagagcgtgacagcatccggacactgtgtgacaacctgaggcgggagcgggaccgtgcggtgagcgagctggctgaggccctgcgcagcctggatgacacccgcaagcagaagaatgatgtcagccgcgagctgaaggagctcaaggaacagatggaatcccagttggaaaaggaggcccggttccgacagctgatggcccacagctcccacgactcggccattgacacggattccatggagtgggaaacggaagttgtagagttcgagagggagacggaggatattgacttgaaggcactggggtttgatatggcagaaggtgtgaatgagccttgtttcccgggggactgtggcatatttgtcactaaagtggacaaaggaagcattgctgatggccgcttaagggtcaatgactggctgctgagaatcaacgatgtggacctcatcaacaaggacaagaagcaggccatcaaggcgctcctcaatggggagggggccatcaacatggtcgtgcggcggaggaagtccctgggtgggaaggtggtcacgccgctgcacatcaacctcagtggacagaaagacagtggcatcagtctggagaatggagtgtatgctgccgctgtgctgcctggaagccctgccgctaaagaagggtcccttgctgtgggagacaggatcgttgcgatcaatggcattgcactggacaacaagtctctgaatgaatgtgaatctctgctgcgcagctgccaggactccctgaccctgtccctcctgaaggtattccctcagagctcctcgtggagtggccagaacatttttgaaaatatcaaagactctgataagatgctgagttttcgagcccatggcccggaggtccaggctcataacaaacggaacttgatacagcacaataactccacgcagacagacatcttctacacggacaggctggaagacaggaaggagccaggccccccaggaggcagcagctcctttctgcataagccattccctgggggacccttgcaggtctgcccccaggcctgtcccagtgcctctgagcgtagcctgagctccttccgctcagatgcctctggggaccgtggctttgggctggtggacgtgcgtggccggcggccactgctgccctttgagaccgaggtgggcccctgtggggttggggaggcctccctggacaaggcagactctgaaggctccaacagcggcgggacctggcccaaggccatgctcagctccacggcagtgcctgagaagctctctgtttataaaaagccaaagcaaagaaagtccatctttgaccctaacactttcaaacgcccccagacaccccccaaaatagactacctgcttccaggtcctgggcctgctcactctccccagccctccaagagggcggggcctctgacacccccaaaacctcccagaaggagcgactccattaagttccagcacaggctggagactagctccgagtcagaagccactctggtgggcagctccccatccactagtcccccgagcgccctgccccctgacgtggaccccggggagcccatgcacgcatcaccccctcgcaaggccagggtccgcattgcttccagctactaccctgaaggagatggggactcctcccacctgccggccaagaaatcctgtgatgaggacctcacctcccagaaggtggatgagctggggcagaagcgtcgccggccaaaatctgctcccagttttcggccgaagcttgctccagtagtgattcctgctcagttcctggaggaacagaagtgtgtcccggccagtggagaactctccccggagctccaggagtgggcaccttactcgcctgggcattccagccggcacagcaaccccccgctataccctagcaggccgtctgtgggcactgttccccggagtttgacccccagcaccactgtgagctccatcctgcggaaccccatctacactgtgcgcagtcacagggtcggcccctgcagctctccacctgcggcccgagatgctggcccccagggtttgcatcccagtgtccagcaccagggacgcctgagcctggacctgagccacaggacctgcagcgactactccgagatgagagccacccatgggtccaactcactgccctccagcgcccgcctgggttcttcgagtaacttgcagttcaaggcggaacgcattaaaatcccatcaacaccaagatatccgcggagtgtcgtgggctccgagagaggttcagtgtcacattctgaatgcagcactcctccacagtcacccctgaacatcgacaccctgtcctcttgtagccagtcccagacctcagcctccacattgcccagaatcgctgtcaaccccgcgtccctcggggagcggagaaaggacaggccttatgtggaggagccacgccacgtgaaggtgcagaagggctcagagccgctgggcatctccatcgtgagtggagagaagggcggcatctacgtctccaaggtgaccgtggggagcatcgctcaccaggctggcctcgagtatggggatcagttactggagttcaacggcataaacctgcggagcgccacggagcagcaggcgcggctcatcatcgggcagcagtgtgataccatcaccatcctggcccagtacaacccccacgtgcaccagctcagcagccactcccggtccagctcacacctggaccctgccggtacccactccactctccagggcagtggcaccaccaccccggagcatccatctgtcatcgacccactgatggagcaggacgaggggcctagcacccccccagccaagcagagcagctccaggattgcgggagatgccaacaagaagaccctggagccacgcgttgtcttcatcaaaaagtcccagctggagcttggggtgcacttgtgtggtgggaacctgcatggggtgtttgtggccgaggtggaggatgacagtcctgccaagggtcctgacggcctcgtgccaggggacctcatcctggagtatggcagcctggacgtgcggaacaagacagtggaggaagtctatgtggagatgctgaagcccagggatggcgtccgcctgaaggtgcagtaccgccctgaggagttcacgaaggccaagggcctgcctggtgacagcttctacatcagggccctgtacgaccggctggcagatgtggagcaagagttgagctttaagaaggacgacatcctctacgtggatgacaccttaccccagggcacgttcgggtcctggatggcttggcagctggacgagaatgcccagaagatccagcgcgggcagattcccagcaaatatgtgatggaccaagaattctccaggaggctcagcatgtctgaagtcaaagatgacaatagcgccacaaagacgctgtcagcggctgcacgccggtccttttttcggaggaaacacaagcacaaacgcagcgggtccaaggacgggaaagacctgctcgccttggatgccttttccagtgactccattccactctttgaagattcggtgagcctggcctatcagcgggtccagaaggtggactgcaccgctctgaggcctgtcctgattctggggcctttgctggacgtggtgaaggagatgctggtgaatgaggctcctggcaagttctgcagatgtccccttgaggtgatgaaggcctcccagcaggccattgagcggggtgtcaaagattgcctgtttgtcgactataagcggagaagcggccatttcgatgtgaccactgtggcgtcaataaaggagatcacagaaaagaaccgacactgcctcctggacattgctccgcacgctattgagcggctccaccacatgcacatctaccccattgtcatcttcatccactacaagagcgccaagcacatcaaggagcagagagaccccatctacctgagggacaaggtgactcagaggcattccaaagagcagtttgaggcggcgcagaagcttgagcaggagtacagcaggtacttcacaggggtcatccagggaggagccctgtcaagcatttgcactcagatcttggcaatggtcaatcaagaacaaaataaagtcctgtggattccagcctgcccgctctaggagaatgctgtgctgtggatgactgcagctggccgcctgaggggacaccagactcagctcttttctagcgactgaaagtagaagtctgtccgtctatgaacatgcgggggaaggatccggaaccaggacccagaagcacctcctttgtagacagagggccacggctgcgtgcgatccaggcccaggcccacacactctgcccgtgtcacacgtgtgctttaacacaaaacagataacactaaagacgggttcagcacccacctttctttagccagctgatcagagatgctgcaaagagaacctttcggatcactcgtttacaagccttttctaagtatttggtggtttatgtttacttgaacggctccatgttgccggtgcccagcccctgtcccctctgtcaaccccctgtcgctttggtgttggtttcgttcccgtcttcagcaaaacgaccttggaacctcaatgggggctgctttgctttgggaggttcttgttggtgggaccagagctttgacaaacctcctgctccttggtggcacctctcctggaaggacgtcacaactccaggtgctcagactgcctgtggcagcagaaccagtgcctttggcattttcctcccacaatggggaaggtgactttggcattcttacaaactcgtctctcggcctttctctcctgccttccacagcctctcgtttctcctccatctgtgcttattacttgaggactgtgtctgctccgtgagagctgcgtgggcagggctgcagtggggtccaggtggtgttcagctgtgctgatgcctgccattgggtcctccttaggctctgtaagtcgtgacagccttcatcagtgcaatgtttgcagggtaattcttaaactttttagagggtggcaggtacatcagttctttttgatatgaaaacattcatgtttcagacattgaattgagagcttttaggggaagcataatggttattgtcactatcaacagtctaaaaagaaaaactgaggtctttttaatcttgattacagcactcacggcatgcaccctactcagtgtgggtgtcttcgtttgggggctttttttttttttgcacttctgaggctagatatgtctggctgaagatttgatgtggttcctccttaagctatgcgtcctgttaataataggtactgtactgggctctgtgtaagtgtcgttggggtaggacctatattttaatactgttcctaacatttcattttactagcgagaaatctttgatttcattttattctttgtaattctagacactagattgtagtttagccataactgatgttttttaaaaagggatatattttcttgcacagttgttcaaaaaagagacaagtttcagtcctcaatgctgtcctttgttttacaggtacaagttttctagctcagacaaactatgaaaaactgtagactattctcaaggtattaactcgcagaccctctgggggtaggggctgttttctaagttacaggcagagtgggactgagatggtacagtgtgcacagacaggtactgagctgacagactgggattttctgtactaaaatgttactttgtatcaaaagttaaacaggctttagtacaacaaataaaggtcaatttctgtaa

SEQ ID NO: 8547 - DNA, 6154 bp, Homo sapiens
  source 1..6154: mol_type = unassigned DNA
cggcgccctagggctgctgccgaggtgctcgcctgcccgcccgccggcctcggggggcccgggaggcgtccggcggggcggggcggcgcggcccgccaccatggagccccagcgccgggagctgctcgcccagtgtcagcagagcctggcccaggccatgacggaggtggaagccgtgctcgggctgctcgaggccgcgggagcgctcagtcccggcgagcggcggcagctggacgaggaggcgggaggcgccaaggcggagctgctgctcaagctgctcttggccaaggagcgggaccacttccaggacctgcgggcggcgctggagaagacgcagcctcacctgctgcccattctctacctgaacggcgtcgtcgggccgccgcagcccgccgaaggcgcgggttctacctacagcgtcctgtccaccatgccctcagactcagaaagcagcagctccctcagcagtgtgggcactaccgtaaaacatttgagggaacagatggaatcccagttggaaaaggaggcccggttccgacagctgatggcccacagctcccacgactcggccattgacacggattccatggagtgggaaacggaagttgtagagttcgagagggagacggaggatattgacttgaaggcactggggtttgatatggcagaaggtgtgaatgagccttgtttcccgggggactgtggcatatttgtcactaaagtggacaaaggaagcattgctgatggccgcttaagggtcaatgactggctgctgagaatcaacgatgtggacctcatcaacaaggacaagaagcaggccatcaaggcgctcctcaatggggagggggccatcaacatggtcgtgcggcggaggaagtccctgggtgggaaggtggtcacgccgctgcacatcaacctcagtggacagaaagacagtggcatcagtctggagaatggagtgtatgctgccgctgtgctgcctggaagccctgccgctaaagaagggtcccttgctgtgggagacaggatcgttgcgatcaatggcattgcactggacaacaagtctctgaatgaatgtgaatctctgctgcgcagctgccaggactccctgaccctgtccctcctgaaggtattccctcagagctcctcgtggagtggccagaacatttttgaaaatatcaaagactctgataagatgctgagttttcgagcccatggcccggaggtccaggctcataacaaacggaacttgatacagcacaataactccacgcagacagacatcttctacacggacaggctggaagacaggaaggagccaggccccccaggaggcagcagctcctttctgcataagccattccctgggggacccttgcaggtctgcccccaggcctgtcccagtgcctctgagcgtagcctgagctccttccgctcagatgcctctggggaccgtggctttgggctggtggacgtgcgtggccggcggccactgctgccctttgagaccgaggtgggcccctgtggggttggggaggcctccctggacaaggcagactctgaaggctccaacagcggcgggacctggcccaaggccatgctcagctccacggcagtgcctgagaagctctctgtttataaaaagccaaagcaaagaaagtccatctttgaccctaacactttcaaacgcccccagacaccccccaaaatagactacctgcttccaggtcctgggcctgctcactctccccagccctccaagagggcggggcctctgacacccccaaaacctcccagaaggagcgactccattaagttccagcacaggctggagactagctccgagtcagaagccactctggtgggcagctccccatccactagtcccccgagcgccctgccccctgacgtggaccccggggagcccatgcacgcatcaccccctcgcaaggccagggtccgcattgcttccagctactaccctgaaggagatggggactcctcccacctgccggccaagaaatcctgtgatgaggacctcacctcccagaaggtggatgagctggggcagaagcgtcgccggccaaaatctgctcccagttttcggccgaagcttgctccagtagtgattcctgctcagttcctggaggaacagaagtgtgtcccggccagtggagaactctccccggagctccaggagtgggcaccttactcgcctgggcattccagccggcacagcaaccccccgctataccctagcaggccgtctgtgggcactgttccccggagtttgacccccagcaccactgtgagctccatcctgcggaaccccatctacactgtgcgcagtcacagggtcggcccctgcagctctccacctgcggcccgagatgctggcccccagggtttgcatcccagtgtccagcaccagggacgcctgagcctggacctgagccacaggacctgcagcgactactccgagatgagagccacccatgggtccaactcactgccctccagcgcccgcctgggttcttcgagtaacttgcagttcaaggcggaacgcattaaaatcccatcaacaccaagatatccgcggagtgtcgtgggctccgagagaggttcagtgtcacattctgaatgcagcactcctccacagtcacccctgaacatcgacaccctgtcctcttgtagccagtcccagacctcagcctccacattgcccagaatcgctgtcaaccccgcgtccctcggggagcggagaaaggacaggccttatgtggaggagccacgccacgtgaaggtgcagaagggctcagagccgctgggcatctccatcgtgagtggagagaagggcggcatctacgtctccaaggtgaccgtggggagcatcgctcaccaggctggcctcgagtatggggatcagttactggagttcaacggcataaacctgcggagcgccacggagcagcaggcgcggctcatcatcgggcagcagtgtgataccatcaccatcctggcccagtacaacccccacgtgcaccagctcagcagccactcccggtccagctcacacctggaccctgccggtacccactccactctccagggcagtggcaccaccaccccggagcatccatctgtcatcgacccactgatggagcaggacgaggggcctagcacccccccagccaagcagagcagctccaggattgcgggagatgccaacaagaagaccctggagccacgcgttgtcttcatcaaaaagtcccagctggagcttggggtgcacttgtgtggtgggaacctgcatggggtgtttgtggccgaggtggaggatgacagtcctgccaagggtcctgacggcctcgtgccaggggacctcatcctggagtatggcagcctggacgtgcggaacaagacagtggaggaagtctatgtggagatgctgaagcccagggatggcgtccgcctgaaggtgcagtaccgccctgaggagttcacgaaggccaagggcctgcctggtgacagcttctacatcagggccctgtacgaccggctggcagatgtggagcaagagttgagctttaagaaggacgacatcctctacgtggatgacaccttaccccagggcacgttcgggtcctggatggcttggcagctggacgagaatgcccagaagatccagcgcgggcagattcccagcaaatatgtgatggaccaagaattctccaggaggctcagcatgtctgaagtcaaagatgacaatagcgccacaaagacgctgtcagcggctgcacgccggtccttttttcggaggaaacacaagcacaaacgcagcgggtccaaggacgggaaagacctgctcgccttggatgccttttccagtgactccattccactctttgaagattcggtgagcctggcctatcagcgggtccagaaggtggactgcaccgctctgaggcctgtcctgattctggggcctttgctggacgtggtgaaggagatgctggtgaatgaggctcctggcaagttctgcagatgtccccttgaggtgatgaaggcctcccagcaggccattgagcggggtgtcaaagattgcctgtttgtcgactataagcggagaagcggccatttcgatgtgaccactgtggcgtcaataaaggagatcacagaaaagaaccgacactgcctcctggacattgctccgcacgctattgagcggctccaccacatgcacatctaccccattgtcatcttcatccactacaagagcgccaagcacatcaaggagcagagagaccccatctacctgagggacaaggtgactcagaggcattccaaagagcagtttgaggcggcgcagaagcttgagcaggagtacagcaggtacttcacaggggtcatccagggaggagccctgtcaagcatttgcactcagatcttggcaatggtcaatcaagaacaaaataaagtcctgtggattccagcctgcccgctctaggagaatgctgtgctgtggatgactgcagctggccgcctgaggggacaccagactcagctcttttctagcgactgaaagtagaagtctgtccgtctatgaacatgcgggggaaggatccggaaccaggacccagaagcacctcctttgtagacagagggccacggctgcgtgcgatccaggcccaggcccacacactctgcccgtgtcacacgtgtgctttaacacaaaacagataacactaaagacgggttcagcacccacctttctttagccagctgatcagagatgctgcaaagagaacctttcggatcactcgtttacaagccttttctaagtatttggtggtttatgtttacttgaacggctccatgttgccggtgcccagcccctgtcccctctgtcaaccccctgtcgctttggtgttggtttcgttcccgtcttcagcaaaacgaccttggaacctcaatgggggctgctttgctttgggaggttcttgttggtgggaccagagctttgacaaacctcctgctccttggtggcacctctcctggaaggacgtcacaactccaggtgctcagactgcctgtggcagcagaaccagtgcctttggcattttcctcccacaatggggaaggtgactttggcattcttacaaactcgtctctcggcctttctctcctgccttccacagcctctcgtttctcctccatctgtgcttattacttgaggactgtgtctgctccgtgagagctgcgtgggcagggctgcagtggggtccaggtggtgttcagctgtgctgatgcctgccattgggtcctccttaggctctgtaagtcgtgacagccttcatcagtgcaatgtttgcagggtaattcttaaactttttagagggtggcaggtacatcagttctttttgatatgaaaacattcatgtttcagacattgaattgagagcttttaggggaagcataatggttattgtcactatcaacagtctaaaaagaaaaactgaggtctttttaatcttgattacagcactcacggcatgcaccctactcagtgtgggtgtcttcgtttgggggctttttttttttttgcacttctgaggctagatatgtctggctgaagatttgatgtggttcctccttaagctatgcgtcctgttaataataggtactgtactgggctctgtgtaagtgtcgttggggtaggacctatattttaatactgttcctaacatttcattttactagcgagaaatctttgatttcattttattctttgtaattctagacactagattgtagtttagccataactgatgttttttaaaaagggatatattttcttgcacagttgttcaaaaaagagacaagtttcagtcctcaatgctgtcctttgttttacaggtacaagttttctagctcagacaaactatgaaaaactgtagactattctcaaggtattaactcgcagaccctctgggggtaggggctgttttctaagttacaggcagagtgggactgagatggtacagtgtgcacagacaggtactgagctgacagactgggattttctgtactaaaatgttactttgtatcaaaagttaaacaggctttagtacaacaaataaaggtcaatttctgt

SEQ ID NO: 8548 - DNA, 4292 bp, Homo sapiens
  source 1..4292: mol_type = unassigned DNA
ggggccatcaacatggtcgtgcggcggaggaagtccctgggtgggaaggtggtcacgccgctgcacatcaacctcagtggacagaaagacagtggcatcagtctggagaatggagtgtatgctgccgctgtgctgcctggaagccctgccgctaaagaagggtcccttgctgtgggagacaggatcgttgcgatcaatggcattgcactggacaacaagtctctgaatgaatgtgaatctctgctgcgcagctgccaggactccctgaccctgtccctcctgaaggaacagaagtgtgtcccggccagtggagaactctccccggagctccaggagtgggcaccttactcgcctgggcattccagccggcacagcaaccccccgctataccctagcaggccgtctgtgggcactgttccccggagtttgacccccagcaccactgtgagctccatcctgcggaaccccatctacactgtgcgcagtcacagggtcggcccctgcagctctccacctgcggcccgagatgctggcccccagggtttgcatcccagtgtccagcaccagggacgcctgagcctggacctgagccacaggacctgcagcgactactccgagatgagagccacccatgggtccaactcactgccctccagcgcccgcctgggttcttcgagtaacttgcagttcaaggcggaacgcattaaaatcccatcaacaccaagatatccgcggagtgtcgtgggctccgagagaggttcagtgtcacattctgaatgcagcactcctccacagtcacccctgaacatcgacaccctgtcctcttgtagccagtcccagacctcagcctccacattgcccagaatcgctgtcaaccccgcgtccctcggggagcggagaaaggacaggccttatgtggaggagccacgccacgtgaaggtgcagaagggctcagagccgctgggcatctccatcgtgagtggagagaagggcggcatctacgtctccaaggtgaccgtggggagcatcgctcaccaggctggcctcgagtatggggatcagttactggagttcaacggcataaacctgcggagcgccacggagcagcaggcgcggctcatcatcgggcagcagtgtgataccatcaccatcctggcccagtacaacccccacgtgcaccagctcagcagccactcccggtccagctcacacctggaccctgccggtacccactccactctccagggcagtggcaccaccaccccggagcatccatctgtcatcgacccactgatggagcaggacgaggggcctagcacccccccagccaagcagagcagctccaggattgcgggagatgccaacaagaagaccctggagccacgcgttgtcttcatcaaaaagtcccagctggagcttggggtgcacttgtgtggtgggaacctgcatggggtgtttgtggccgaggtggaggatgacagtcctgccaagggtcctgacggcctcgtgccaggggacctcatcctggagtatggcagcctggacgtgcggaacaagacagtggaggaagtctatgtggagatgctgaagcccagggatggcgtccgcctgaaggtgcagtaccgccctgaggagttcacgaaggccaagggcctgcctggtgacagcttctacatcagggccctgtacgaccggctggcagatgtggagcaagagttgagctttaagaaggacgacatcctctacgtggatgacaccttaccccagggcacgttcgggtcctggatggcttggcagctggacgagaatgcccagaagatccagcgcgggcagattcccagcaaatatgtgatggaccaagaattctccaggaggctcagcatgtctgaagtcaaagatgacaatagcgccacaaagacgctgtcagcggctgcacgccggtccttttttcggaggaaacacaagcacaaacgcagcgggtccaaggacgggaaagacctgctcgccttggatgccttttccagtgactccattccactctttgaagattcggtgagcctggcctatcagcgggtccagaaggtggactgcaccgctctgaggcctgtcctgattctggggcctttgctggacgtggtgaaggagatgctggtgaatgaggctcctggcaagttctgcagatgtccccttgaggtgatgaaggcctcccagcaggccattgagcggggtgtcaaagattgcctgtttgtcgactataagcggagaagcggccatttcgatgtgaccactgtggcgtcaataaaggagatcacagaaaagaaccgacactgcctcctggacattgctccgcacgctattgagcggctccaccacatgcacatctaccccattgtcatcttcatccactacaagagcgccaagcacatcaaggagcagagagaccccatctacctgagggacaaggtgactcagaggcattccaaagagcagtttgaggcggcgcagaagcttgagcaggagtacagcaggtacttcacaggggtcatccagggaggagccctgtcaagcatttgcactcagatcttggcaatggtcaatcaagaacaaaataaagtcctgtggattccagcctgcccgctctaggagaatgctgtgctgtggatgactgcagctggccgcctgaggggacaccagactcagctcttttctagcgactgaaagtagaagtctgtccgtctatgaacatgcgggggaaggatccggaaccaggacccagaagcacctcctttgtagacagagggccacggctgcgtgcgatccaggcccaggcccacacactctgcccgtgtcacacgtgtgctttaacacaaaacagataacactaaagacgggttcagcacccacctttctttagccagctgatcagagatgctgcaaagagaacctttcggatcactcgtttacaagccttttctaagtatttggtggtttatgtttacttgaacggctccatgttgccggtgcccagcccctgtcccctctgtcaaccccctgtcgctttggtgttggtttcgttcccgtcttcagcaaaacgaccttggaacctcaatgggggctgctttgctttgggaggttcttgttggtgggaccagagctttgacaaacctcctgctccttggtggcacctctcctggaaggacgtcacaactccaggtgctcagactgcctgtggcagcagaaccagtgcctttggcattttcctcccacaatggggaaggtgactttggcattcttacaaactcgtctctcggcctttctctcctgccttccacagcctctcgtttctcctccatctgtgcttattacttgaggactgtgtctgctccgtgagagctgcgtgggcagggctgcagtggggtccaggtggtgttcagctgtgctgatgcctgccattgggtcctccttaggctctgtaagtcgtgacagccttcatcagtgcaatgtttgcagggtaattcttaaactttttagagggtggcaggtacatcagttctttttgatatgaaaacattcatgtttcagacattgaattgagagcttttaggggaagcataatggttattgtcactatcaacagtctaaaaagaaaaactgaggtctttttaatcttgattacagcactcacggcatgcaccctactcagtgtgggtgtcttcgtttgggggctttttttttttttgcacttctgaggctagatatgtctggctgaagatttgatgtggttcctccttaagctatgcgtcctgttaataataggtactgtactgggctctgtgtaagtgtcgttggggtaggacctatattttaatactgttcctaacatttcattttactagcgagaaatctttgatttcattttattctttgtaattctagacactagattgtagtttagccataactgatgttttttaaaaagggatatattttcttgcacagttgttcaaaaaagagacaagtttcagtcctcaatgctgtcctttgttttacaggtacaagttttctagctcagacaaactatgaaaaactgtagactattctcaaggtattaactcgcagaccctctgggggtaggggctgttttctaagttacaggcagagtgggactgagatggtacagtgtgcacagacaggtactgagctgacagactgggattttctgtactaaaatgttactttgtatcaaaagttaaacaggctttagtacaacaaataaaggtcaatttctgtaa

SEQ ID NO: 8549 - DNA, 4256 bp, Homo sapiens
  source 1..4256: mol_type = unassigned DNA
tacgagcggctgtgaaggaaactgtttaaccggatcccattgtacccagagtgcagagccgcctttccagcatgcaggggctgctcagcgtttagtcacatcaagaaatagaacagaattcagccatggccccaagaaagagaggtggacgaggtatttcattcatcttttgctgtttccgaaataatgatcacccagaaatcacgtatcggctgcgaaatgatagcaactttgcgcttcagaccatggaaccagcattgcccatgccccctgtggaggagctggatgtcatgttcagtgaactggtggatgaactggacctcacagacaaacacagagaagccatgtttgcacttccagctgagaaaaaatggcaaatatactgtagcaagaaaaaggaccaggaagaaaacaagggagctacaagttggcctgaattctacattgatcagctcaattccatggctgctagaaaatctctgctggctttagagaaggaagaagaagaagaaagaagtaaaactatagagagtttaaagacagcactgaggacaaaaccaatgaggtttgtaaccagattcatcgacttggatggcctatcatgtatcctcaactttctaaagaccatggactacgagacctcagagtctcgaatacatacttctctcattggctgtataaaggcgttaatgaacaactctcaaggccgggctcacgtcctggctcattctgagagtattaatgtaattgctcagagtctgagcacagagaacattaaaacgaaggtggccgtgctggaaatcttgggcgccgtgtgcctggttcccgggggccacaagaaggttctgcaggccatgctgcactaccagaagtatgccagcgaaaggacccgctttcagacattaattaacgacttggataaaagcactgggcggtatcgagatgaagtgagtctcaagactgccatcatgtccttcattaatgcagtgctcagccaaggtgcaggagtggagagtttggactttagacttcatcttcgctatgaatttctgatgttaggaattcaacctgtaatagataaattaagggaacacgaaaattcaacattagataggcatttagacttttttgaaatgctccgaaatgaagatgaactagaatttgccaaaagatttgaactggttcacatagacacaaaaagtgcaactcagatgtttgagctgaccaggaagaggctgacacatagtgaagcttacccgcatttcatgtccatcctgcaccactgcctccaaatgccttacaagaggagtggcaacactgttcagtactggctactactagatagaattatacagcagatagttatccagaatgacaaaggacaggaccctgactccacacctttggaaaactttaatattaagaatgtcgtacgaatgttggttaatgaaaatgaagttaagcagtggaaagaacaagcggaaaaaatgagaaaagagcacaatgagctacaacagaaactggaaaagaaagaacgagaatgtgatgctaagactcaagagaaggaagagatgatgcagaccttaaataaaatgaaagagaaacttgaaaaggagactactgagcataagcaagtcaagcagcaggtggcggacctcacagcacagctccatgagctcagcaggagggccgtctgtgcttcaatcccaggtggaccctcgcctggagcaccaggagggccctttccttcctctgtgcctggatctctccttcctcccccaccacccccacctctaccaggtgggatgcttccccctccaccgcctcccctccctccaggtggccctcctcctcccccagggcctcctcccttaggggcaatcatgccacctcctggtgctccaatgggcctagcactgaagaagaaaagcattcctcagcccacaaatgccctgaaatccttcaactggtctaaactgcccgagaacaaactggaaggaacagtatggaccgaaattgatgatacaaaagtcttcaaaattctagatcttgaagacctggaaagaaccttctctgcctatcaaagacagcaggatttctttgtgaacagtaactccaagcagaaagaagcagatgccattgatgacactctgagttccaaacttaaagttaaagagctttcggtgattgatggtcggagagctcagaattgcaacatccttctatcgaggttgaaattatccaatgacgaaatcaaacgggcaattctaacaatggacgaacaggaagatctgcccaaggacatgttggaacagctcttgaaatttgttcctgaaaaaagtgacattgacctattggaggaacataaacacgaactggatcggatggccaaggctgataggttcctttttgagatgagccgaattaatcactatcagcaaaggttgcaatcgctgtacttcaaaaagaagtttgcagagcgtgtggcagaagtgaaacctaaagtggaagcaattcgttctggctcagaagaggtgtttaggagtggtgccctcaagcagttgctggaggtggttttggcatttggaaattatatgaataaaggtcaaagagggaatgcatatggattcaagatatctagcctaaacaaaattgctgacacaaaatccagcatcgacaaaaacattacccttttgcactatctcatcactattgtggaaaataagtaccccagtgttctcaatctaaatgaagaattgcgagatattcctcaagctgcgaaagtaaacatgactgagctggacaaagaaataagtaccttgagaagtggcttgaaagcagtagagacagagctggaatatcagaagtctcagcccccacagcccggagataagtttgtgtctgttgtcagccagttcatcacagtagccagcttcagcttctctgatgttgaagaccttctagcagaagctaaagacctgtttactaaagcagtgaagcactttggggaagaggctggcaaaatacaaccagatgagttctttggcatttttgatcaatttcttcaagctgtgtcagaagccaaacaagaaaacgaaaatatgagaaagaaaaaggaggaagaagaacgtcgagctcgcatggaagctcagctcaaagaacaacgtgaaagggaacgtaaaatgagaaaagctaaagagaatagtgaagaaagcggagagtttgatgaccttgtttcagctttacgctcaggagaagtgtttgacaaagacctttctaaattgaaacggaatcgcaaacgtattaccaaccagatgactgacagcagcagagagagaccaatcacaaaacttaatttctaattttccatgaatacttttttttagaaagctcattagcagccctctaaagtgactagaacgtttcattacactgccttgcaatccaaacagtggcaattttttccttcatctgtgagtgaatgtgtgaacgtgtgtatgtaaatgtatgtgtgtatatattaaaaaatgtatatagatgtctgagtgttgtctggagacctatacgtatggttaaaaagatttatgttaatgtatgtgctccaaaacctttcgtgtatgcattcacattgagtgtggctcattttctttccccgaacgccatgactgttcagaagcacaatactatctcctgaaagagataagagacattccctagattcaaaggcaaaacagaagaaacaaacaaacaaacaaaaaaagcttgcaaaatattttatggtttccaagcttgatatcctttaaaattattttcattgatggaactggagttgttggaaaaacatagatttaaaatgatttttgatagctgacattgtgatgttgatgtatcacatcagtaataggaccagctttgaatttctgacattggtgtggggatacagtctgtaaatgtttattgagaacatcttgcacacaatttgaattatgtagaatgtcaatcaagtttttgtatatttaaaagttggacatcaattttttcccctgatttcatcaagttatctctgccaagtgctcttgataatttcttcagatttttggaaaaaaacactatataaatgcaatccatgctttttttaaagaacaacattgccagagtatgcttgttctaacaatatagatatataaaccttaaaaataataaaatatctcacccaagacttaaaggaagaattctctgaagggataaagattact

SEQ ID NO: 8550 - DNA, 4102 bp, Homo sapiens
  source 1..4102: mol_type = unassigned DNA
tacgagcggctgtgaaggaaactgtttaaccggatcccattgtacccagagtgcagagccgcctttccagcatgcaggggctgctcagcgtttagtcacatcaagaaatagaacagaattcagccatggccccaagaaagagaggtggacgaggtatttcattcatcttttgctgtttccgaaataatgatcacccagaaatcacgtatcggctgcgaaatgatagcaactttgcgcttcagaccatggaaccagcattgcccatgccccctgtggaggagctggatgtcatgttcagtgaactggtggatgaactggacctcacagacaaacacagagaagccatgtttgcacttccagctgagaaaaaatggcaaatatactgtagcaagaaaaaggaccaggaagaaaacaagggagctacaagttggcctgaattctacattgatcagctcaattccatggctgctagaaaatctctgctggctttagagaaggaagaagaagaagaaagaagtaaaactatagagagtttaaagacagcactgaggacaaaaccaatgaggtttgtaaccagattcatcgacttggatggcctatcatgtatcctcaactttctaaagaccatggactacgagacctcagagtctcgaatacatacttctctcattggctgtataaaggcgttaatgaacaactctcaaggccgggctcacgtcctggctcattctgagagtattaatgtaattgctcagagtctgagcacagagaacattaaaacgaaggtggccgtgctggaaatcttgggcgccgtgtgcctggttcccgggggccacaagaaggttctgcaggccatgctgcactaccagaagtatgccagcgaaaggacccgctttcagacattaattaacgacttggataaaagcactgggcggtatcgagatgaagtgagtctcaagactgccatcatgtccttcattaatgcagtgctcagccaaggtgcaggagtggagagtttggactttagacttcatcttcgctatgaatttctgatgttaggaattcaacctgtaatagataaattaagggaacacgaaaattcaacattagataggcatttagacttttttgaaatgctccgaaatgaagatgaactagaatttgccaaaagatttgaactggttcacatagacacaaaaagtgcaactcagatgtttgagctgaccaggaagaggctgacacatagtgaagcttacccgcatttcatgtccatcctgcaccactgcctccaaatgccttacaagaggagtggcaacactgttcagtactggctactactagatagaattatacagcagatagttatccagaatgacaaaggacaggaccctgactccacacctttggaaaactttaatattaagaatgtcgtacgaatgttggttaatgaaaatgaagttaagcagtggaaagaacaagcggaaaaaatgagaaaagagcacaatgagctacaacagaaactggaaaagaaagaacgagaatgtgatgctaagactcaagagaaggaagagatgatgcagaccttaaataaaatgaaagagaaacttgaaaaggagactactgagcataagcaagtcaagcagcaggtggcggacctcacagcacagctccatgagctcagcaggagggccgtctgtgcttcaatcccaggtggaccctcgcctggagcaccaggagggccctttccttcctctgtgcctggatctctccttcctcccccaccacccccacctctaccaggtgggatgcttccccctccaccgcctcccctccctccaggtggccctcctcctcccccagggcctcctcccttaggggcaatcatgccacctcctggtgctccaatgggcctagcactgaagaagaaaagcattcctcagcccacaaatgccctgaaatccttcaactggtctaaactgcccgagaacaaactggaaggaacagtatggaccgaaattgatgatacaaaagtcttcaaaattctagatcttgaagacctggaaagaaccttctctgcctatcaaagacagcaggatttctttgtgaacagtaactccaagcagaaagaagcagatgccattgatgacactctgagttccaaacttaaagttaaagagctttcggtgattgatggtcggagagctcagaattgcaacatccttctatcgaggttgaaattatccaatgacgaaatcaaacgggcaattctaacaatggacgaacaggaagatctgcccaaggacatgttggaacagctcttgaaatttgttcctgaaaaaagtgacattgacctattggaggaacataaacacgaactggatcggatggccaaggctgataggttcctttttgagatgagccgaattaatcactatcagcaaaggttgcaatcgctgtacttcaaaaagaagtttgcagagcgtgtggcatttggaaattatatgaataaaggtcaaagagggaatgcatatggattcaagatatctagcctaaacaaaattgctgacacaaaatccagcatcgacaaaaacattacccttttgcactatctcatcactattgtggaaaataagtaccccagtgttctcaatctaaatgaagaattgcgagatattcctcaagctgcgaaagtaaagagctggaatatcagaagtctcagcccccacagcccggagataagtttgtgtctgttgtcagccagttcatcacagtagccagcttcagcttctctgatgttgaagaccttctagcagaagctaaagacctgtttactaaagcagtgaagcactttggggaagaggctggcaaaatacaaccagatgagttctttggcatttttgatcaatttcttcaagctgtgtcagaagccaaacaagaaaacgaaaatatgagaaagaaaaaggaggaagaagaacgtcgagctcgcatggaagctcagctcaaagaacaacgtgaaagggaacgtaaaatgagaaaagctaaagagaatagtgaagaaagcggagagtttgatgaccttgtttcagctttacgctcaggagaagtgtttgacaaagacctttctaaattgaaacggaatcgcaaacgtattaccaaccagatgactgacagcagcagagagagaccaatcacaaaacttaatttctaattttccatgaatacttttttttagaaagctcattagcagccctctaaagtgactagaacgtttcattacactgccttgcaatccaaacagtggcaattttttccttcatctgtgagtgaatgtgtgaacgtgtgtatgtaaatgtatgtgtgtatatattaaaaaatgtatatagatgtctgagtgttgtctggagacctatacgtatggttaaaaagatttatgttaatgtatgtgctccaaaacctttcgtgtatgcattcacattgagtgtggctcattttctttccccgaacgccatgactgttcagaagcacaatactatctcctgaaagagataagagacattccctagattcaaaggcaaaacagaagaaacaaacaaacaaacaaaaaaagcttgcaaaatattttatggtttccaagcttgatatcctttaaaattattttcattgatggaactggagttgttggaaaaacatagatttaaaatgatttttgatagctgacattgtgatgttgatgtatcacatcagtaataggaccagctttgaatttctgacattggtgtggggatacagtctgtaaatgtttattgagaacatcttgcacacaatttgaattatgtagaatgtcaatcaagtttttgtatatttaaaagttggacatcaattttttcccctgatttcatcaagttatctctgccaagtgctcttgataatttcttcagatttttggaaaaaaacactatataaatgcaatccatgctttttttaaagaacaacattgccagagtatgcttgttctaacaatatagatatataaaccttaaaaataataaaatatctcacccaagacttaaaggaagaattctctgaagggataaagattact

SEQ ID NO: 8551 - DNA, 4227 bp, Homo sapiens
  source 1..4227: mol_type = unassigned DNA
ctacgagcggctgtgaaggaaactgtttaaccggatcccattgtacccagagtgcagagccgcctttccagcatgcaggggctgctcagcgtttagtcacatcaagaaatagaacagaattcagccatggccccaagaaagagaggtggacgaggtatttcattcatcttttgctgtttccgaaataatgatcacccagaaatcacgtatcggctgcgaaatgatagcaactttgcgcttcagaccatggaaccagcattgcccatgccccctgtggaggagctggatgtcatgttcagtgaactggtggatgaactggacctcacagacaaacacagagaagccatgtttgcacttccagctgagaaaaaatggcaaatatactgtagcaagaaaaaggaccaggaagaaaacaagggagctacaagttggcctgaattctacattgatcagctcaattccatggctgctagaaaatctctgctggctttagagaaggaagaagaagaagaaagaagtaaaactatagagagtttaaagacagcactgaggacaaaaccaatgaggtttgtaaccagattcatcgacttggatggcctatcatgtatcctcaactttctaaagaccatggactacgagacctcagagtctcgaatacatacttctctcattggctgtataaaggcgttaatgaacaactctcaaggccgggctcacgtcctggctcattctgagagtattaatgtaattgctcagagtctgagcacagagaacattaaaacgaaggtggccgtgctggaaatcttgggcgccgtgtgcctggttcccgggggccacaagaaggttctgcaggccatgctgcactaccagaagtatgccagcgaaaggacccgctttcagacattaattaacgacttggataaaagcactgggcggtatcgagatgaagtgagtctcaagactgccatcatgtccttcattaatgcagtgctcagccaaggtgcaggagtggagagtttggactttagacttcatcttcgctatgaatttctgatgttaggaattcaacctgtaatagataaattaagggaacacgaaaattcaacattagataggcatttagacttttttgaaatgctccgaaatgaagatgaactagaatttgccaaaagatttgaactggttcacatagacacaaaaagtgcaactcagatgtttgagctgaccaggaagaggctgacacatagtgaagcttacccgcatttcatgtccatcctgcaccactgcctccaaatgccttacaagaggagtggcaacactgttcagtactggctactactagatagaattatacagcagatagttatccagaatgacaaaggacaggaccctgactccacacctttggaaaactttaatattaagaatgtcgtacgaatgttggttaatgaaaatgaagttaagcagtggaaagaacaagcggaaaaaatgagaaaagagcacaatgagctacaacagaaactggaaaagaaagaacgagaatgtgatgctaagactcaagagaaggaagagatgatgcagaccttaaataaaatgaaagagaaacttgaaaaggagactactgagcataagcaagtcaagcagcaggtggcggacctcacagcacagctccatgagctcagcaggagggccgtctgtgcttcaatcccaggtggaccctcgcctggagcaccaggagggccctttccttcctctgtgcctggatctctccttcctcccccaccacccccacctctaccaggtgggatgcttccccctccaccgcctcccctccctccaggtggccctcctcctcccccagggcctcctcccttaggggcaatcatgccacctcctggtgctccaatgggcctagcactgaagaagaaaagcattcctcagcccacaaatgccctgaaatccttcaactggtctaaactgcccgagaacaaactggaaggaacagtatggaccgaaattgatgatacaaaagtcttcaaaattctagatcttgaagacctggaaagaaccttctctgcctatcaaagacagcagaaagaagcagatgccattgatgacactctgagttccaaacttaaagttaaagagctttcggtgattgatggtcggagagctcagaattgcaacatccttctatcgaggttgaaattatccaatgacgaaatcaaacgggcaattctaacaatggacgaacaggaagatctgcccaaggacatgttggaacagctcttgaaatttgttcctgaaaaaagtgacattgacctattggaggaacataaacacgaactggatcggatggccaaggctgataggttcctttttgagatgagccgaattaatcactatcagcaaaggttgcaatcgctgtacttcaaaaagaagtttgcagagcgtgtggcagaagtgaaacctaaagtggaagcaattcgttctggctcagaagaggtgtttaggagtggtgccctcaagcagttgctggaggtggttttggcatttggaaattatatgaataaaggtcaaagagggaatgcatatggattcaagatatctagcctaaacaaaattgctgacacaaaatccagcatcgacaaaaacattacccttttgcactatctcatcactattgtggaaaataagtaccccagtgttctcaatctaaatgaagaattgcgagatattcctcaagctgcgaaagtaaacatgactgagctggacaaagaaataagtaccttgagaagtggcttgaaagcagtagagacagagctggaatatcagaagtctcagcccccacagcccggagataagtttgtgtctgttgtcagccagttcatcacagtagccagcttcagcttctctgatgttgaagaccttctagcagaagctaaagacctgtttactaaagcagtgaagcactttggggaagaggctggcaaaatacaaccagatgagttctttggcatttttgatcaatttcttcaagctgtgtcagaagccaaacaagaaaacgaaaatatgagaaagaaaaaggaggaagaagaacgtcgagctcgcatggaagctcagctcaaagaacaacgtgaaagggaacgtaaaatgagaaaagctaaagagaatagtgaagaaagcggagagtttgatgaccttgtttcagctttacgctcaggagaagtgtttgacaaagacctttctaaattgaaacggaatcgcaaacgtattaccaaccagatgactgacagcagcagagagagaccaatcacaaaacttaatttctaattttccatgaatacttttttttagaaagctcattagcagccctctaaagtgactagaacgtttcattacactgccttgcaatccaaacagtggcaattttttccttcatctgtgagtgaatgtgtgaacgtgtgtatgtaaatgtatgtgtgtatatattaaaaaatgtatatagatgtctgagtgttgtctggagacctatacgtatggttaaaaagatttatgttaatgtatgtgctccaaaacctttcgtgtatgcattcacattgagtgtggctcattttctttccccgaacgccatgactgttcagaagcacaatactatctcctgaaagagataagagacattccctagattcaaaggcaaaacagaagaaacaaacaaacaaacaaaaaaagcttgcaaaatattttatggtttccaagcttgatatcctttaaaattattttcattgatggaactggagttgttggaaaaacatagatttaaaatgatttttgatagctgacattgtgatgttgatgtatcacatcagtaataggaccagctttgaatttctgacattggtgtggggatacagtctgtaaatgtttattgagaacatcttgcacacaatttgaattatgtagaatgtcaatcaagtttttgtatatttaaaagttggacatcaattttttcccctgatttcatcaagttatctctgccaagtgctcttgataatttcttcagatttttggaaaaaaacactatataaatgcaatccatgctttttttaaagaacaacattgccagagtatgcttgttctaacaatatagatatataaaccttaaaaataataaaatatctcacccaagacttaaaggaagaattctctgaagggataaagattact

SEQ ID NO: 8552 - DNA, 5806 bp, Homo sapiens
  source 1..5806: mol_type = unassigned DNA
aagaaatagaacagaattcagccatggccccaagaaagagaggtggacgaggtatttcattcatcttttgctgtttccgaaataatgatcacccagaaatcacgtatcggctgcgaaatgatagcaactttgcgcttcagaccatggaaccagcattgcccatgccccctgtggaggagctggatgtcatgttcagtgaactggtggatgaactggacctcacagacaaacacagagaagccatgtttgcacttccagctgagaaaaaatggcaaatatactgtagcaagaaaaaggaccaggaagaaaacaagggagctacaagttggcctgaattctacattgatcagctcaattccatggctgctagaaaatctctgctggctttagagaaggaagaagaagaagaaagaagtaaaactatagagagtttaaagacagcactgaggacaaaaccaatgaggtttgtaaccagattcatcgacttggatggcctatcatgtatcctcaactttctaaagaccatggactacgagacctcagagtctcgaatacatacttctctcattggctgtataaaggcgttaatgaacaactctcaaggccgggctcacgtcctggctcattctgagagtattaatgtaattgctcagagtctgagcacagagaacattaaaacgaaggtggccgtgctggaaatcttgggcgccgtgtgcctggttcccgggggccacaagaaggttctgcaggccatgctgcactaccagaagtatgccagcgaaaggacccgctttcagacattaattaacgacttggataaaagcactgggcggtatcgagatgaagtgagtctcaagactgccatcatgtccttcattaatgcagtgctcagccaaggtgcaggagtggagagtttggactttagacttcatcttcgctatgaatttctgatgttaggaattcaacctgtaatagataaattaagggaacacgaaaattcaacattagataggcatttagacttttttgaaatgctccgaaatgaagatgaactagaatttgccaaaagatttgaactggttcacatagacacaaaaagtgcaactcagatgtttgagctgaccaggaagaggctgacacatagtgaagcttacccgcatttcatgtccatcctgcaccactgcctccaaatgccttacaagaggagtggcaacactgttcagtactggctactactagatagaattatacagcagatagttatccagaatgacaaaggacaggaccctgactccacacctttggaaaactttaatattaagaatgtcgtacgaatgttggttaatgaaaatgaagttaagcagtggaaagaacaagcggaaaaaatgagaaaagagcacaatgagctacaacagaaactggaaaagaaagaacgagaatgtgatgctaagactcaagagaaggaagagatgatgcagaccttaaataaaatgaaagagaaacttgaaaaggagactactgagcataagcaagtcaagcagcaggtggcggacctcacagcacagctccatgagctcagcaggagggccgtctgtgcttcaatcccaggtggaccctcgcctggagcaccaggagggccctttccttcctctgtgcctggatctctccttcctcccccaccacccccacctctaccaggtgggatgcttccccctccaccgcctcccctccctccaggtggccctcctcctcccccagggcctcctcccttaggggcaatcatgccacctcctggtgctccaatgggcctagcactgaagaagaaaagcattcctcagcccacaaatgccctgaaatccttcaactggtctaaactgcccgagaacaaactggaaggaacagtatggaccgaaattgatgatacaaaagtcttcaaaattctagatcttgaagacctggaaagaaccttctctgcctatcaaagacagcaggatttctttgtgaacagtaactccaagcagaaagaagcagatgccattgatgacactctgagttccaaacttaaagttaaagagctttcggtgattgatggtcggagagctcagaattgcaacatccttctatcgaggttgaaattatccaatgacgaaatcaaacgggcaattctaacaatggacgaacaggaagatctgcccaaggacatgttggaacagctcttgaaatttgttcctgaaaaaagtgacattgacctattggaggaacataaacacgaactggatcggatggccaaggctgataggttcctttttgagatgagccgaattaatcactatcagcaaaggttgcaatcgctgtacttcaaaaagaagtttgcagagcgtgtggcagaagtgaaacctaaagtggaagcaattcgttctggctcagaagaggtgtttaggagtggtgccctcaagcagttgctggaggtggttttggcatttggaaattatatgaataaaggtcaaagagggaatgcatatggattcaagatatctagcctaaacaaaattgctgacacaaaatccagcatcgacaaaaacattacccttttgcactatctcatcactattgtggaaaataagtaccccagtgttctcaatctaaatgaagaattgcgagatattcctcaagctgcgaaagtaaacatgactgagctggacaaagaaataagtaccttgagaagtggcttgaaagcagtagagacagagctggaatatcagaagtctcagcccccacagcccggagataagtttgtgtctgttgtcagccagttcatcacagtagccagcttcagcttctctgatgttgaagaccttctagcagaagctaaagacctgtttactaaagcagtgaagcactttggggaagaggctggcaaaatacaaccagatgagttctttggcatttttgatcaatttcttcaagctgtgtcagaagccaaacaagaaaacgaaaatatgagaaagaaaaaggaggaagaagaacgtcgagctcgcatggaagctcagctcaaagaacaacgtgaaagggaacgtaaaatgagaaaagctaaagagaatagtgaagaaagcggagagtttgatgaccttgtttcagctttacgctcaggagaagtgtttgacaaagacctttctaaattgaaacggaatcgcaaacgtattaccaaccagatgactgacagcagcagagagagaccaatcacaaaacttaatttctaattttccatgaatacttttttttagaaagctcattagcagccctctaaagtgactagaacgtttcattacactgccttgcaatccaaacagtggcaattttttccttcatctgtgagtgaatgtgtgaacgtgtgtatgtaaatgtatgtgtgtatatattaaaaaatgtatatagatgtctgagtgttgtctggagacctatacgtatggttaaaaagatttatgttaatgtatgtgctccaaaacctttcgtgtatgcattcacattgagtgtggctcattttctttccccgaacgccatgactgttcagaagcacaatactatctcctgaaagagataagagacattccctagattcaaaggcaaaacagaagaaacaaacaaacaaacaaaaaaagcttgcaaaatattttatggtttccaagcttgatatcctttaaaattattttcattgatggaactggagttgttggaaaaacatagatttaaaatgatttttgatagctgacattgtgatgttgatgtatcacatcagtaataggaccagctttgaatttctgacattggtgtggggatacagtctgtaaatgtttattgagaacatcttgcacacaatttgaattatgtagaatgtcaatcaagtttttgtatatttaaaagttggacatcaattttttcccctgatttcatcaagttatctctgccaagtgctcttgataatttcttcagatttttggaaaaaaacactatataaatgcaatccatgctttttttaaagaacaacattgccagagtatgcttgttctaacaatatagatatataaaccttaaaaataataaaatatctcacccaagacttaaaggaagaattctctgaagggataaagattactaaaaaaaaaaaaaaaaaaaaaaaattaatggggtgcctttttgttatagtttctattttctgttttgtaggacaagctgcattttctgtaaatataggtctggactaaaggatacataaagaatgcacaaaatgtcaacatcagcagagatgcccagatctatttatctctaagtatatttgaagtgattgctgtttatatgttgtcattttaaaattgtgtgtcagtaaagctacctgtaaaatttcagtccaaaaaaataaagctctcagggagacatgaataaaatcaatgaacattagaaaataaaatatagatgcttaccattaacctaccaactcttaatatccttaaattatgtgatatataaagaggactgttacttttttacttttttttttttttttttttttttttggctttgctttatttatttgtagttgggggctaacgttttctcttttctttctattgatcctgttgtggttgggtttcctgtggagagagtagtttgtcctgttgcactagaacattatttactcactaaattgagtttttcagtcaattaacaaatatttattaagttcctactatgtaccaggcatagtagggctacaatggtaagcaagacagagtccctgcccccaaagagcttatattctaatggggatattaagggatgaatagaataccaatgtgtgcactgtacaggaatcatactatttaaaaataatttgtataaactataatgcttagcacagatggcgagttatctgtgctatgtgaaagctgtgaaatagtgctctaagagttgtcaagagctgtggttttacatcttttcctcattgcaaatttagtgactttctacacactatatggaaataaatgactagcaaataaaacagtcataaatacaaagcagaggttgcactcccccaatcccgagttaacccaggtctgcaataacaccatgttaaaggtgcagatagagacttggctcaaaaaggcttggagatgaggaagattggaatataatgatggttttgtctgttccttaactaaagtgcctctatgtatattcttttctatttgtagcaggataaatttggtctggctcagttttggaactgtattttgaaaatggctttgtcttacagtttaaggaatagacaggtggagggaaagtcacataaaggagcaagtttgtgtagctgtccctcttgccccttttaatcatcctcctttgatatggccatcctggtgggcctcctttgccatttccatttttggtttctttccctgaaaactgtgtgcaggtaattccatgtgccattgttgaaaagaaaaaaaaaaaacaaaaaaaaaacctactttttagattggtgctggtgtaagtagccacttttctctcttgggtgtgtattttaaactttttttgtttttttaaattaatgccaaaaagaaaatgcataatttgtaaacttaattatatgtcttatatcttattagcttagtagttggaaccacttagtctttaggtgcaagactgttgttagatagtactgagaaaaaaaaagtatgtgttatgagactgtacatgtttttttaaaaatagcaatatgcaataaagagatgaattcattgggtgtaca

SEQ ID NO: 8553 - DNA, 6194 bp, Homo sapiens
  source 1..6194: mol_type = unassigned DNA
gcttcccggggatagcgcggagcacgcagcagcgagcggagcgcgggcggcggcgccgtacctcgggctgcgggagcgcgggcgccctggggtcctcggaatcacaatgaggacctagggcatctgtctgctgacgccccctggcctgcagtgaccatggccccccgcaagaggagccaccatggcctgggcttcctgtgctgcttcgggggcagtgacatccccgaaatcaacctccgggacaaccaccctctgcagttcatggagttctccagccccatcccgaacgcagaggagctcaacatccgctttgcagagctggtggatgaattggatctcactgacaaaaaccgagaggctatgtttgcactgccccctgagaagaaatggcagatctactgcagcaagaagaaggagcaggaggaccccaacaagctggcaaccagctggcctgactattacatcgaccgcatcaattccatggctgcgatgcagagtctgtacgcgtttgatgaggaggagacggagatgaggaaccaagtcgtggaagacctgaagacagccctccggacacagcctatgaggtttgtgacccgcttcattgagctggagggcttgacctgtctgctaaatttcctccggagcatggaccacgccacctgtgagagccgcatccacacctcactcattggctgcatcaaagcattgatgaacaactcccaggggcgggcacatgtgctggcacagcctgaggccattagtaccatagcccagagcctacgcacagagaacagcaagaccaaggtggctgtgctggagatcctgggtgctgtgtgcctcgtgcctggtggccacaagaaggtgctgcaggccatgctgcactaccaggtgtatgcagcagagcgaacccgcttccagaccctgctgaacgagctagaccgaagtctgggccggtaccgggatgaagtgaatctgaaaacagccatcatgtccttcatcaatgctgtcctcaatgctggagctggagaggataatctggagttccgcctacatctacggtatgaattcctgatgctgggtatacagcctgtgattgacaagctccggcaacatgaaaatgccatcctggacaaacatttagacttcttcgagatggtgcggaatgaggatgacctggagctagccaggaggtttgacatggtccacatcgacaccaagagtgcttcccagatgtttgagttgatccacaagaagctgaagtacacggaggcctacccctgcctgctctctgtgctgcaccactgcctgcagatgccctacaaacggaacggtggctacttccagcagtggcagctcctggaccgcatcctccagcagattgtcctccaggatgagcggggtgtggaccctgacctggctcccttggagaacttcaatgtcaagaacatcgtcaacatgctcatcaacgagaatgaagtgaaacagtggcgagaccaggcagagaagttccggaaagaacacatggagcttgtgagccgtctggagaggaaggagcgggaatgcgagacaaagacattggagaaggaagagatgatgcggacgctgaacaaaatgaaggacaagctggcccgggagtcccaggagctgcgccaggctcggggacaagtggcagagctggtagcccagctcagtgaactctcaacaggccctgtatcttccccaccaccccctgggggcccactcaccttgtcttcctcaatgacaaccaatgacctgcctccaccccctcctcctctgccctttgcctgttgtccccctcccccaccaccaccccttcctcccgggggacccccgactcccccaggtgccccaccttgcctcggcatgggcctgcccctccctcaggacccctaccccagcagtgacgtcccactcaggaaaaagcgtgtcccccagccttctcacccactgaagtccttcaactgggtgaagctgaatgaggagcgtgtccctggcaccgtatggaatgagattgatgacatgcaggtatttcggatcctggacctagaggattttgaaaagatgttttcagcctaccagaggcaccagaaagagctgggctccactgaagacatctacctggcttcccgcaaggtcaaagagctgtcggtcattgatggccggagggcccaaaactgcatcatccttctttccaagttgaagctttctaacgaggagatccggcaggccatcttgaagatggatgagcaggaggaccttgctaaggacatgctggagcagctcctcaagttcatcccagagaagagtgacattgacctcctggaggagcacaagcatgaaattgagcggatggcccgtgctgaccgcttcctctatgaaatgagcaggattgaccactaccagcagcgactgcaagccctcttcttcaagaagaaattccaggagcggctggctgaggcaaagcccaaagtggaagccatcctgttggcctcccgggagctggtccgcagcaagcgtcttagacagatgctagaggtcatcctagccataggcaacttcatgaacaaagggcagcgtgggggcgcctacgggttccgggtggccagcctcaacaagatcgctgacaccaagtccagcatcgacagaaacatctctctgctccattacctgatcatgatcctggagaagcattttcctgatattctaaacatgccttcagagctgcaacatcttccagaagctgccaaagtcaacctagcagaactggagaaggaggtgggcaacctcaggaggggcctgagagcggtggaggtggagctggagtatcagaggcgccaggtacgggagcccagtgacaagtttgtccctgtcatgagcgacttcatcacggtgtccagcttcagcttctccgagctggaggaccagctaaatgaggccagggacaagttcgccaaggccttgatgcacttcggggagcatgacagcaagatgcagccagacgaattctttggcatctttgataccttcttgcaggccttctcagaggcccggcaggatctagaggccatgaggaggaggaaggaggaggaggagcggcgggcgcgcatggaagccatgctgaaggagcagagggaacgtgagcggtggcagcggcagcggaaggtcctggctgcaggcagctcgctggaggagggaggagagttcgatgacctggtgtcggccctgcgctctggggaggtcttcgacaaggacttatgcaagctcaagcgcagccgcaagcgatcagggagccaggccctggaagttacccgggagcgggcaataaaccggctaaattattgacctggggaactagccacacaggaggccgggagacagggactggtgagaatggggctgagtggaggaggtggtgatatttaaaccatttggtgcttggtttagagccttgggctgggtcctgggatggggggctgtgtgtggctggaccaggtgtctccccacgcttaccttaaggggctcctcttatctccccttcacatgattccttctgtgccctggccccaggtattattctgaggctgccttggatggcctcaggccaggtaaccccaggctgaaggggccctgctccccatcccctaccatgggcacccatgtgctggcacagaacagttccagatctagactggagaggtccacagccttgtccagagttcctgtgtagcacggggagcaatgatggagggagcccctgagagggaatctggtgagggaatccagactcccttctctcaaggggaggctcaacagaacattgacctgggggcaaactttcctcttgaatgggaacagaggaggcattatatattctagttagatcagctctggtaggttccagagaacagtcaatgttggaaggatgatgcagggaccaaagccatcaggacagagtagcagtgtctgtttcccatgtcacaagtcctctggcctctccctgcatgtcttaagtatctttcccttccttctctaccctcacctccatcctgtctactaatccacagtcctagaagactcaccttgggtttccacagctatggctcactaccaggtgcttgatgaatctggcgaggggctcaagacagacctcatgcatcaccacacctcatgccttttgggcatctcccatgtccccatctcctggacacctggccattgttgtgaagccagacagtgacctcaaatgttgccttggagtcccctacagcccctcagcagagggcagcacttgaatgcttagctccatcccatagttctctacttcatataaattgctcaggccctcccaccccttctctaacactagcttcaaggcagaagccacagcagcctctgtccagcctgcaggtggccacttggaaccatgtgtccactggcgttggggagttggttcctgagaggtctgagggccagagctgccctctacattaacatgctgtctctaagggtggcccctcctctcaggcgttcagatggtgcgaacagcagagcaggcaagggaaactggggagatggggatggaggaggaaggctgatatcctctggggagcacatcacctgaaggtgccaaggaggaaggctgagaggggggccaccccatttctggtacccaatttggttcttcagcccaacttgcaaggggttccttctggtcctcccatccactgccaccttccattttgtccatctcatgctggccttggtggatgggatggctgtatctagacaaaatttttctaaaactccatcaaggctcttattcaataccacgttccgagttggcctttcatcttctttgagactggccctgcctaacctctaccatcaatgagctcttggcccttctgcccttccctgtgtttctcactttccaacctaatccctggctcagggttattgccagtggagactggtgagctgggcctactctcagctgcctatcttctgcctttcacttgcatccaactcctggggctgggaccgtagtagctgcgggggggaagaaacacagggtcggtgagcccagcatgtgcgttggtttgagggggcgggcggtgtgtgtgtgttctggtgggagggatctgagcaagtgcaagcctggctgacacaggtgtgaagaggccatcctggaacccaggtgagggcaagatgaaggcttccaggcagaacagctgcagagagtttggctatatgcatctgcagccccaagagctcccactgcaagacaagtgttggggaagatgggaggttgtgggtgaggcctctaaaggtcctctcccaaactgaccaggctgatgtcaacctaaccccctcaggggcagggaacaggggagggctccacaagcgtgtctggcattcccacccaccatggaagactggatacgcacctggaaacaaaaggactatggaagctgttcaagatacatttgatcttcagaaaagcagaatttggttcaactgttgacagaggacacaaatacgttgttccagagctcagccttctcactctaaaagaaagatatttttctatttattttctacatctggccagtggctctggtgctagatgccactgtagccagatctccaacagtgccttggaccatggactcatactcaactgagtaagaaggggctggtgcccagtcggggtggctgagctggtccttaataggttgtttcttggtcttgctttcttcatgccctccccactgctcctgccacctttagataagtttctctagctaattttgtggccaatgtaaaattcgtcatcaacctaacaaacacaaccttctcagcagcatttctcccctgtgatggaaataaagtgtttagggcagtgggaggagaaaattctccaggtgaatggggaagggtctgttccagcctctccctactcccatcccatttccaccaactggggaactgtgactatctatctcccccgacttctaccagggatgccttcacgccaaggctgttctcaccagctgcctcagatgacaaatgaggctaatggacataatctacagtgtcctttttcacttgcaccttttttataagaatatattgtaatactaaaaaatattaaattcataccatccctaccc

SEQ ID NO: 8554 - DNA, 6220 bp, Homo sapiens
  source 1..6220: mol_type = unassigned DNA
aggaaaggggtccccggactctggggctctcagcacctgcggtcgcaaaccaacctcatgccctgactttaccaggcgtcgggactctgacttaaccggggaatgagggacttggtctggcggcagatcacaatgaggacctagggcatctgtctgctgacgccccctggcctgcagtgaccatggccccccgcaagaggagccaccatggcctgggcttcctgtgctgcttcgggggcagtgacatccccgaaatcaacctccgggacaaccaccctctgcagttcatggagttctccagccccatcccgaacgcagaggagctcaacatccgctttgcagagctggtggatgaattggatctcactgacaaaaaccgagaggctatgtttgcactgccccctgagaagaaatggcagatctactgcagcaagaagaaggagcaggaggaccccaacaagctggcaaccagctggcctgactattacatcgaccgcatcaattccatggctgcgatgcagagtctgtacgcgtttgatgaggaggagacggagatgaggaaccaagtcgtggaagacctgaagacagccctccggacacagcctatgaggtttgtgacccgcttcattgagctggagggcttgacctgtctgctaaatttcctccggagcatggaccacgccacctgtgagagccgcatccacacctcactcattggctgcatcaaagcattgatgaacaactcccaggggcgggcacatgtgctggcacagcctgaggccattagtaccatagcccagagcctacgcacagagaacagcaagaccaaggtggctgtgctggagatcctgggtgctgtgtgcctcgtgcctggtggccacaagaaggtgctgcaggccatgctgcactaccaggtgtatgcagcagagcgaacccgcttccagaccctgctgaacgagctagaccgaagtctgggccggtaccgggatgaagtgaatctgaaaacagccatcatgtccttcatcaatgctgtcctcaatgctggagctggagaggataatctggagttccgcctacatctacggtatgaattcctgatgctgggtatacagcctgtgattgacaagctccggcaacatgaaaatgccatcctggacaaacatttagacttcttcgagatggtgcggaatgaggatgacctggagctagccaggaggtttgacatggtccacatcgacaccaagagtgcttcccagatgtttgagttgatccacaagaagctgaagtacacggaggcctacccctgcctgctctctgtgctgcaccactgcctgcagatgccctacaaacggaacggtggctacttccagcagtggcagctcctggaccgcatcctccagcagattgtcctccaggatgagcggggtgtggaccctgacctggctcccttggagaacttcaatgtcaagaacatcgtcaacatgctcatcaacgagaatgaagtgaaacagtggcgagaccaggcagagaagttccggaaagaacacatggagcttgtgagccgtctggagaggaaggagcgggaatgcgagacaaagacattggagaaggaagagatgatgcggacgctgaacaaaatgaaggacaagctggcccgggagtcccaggagctgcgccaggctcggggacaagtggcagagctggtagcccagctcagtgaactctcaacaggccctgtatcttccccaccaccccctgggggcccactcaccttgtcttcctcaatgacaaccaatgacctgcctccaccccctcctcctctgccctttgcctgttgtccccctcccccaccaccaccccttcctcccgggggacccccgactcccccaggtgccccaccttgcctcggcatgggcctgcccctccctcaggacccctaccccagcagtgacgtcccactcaggaaaaagcgtgtcccccagccttctcacccactgaagtccttcaactgggtgaagctgaatgaggagcgtgtccctggcaccgtatggaatgagattgatgacatgcaggtatttcggatcctggacctagaggattttgaaaagatgttttcagcctaccagaggcaccagaaagagctgggctccactgaagacatctacctggcttcccgcaaggtcaaagagctgtcggtcattgatggccggagggcccaaaactgcatcatccttctttccaagttgaagctttctaacgaggagatccggcaggccatcttgaagatggatgagcaggaggaccttgctaaggacatgctggagcagctcctcaagttcatcccagagaagagtgacattgacctcctggaggagcacaagcatgaaattgagcggatggcccgtgctgaccgcttcctctatgaaatgagcaggattgaccactaccagcagcgactgcaagccctcttcttcaagaagaaattccaggagcggctggctgaggcaaagcccaaagtggaagccatcctgttggcctcccgggagctggtccgcagcaagcgtcttagacagatgctagaggtcatcctagccataggcaacttcatgaacaaagggcagcgtgggggcgcctacgggttccgggtggccagcctcaacaagatcgctgacaccaagtccagcatcgacagaaacatctctctgctccattacctgatcatgatcctggagaagcattttcctgatattctaaacatgccttcagagctgcaacatcttccagaagctgccaaagtcaacctagcagaactggagaaggaggtgggcaacctcaggaggggcctgagagcggtggaggtggagctggagtatcagaggcgccaggtacgggagcccagtgacaagtttgtccctgtcatgagcgacttcatcacggtgtccagcttcagcttctccgagctggaggaccagctaaatgaggccagggacaagttcgccaaggccttgatgcacttcggggagcatgacagcaagatgcagccagacgaattctttggcatctttgataccttcttgcaggccttctcagaggcccggcaggatctagaggccatgaggaggaggaaggaggaggaggagcggcgggcgcgcatggaagccatgctgaaggagcagagggaacgtgagcggtggcagcggcagcggaaggtcctggctgcaggcagctcgctggaggagggaggagagttcgatgacctggtgtcggccctgcgctctggggaggtcttcgacaaggacttatgcaagctcaagcgcagccgcaagcgatcagggagccaggccctggaagttacccgggagcgggcaataaaccggctaaattattgacctggggaactagccacacaggaggccgggagacagggactggtgagaatggggctgagtggaggaggtggtgatatttaaaccatttggtgcttggtttagagccttgggctgggtcctgggatggggggctgtgtgtggctggaccaggtgtctccccacgcttaccttaaggggctcctcttatctccccttcacatgattccttctgtgccctggccccaggtattattctgaggctgccttggatggcctcaggccaggtaaccccaggctgaaggggccctgctccccatcccctaccatgggcacccatgtgctggcacagaacagttccagatctagactggagaggtccacagccttgtccagagttcctgtgtagcacggggagcaatgatggagggagcccctgagagggaatctggtgagggaatccagactcccttctctcaaggggaggctcaacagaacattgacctgggggcaaactttcctcttgaatgggaacagaggaggcattatatattctagttagatcagctctggtaggttccagagaacagtcaatgttggaaggatgatgcagggaccaaagccatcaggacagagtagcagtgtctgtttcccatgtcacaagtcctctggcctctccctgcatgtcttaagtatctttcccttccttctctaccctcacctccatcctgtctactaatccacagtcctagaagactcaccttgggtttccacagctatggctcactaccaggtgcttgatgaatctggcgaggggctcaagacagacctcatgcatcaccacacctcatgccttttgggcatctcccatgtccccatctcctggacacctggccattgttgtgaagccagacagtgacctcaaatgttgccttggagtcccctacagcccctcagcagagggcagcacttgaatgcttagctccatcccatagttctctacttcatataaattgctcaggccctcccaccccttctctaacactagcttcaaggcagaagccacagcagcctctgtccagcctgcaggtggccacttggaaccatgtgtccactggcgttggggagttggttcctgagaggtctgagggccagagctgccctctacattaacatgctgtctctaagggtggcccctcctctcaggcgttcagatggtgcgaacagcagagcaggcaagggaaactggggagatggggatggaggaggaaggctgatatcctctggggagcacatcacctgaaggtgccaaggaggaaggctgagaggggggccaccccatttctggtacccaatttggttcttcagcccaacttgcaaggggttccttctggtcctcccatccactgccaccttccattttgtccatctcatgctggccttggtggatgggatggctgtatctagacaaaatttttctaaaactccatcaaggctcttattcaataccacgttccgagttggcctttcatcttctttgagactggccctgcctaacctctaccatcaatgagctcttggcccttctgcccttccctgtgtttctcactttccaacctaatccctggctcagggttattgccagtggagactggtgagctgggcctactctcagctgcctatcttctgcctttcacttgcatccaactcctggggctgggaccgtagtagctgcgggggggaagaaacacagggtcggtgagcccagcatgtgcgttggtttgagggggcgggcggtgtgtgtgtgttctggtgggagggatctgagcaagtgcaagcctggctgacacaggtgtgaagaggccatcctggaacccaggtgagggcaagatgaaggcttccaggcagaacagctgcagagagtttggctatatgcatctgcagccccaagagctcccactgcaagacaagtgttggggaagatgggaggttgtgggtgaggcctctaaaggtcctctcccaaactgaccaggctgatgtcaacctaaccccctcaggggcagggaacaggggagggctccacaagcgtgtctggcattcccacccaccatggaagactggatacgcacctggaaacaaaaggactatggaagctgttcaagatacatttgatcttcagaaaagcagaatttggttcaactgttgacagaggacacaaatacgttgttccagagctcagccttctcactctaaaagaaagatatttttctatttattttctacatctggccagtggctctggtgctagatgccactgtagccagatctccaacagtgccttggaccatggactcatactcaactgagtaagaaggggctggtgcccagtcggggtggctgagctggtccttaataggttgtttcttggtcttgctttcttcatgccctccccactgctcctgccacctttagataagtttctctagctaattttgtggccaatgtaaaattcgtcatcaacctaacaaacacaaccttctcagcagcatttctcccctgtgatggaaataaagtgtttagggcagtgggaggagaaaattctccaggtgaatggggaagggtctgttccagcctctccctactcccatcccatttccaccaactggggaactgtgactatctatctcccccgacttctaccagggatgccttcacgccaaggctgttctcaccagctgcctcagatgacaaatgaggctaatggacataatctacagtgtcctttttcacttgcaccttttttataagaatatattgtaatactaaaaaatattaaattcataccatccctaccc

SEQ ID NO: 8555 - DNA, 829 bp, Homo sapiens
  source 1..829: mol_type = unassigned DNA
ctcgggtctcagcgatgccccctgtgtctcccacccctaggcctgcacagaggggactcagaggccgagataatttacttttgctttctttgccttttccagagcatagggggaaaccgtaatttaggcggctgctaagaatagctcccccaatcctggaaagagcgtgtgcttatttttgaaagtgctccttgtctctcccccagccctgcctgaggctcacagtacaagtcagtcaaattgttcagggcagcagtggtgtctggagacctggtttgagttcctaggttcatacctagcgtccttctgagcctcaagtttcttcgtctgtaaaaagagaagatgaaagtttgagataaacctcgaacatgatcacaatgaggacctagggcatctgtctgctgacgccccctggcctgcagtgaccatggccccccgcaagaggagccaccatggcctgggcttcctgtgctgcttcgggggcagtgacatccccgaaatcaacctccgggacaaccaccctctgcagttcatggagttctccagccccatcccgaacgcagaggagctcaacatccgctttgcagagctggtggatgaattggatctcactgacaaaaaccgagaggctatgtttgcactgccccctgagaagaaatggcagatctactgcagcaagaagaaggtgccctctctgacccctctggccacatctcagggttcatggcatggggtggctcttgctgccttggcatgctcatgcattcacctgatgtttattacatgccagccctgttctaggtgttggaggaacaacagtgaataaaat

SEQ ID NO: 8556 - DNA, 6221 bp, Homo sapiens
  source 1..6221: mol_type = unassigned DNA
aggaaaggggtccccggactctggggctctcagcacctgcggtcgcaaaccaacctcatgccctgactttaccaggcgtcgggactctgacttaaccggggaatgagggacttggtctggcggcagatcacaatgaggacctagggcatctgtctgctgacgccccctggcctgcagtgaccatggccccccgcaagaggagccaccatggcctgggcttcctgtgctgcttcgggggcagtgacatccccgaaatcaacctccgggacaaccaccctctgcagttcatggagttctccagccccatcccgaacgcagaggagctcaacatccgctttgcagagctggtggatgaattggatctcactgacaaaaaccgagaggctatgtttgcactgccccctgagaagaaatggcagatctactgcagcaagaagaaggagcaggaggaccccaacaagctggcaaccagctggcctgactattacatcgaccgcatcaattccatggctgcgatgcagagtctgtacgcgtttgatgaggaggagacggagatgaggaaccaagtcgtggaagacctgaagacagccctccggacacagcctatgaggtttgtgacccgcttcattgagctggagggcttgacctgtctgctaaatttcctccggagcatggaccacgccacctgtgagagccgcatccacacctcactcattggctgcatcaaagcattgatgaacaactcccaggggcgggcacatgtgctggcacagcctgaggccattagtaccatagcccagagcctacgcacagagaacagcaagaccaaggtggctgtgctggagatcctgggtgctgtgtgcctcgtgcctggtggccacaagaaggtgctgcaggccatgctgcactaccaggtgtatgcagcagagcgaacccgcttccagaccctgctgaacgagctagaccgaagtctgggccggtaccgggatgaagtgaatctgaaaacagccatcatgtccttcatcaatgctgtcctcaatgctggagctggagaggataatctggagttccgcctacatctacggtatgaattcctgatgctgggtatacagcctgtgattgacaagctccggcaacatgaaaatgccatcctggacaaacatttagacttcttcgagatggtgcggaatgaggatgacctggagctagccaggaggtttgacatggtccacatcgacaccaagagtgcttcccagatgtttgagttgatccacaagaagctgaagtacacggaggcctacccctgcctgctctctgtgctgcaccactgcctgcagatgccctacaaacggaacggtggctacttccagcagtggcagctcctggaccgcatcctccagcagattgtcctccaggatgagcggggtgtggaccctgacctggctcccttggagaacttcaatgtcaagaacatcgtcaacatgctcatcaacgagaatgaagtgaaacagtggcgagaccaggcagagaagttccggaaagaacacatggagcttgtgagccgtctggagaggaaggagcgggaatgcgagacaaagacattggagaaggaagagatgatgcggacgctgaacaaaatgaaggacaagctggcccgggagtcccaggagctgcgccaggctcggggacaagtggcagagctggtagcccagctcagtgaactctcaacaggccctgtatcttccccaccaccccctgggggcccactcaccttgtcttcctcaatgacaaccaatgacctgcctccaccccctcctcctctgccctttgcctgttgtccccctcccccaccaccaccccttcctcccgggggacccccgactcccccaggtgccccaccttgcctcggcatgggcctgcccctccctcaggacccctaccccagcagtgacgtcccactcaggaaaaagcgtgtcccccagccttctcacccactgaagtccttcaactgggtgaagctgaatgaggagcgtgtccctggcaccgtatggaatgagattgatgacatgcaggtatttcggatcctggacctagaggattttgaaaagatgttttcagcctaccagaggcaccagaaagagctgggctccactgaagacatctacctggcttcccgcaaggtcaaagagctgtcggtcattgatggccggagggcccaaaactgcatcatccttctttccaagttgaagctttctaacgaggagatccggcaggccatcttgaagatggatgagcaggaggaccttgctaaggacatgctggagcagctcctcaagttcatcccagagaagagtgacattgacctcctggaggagcacaagcatgaaattgagcggatggcccgtgctgaccgcttcctctatgaaatgagcaggattgaccactaccagcagcgactgcaagccctcttcttcaagaagaaattccaggagcggctggctgaggcaaagcccaaagtggaagccatcctgttggcctcccgggagctggtccgcagcaagcgtcttagacagatgctagaggtcatcctagccataggcaacttcatgaacaaagggcagcgtgggggcgcctacgggttccgggtggccagcctcaacaagatcgctgacaccaagtccagcatcgacagaaacatctctctgctccattacctgatcatgatcctggagaagcattttcctgatattctaaacatgccttcagagctgcaacatcttccagaagctgccaaagtcaacctagcagaactggagaaggaggtgggcaacctcaggaggggcctgagagcggtggaggtgctggagtatcagaggcgccaggtacgggagcccagtgacaagtttgtccctgtcatgagcgacttcatcacggtgtccagcttcagcttctccgagctggaggaccagctaaatgaggccagggacaagttcgccaaggccttgatgcacttcggggagcatgacagcaagatgcagccagacgaattctttggcatctttgataccttcttgcaggccttctcagaggcccggcaggatctagaggccatgaggaggaggaaggaggaggaggagcggcgggcgcgcatggaagccatgctgaaggagcagagggaacgtgagcggtggcagcggcagcggaaggtcctggctgcaggcagctcgctggaggagggaggagagttcgatgacctggtgtcggccctgcgctctggggaggtcttcgacaaggacttatgcaagctcaagcgcagccgcaagcgatcagggagccaggccctggaagttacccgggagcgggcaataaaccggctaaattattgacctggggaactagccacacaggaggccgggagacagggactggtgagaatggggctgagtggaggaggtggtgatatttaaaccatttggtgcttggtttagagccttgggctgggtcctgggatggggggctgtgtgtggctggaccaggtgtctccccacgcttaccttaaggggctcctcttatctccccttcacatgattccttctgtgccctggccccaggtattattctgaggctgccttggatggcctcaggccaggtaaccccaggctgaaggggccctgctccccatcccctaccatgggcacccatgtgctggcacagaacagttccagatctagactggagaggtccacagccttgtccagagttcctgtgtagcacggggagcaatgatggagggagcccctgagagggaatctggtgagggaatccagactcccttctctcaaggggaggctcaacagaacattgacctgggggcaaactttcctcttgaatgggaacagaggaggcattatatattctagttagatcagctctggtaggttccagagaacagtcaatgttggaaggatgatgcagggaccaaagccatcaggacagagtagcagtgtctgtttcccatgtcacaagtcctctggcctctccctgcatgtcttaagtatctttcccttccttctctaccctcacctccatcctgtctactaatccacagtcctagaagactcaccttgggtttccacagctatggctcactaccaggtgcttgatgaatctggcgaggggctcaagacagacctcatgcatcaccacacctcatgccttttgggcatctcccatgtccccatctcctggacacctggccattgttgtgaagccagacagtgacctcaaatgttgccttggagtcccctacagcccctcagcagagggcagcacttgaatgcttagctccatcccatagttctctacttcatataaattgctcaggccctcccaccccttctctaacactagcttcaaggcagaagccacagcagcctctgtccagcctgcaggtggccacttggaaccatgtgtccactggcgttggggagttggttcctgagaggtctgagggccagagctgccctctacattaacatgctgtctctaagggtggcccctcctctcaggcgttcagatggtgcgaacagcagagcaggcaagggaaactggggagatggggatggaggaggaaggctgatatcctctggggagcacatcacctgaaggtgccaaggaggaaggctgagaggggggccaccccatttctggtacccaatttggttcttcagcccaacttgcaaggggttccttctggtcctcccatccactgccaccttccattttgtccatctcatgctggccttggtggatgggatggctgtatctagacaaaatttttctaaaactccatcaaggctcttattcaataccacgttccgagttggcctttcatcttctttgagactggccctgcctaacctctaccatcaatgagctcttggcccttctgcccttccctgtgtttctcactttccaacctaatccctggctcagggttattgccagtggagactggtgagctgggcctactctcagctgcctatcttctgcctttcacttgcatccaactcctggggctgggaccgtagtagctgcgggggggaagaaacacagggtcggtgagcccagcatgtgcgttggtttgagggggcgggcggtgtgtgtgtgttctggtgggagggatctgagcaagtgcaagcctggctgacacaggtgtgaagaggccatcctggaacccaggtgagggcaagatgaaggcttccaggcagaacagctgcagagagtttggctatatgcatctgcagccccaagagctcccactgcaagacaagtgttggggaagatgggaggttgtgggtgaggcctctaaaggtcctctcccaaactgaccaggctgatgtcaacctaaccccctcaggggcagggaacaggggagggctccacaagcgtgtctggcattcccacccaccatggaagactggatacgcacctggaaacaaaaggactatggaagctgttcaagatacatttgatcttcagaaaagcagaatttggttcaactgttgacagaggacacaaatacgttgttccagagctcagccttctcactctaaaagaaagatatttttctatttattttctacatctggccagtggctctggtgctagatgccactgtagccagatctccaacagtgccttggaccatggactcatactcaactgagtaagaaggggctggtgcccagtcggggtggctgagctggtccttaataggttgtttcttggtcttgctttcttcatgccctccccactgctcctgccacctttagataagtttctctagctaattttgtggccaatgtaaaattcgtcatcaacctaacaaacacaaccttctcagcagcatttctcccctgtgatggaaataaagtgtttagggcagtgggaggagaaaattctccaggtgaatggggaagggtctgttccagcctctccctactcccatcccatttccaccaactggggaactgtgactatctatctcccccgacttctaccagggatgccttcacgccaaggctgttctcaccagctgcctcagatgacaaatgaggctaatggacataatctacagtgtcctttttcacttgcaccttttttataagaatatattgtaatactaaaaaatattaaattcataccatccctacccagtc

SEQ ID NO: 8557 - DNA, 2141 bp, Homo sapiens
  source 1..2141: mol_type = unassigned DNA
aacggcgcggcccgaggggcgcaggcgggagggcggcggggctgtggccgctgacggccgcatcgagcccggcgacatgttgctgcaggtgaatgacgtgaactttgagaacatgagcaatgacgatgccgtgcgggtgctgcgggagatcgtttcccagacggggtgagggctgggggcgctggagcgggaggggccaggcagggaggtgggaccatgggggccttgctgtgtgaccaccgttcctgcaggcccatcagcctcactgtggccaagtgctgggacccaacgccccgaagctacttcaccgtcccacgggctgacccggtgcggcccatcgaccccgccgcctggctgtcccacacggcggcactgacaggagccctgccccgctacgagctggaagaggcgccgctgacggtgaagagtgacatgagcgccgtcgtccgggtcatgcagctgccagactcgggactggagatccgcgaccgcatgtggctcaagatcaccatcgccaatgccgtcatcggggcggacgtggtggactggctgtacacacacgtggagggcttcaaggagcggcgggaggcccggaagtacgccagcagcttgctgaagcacggcttcctgcggcacacggtcaacaagatcaccttctccgagcagtgctactacgtcttcggggatctctgcagcaatctcgccaccctgaacctcaacagtggctccagtgggacttcggatcaggacacgctggccccgctgccccacccggctgccccctggcctctgggtcagggctacccctaccagtacccgggacccccaccctgcttcccgcctgcctaccaggacccgggctttagctatggcagcggcagcaccgggagtcagcagagtgaagggagcaaaagcagtgggtccacccggagcagccgccgggccccgggccgtgagaaggagcgtcgggcggcgggagctgggggcagtggcagtgaatcggatcacacggcaccgagtggggtggggagcagctggcgagagcgtccggccggccagctcagccgtggcagcagcccacgcagtcaggcctcggctaccgccccggggctccccccgccccaccccacgaccaaggcctatacagtggtgggggggccacccgggggaccccctgtccgggagctggctgccgtccccccggaattgacaggcagccgccagtccttccagaaggctatggggaacccctgcgagttcttcgtggacatcatgtgactcgtggcgcatgccccagccctgcctgaggtggggagctggcggtcctgccgcatgcagagctcgcgtgggcttgccttcgtgggggccaggacgggaggcagggtggggggcaggctggaccaccaccatctgccctggcagcctggctgctccagctcctgacagcacctgtgtctgagcagccgtgttgggggcgctccctctctgcccctcagcgagagcctcggacctcccaaccccttgtgtctggtggggatccctcctgggatgaggaagaccccctcgggctctcggctgacccccacctcctgcacagctgtgcccaggcccccagggtggtccatgcggggcaaccccctgcggtgcacaggccccctgtctggagtagggatctaatttatttatttattgcctggccggtgactcgggggaggaggcgaccctgtcatctgtcccacctgctgctgccccttggagcagcctgcaccttctctcctcccatccggcaacagtctgaaagtacgtggaggacgggaccggaagacgagagagggctggacatcctgcccaccgtgtcccagccagggcagggagggaccatggcccgcagggtcaaggggccccgatgtgcacagctgccacagggagggaggtcttggggagatgggcagtcaggtggcccgtccttggtgagtgcacacactgcgcgcacacatcgcggccttcctggcttctctggcccccacgtgtctgtgctgtagatactgtatcaaagtcccagcgtttagatggttaacatagagctgcttctgtgtaaatgctgcttattttaaacactaaaaagcgtttaattttatggg

SEQ ID NO: 8558 - DNA, 2268 bp, Homo sapiens
  source 1..2268: mol_type = unassigned DNA
gcgggtagcgccccgcgtccgagccccgggccgggccctgagcgcgcgggctccgcgccgccgccgcgccatggcggagaccaagattatctaccacatggacgaggaggagacgccgtacctggtcaagctgcccgtggcccccgagcgcgtcacgctggccgacttcaagaacgtgctcagcaaccggcccgtgcacgcctacaaattcttctttaagtccatggaccaggacttcggggtggtgaaggaggagatctttgatgacaatgccaagcttccctgcttcaacggccgcgtggtctcctggctggtcctggctgagggtgctcactcggatgcggggtcccagggcacggacagccacacagacctgcccccgcctcttgagcggacaggcggcatcggggactcccggcccccctccttccacccaaatgtggccagcagccgtgacgggatggacaacgagacaggcacggagtccatggtcagtcaccggcgggagcgtgcccgacgccggaaccgcgaggaggccgcccggaccaatgggcacccaaggggagaccgacggcgggatgtggggctgcccccagacagcgcgtccaccgccctcagcagcgagcttgagtccagcagctttgtggactcggacgaggatggcagcacgagcaggctcagcagctccacggagcagagcacctcatccagactcatccggaagtacgccagcagcttgctgaagcacggcttcctgcggcacacggtcaacaagatcaccttctccgagcagtgctactacgtcttcggggatctctgcagcaatctcgccaccctgaacctcaacagtggctccagtgggacttcggatcaggacacgctggccccgctgccccacccggctgccccctggcctctgggtcagggctacccctaccagtacccgggacccccaccctgcttcccgcctgcctaccaggacccgggctttagctatggcagcggcagcaccgggagtcagcagagtgaagggagcaaaagcagtgggtccacccggagcagccgccgggccccgggccgtgagaaggagcgtcgggcggcgggagctgggggcagtggcagtgaatcggatcacacggcaccgagtggggtggggagcagctggcgagagcgtccggccggccagctcagccgtggcagcagcccacgcagtcaggcctcggctaccgccccggggctccccccgccccaccccacgaccaaggcctatacagtggtgggggggccacccgggggaccccctgtccgggagctggctgccgtccccccggaattgacaggcagccgccagtccttccagaaggctatggggaacccctgcgagttcttcgtggacatcatgtgactcgtggcgcatgccccagccctgcctgaggtggggagctggcggtcctgccgcatgcagagctcgcgtgggcttgccttcgtgggggccaggacgggaggcagggtggggggcaggctggaccaccaccatctgccctggcagcctggctgctccagctcctgacagcacctgtgtctgagcagccgtgttgggggcgctccctctctgcccctcagcgagagcctcggacctcccaaccccttgtgtctggtggggatccctcctgggatgaggaagaccccctcgggctctcggctgacccccacctcctgcacagctgtgcccaggcccccagggtggtccatgcggggcaaccccctgcggtgcacaggccccctgtctggagtagggatctaatttatttatttattgcctggccggtgactcgggggaggaggcgaccctgtcatctgtcccacctgctgctgccccttggagcagcctgcaccttctctcctcccatccggcaacagtctgaaagtacgtggaggacgggaccggaagacgagagagggctggacatcctgcccaccgtgtcccagccagggcagggagggaccatggcccgcagggtcaaggggccccgatgtgcacagctgccacagggagggaggtcttggggagatgggcagtcaggtggcccgtccttggtgagtgcacacactgcgcgcacacatcgcggccttcctggcttctctggcccccacgtgtctgtgctgtagatactgtatcaaagtcccagcgtttagatggttaacatagagctgcttctgtgtaaatgctgcttattttaaacactaaaaagcgtttaattttatggg

SEQ ID NO: 8559 - DNA, 3239 bp, Homo sapiens
  source 1..3239: mol_type = unassigned DNA
gggcggcggggctgagcgcgccctccgtgctgcgtccctcgcgccgctcccgggccgggggcggatgggcggccgcgggccgcggggcagcagtcgggacgcgcgcgggagccgggggcggcggccggggcctgggcggtcgggcgggggcgcccgggggcctcggagcgtcggggccgagagcggtgcgggccgggcggggcgcaggcgggcgggcgggtagcgccccgcgtccgagccccgggccgggccctgagcgcgcgggctccgcgccgccgccgcgccatggcggagaccaagattatctaccacatggacgaggaggagacgccgtacctggtcaagctgcccgtggcccccgagcgcgtcacgctggccgacttcaagaacgtgctcagcaaccggcccgtgcacgcctacaaattcttctttaagtccatggaccaggacttcggggtggtgaaggaggagatctttgatgacaatgccaagcttccctgcttcaacggccgcgtggtctcctggctggtcctggctgagggtgctcactcggatgcggggtcccagggcacggacagccacacagacctgcccccgcctcttgagcggacaggcggcatcggggactcccggcccccctccttccacccaaatgtggccagcagccgtgacgggatggacaacgagacaggcacggagtccatggtcagtcaccggcgggagcgtgcccgacgccggaaccgcgaggaggccgcccggaccaatgggcacccaaggggagaccgacggcgggatgtggggctgcccccagacagcgcgtccaccgccctcagcagcgagcttgagtccagcagctttgtggactcggacgaggatggcagcacgagcaggctcagcagctccacggagcagagcacctcatccagactcatccggaagcacaaacgccggcggaggaagcagcgccttcggcaggcggaccgggcctcctccttcagcagcataaccgactccaccatgtccctcaacatcgtcactgtcacgctcaacatggaaagacatcactttctgggcatcagcatcgtggggcagagcaacgaccgtggagacggcggcatctacattggctccatcatgaagggcggggctgtggccgctgacggccgcatcgagcccggcgacatgttgctgcaggtgaatgacgtgaactttgagaacatgagcaatgacgatgccgtgcgggtgctgcgggagatcgtttcccagacggggcccatcagcctcactgtggccaagtgctgggacccaacgccccgaagctacttcaccgtcccacgggctgacccggtgcggcccatcgaccccgccgcctggctgtcccacacggcggcactgacaggagccctgccccgctacggtacgagtccctgctccagcgccgtcacgcgcaccagctcctcctcactaaccagctccgtgcctggtgctccacagctggaagaggcgccgctgacggtgaagagtgacatgagcgccgtcgtccgggtcatgcagctgccagactcgggactggagatccgcgaccgcatgtggctcaagatcaccatcgccaatgccgtcatcggggcggacgtggtggactggctgtacacacacgtggagggcttcaaggagcggcgggaggcccggaagtacgccagcagcttgctgaagcacggcttcctgcggcacacggtcaacaagatcaccttctccgagcagtgctactacgtcttcggggatctctgcagcaatctcgccaccctgaacctcaacagtggctccagtgggacttcggatcaggacacgctggccccgctgccccacccggctgccccctggcctctgggtcagggctacccctaccagtacccgggacccccaccctgcttcccgcctgcctaccaggacccgggctttagctatggcagcggcagcaccgggagtcagcagagtgaagggagcaaaagcagtgggtccacccggagcagccgccgggccccgggccgtgagaaggagcgtcgggcggcgggagctgggggcagtggcagtgaatcggatcacacggcaccgagtggggtggggagcagctggcgagagcgtccggccggccagctcagccgtggcagcagcccacgcagtcaggcctcggctaccgccccggggctccccccgccccaccccacgaccaaggcctatacagtggtgggggggccacccgggggaccccctgtccgggagctggctgccgtccccccggaattgacaggcagccgccagtccttccagaaggctatggggaacccctgcgagttcttcgtggacatcatgtgactcgtggcgcatgccccagccctgcctgaggtggggagctggcggtcctgccgcatgcagagctcgcgtgggcttgccttcgtgggggccaggacgggaggcagggtggggggcaggctggaccaccaccatctgccctggcagcctggctgctccagctcctgacagcacctgtgtctgagcagccgtgttgggggcgctccctctctgcccctcagcgagagcctcggacctcccaaccccttgtgtctggtggggatccctcctgggatgaggaagaccccctcgggctctcggctgacccccacctcctgcacagctgtgcccaggcccccagggtggtccatgcggggcaaccccctgcggtgcacaggccccctgtctggagtagggatctaatttatttatttattgcctggccggtgactcgggggaggaggcgaccctgtcatctgtcccacctgctgctgccccttggagcagcctgcaccttctctcctcccatccggcaacagtctgaaagtacgtggaggacgggaccggaagacgagagagggctggacatcctgcccaccgtgtcccagccagggcagggagggaccatggcccgcagggtcaaggggccccgatgtgcacagctgccacagggagggaggtcttggggagatgggcagtcaggtggcccgtccttggtgagtgcacacactgcgcgcacacatcgcggccttcctggcttctctggcccccacgtgtctgtgctgtagatactgtatcaaagtcccagcgtttagatggttaacatagagctgcttctgtgtaaatgctgcttattttaaacactaaaaagcgtttaattttatgggaca

SEQ ID NO: 8560 - DNA, 2926 bp, Homo sapiens
  source 1..2926: mol_type = unassigned DNA
ccccgggccgggccctgagcgcgcgggctccgcgccgccgccgcgccatggcggagaccaagattatctaccacatggacgaggaggagacgccgtacctggtcaagctgcccgtggcccccgagcgcgtcacgctggccgacttcaagaacgtgctcagcaaccggcccgtgcacgcctacaaattcttctttaagtccatggaccaggacttcggggtggtgaaggaggagatctttgatgacaatgccaagcttccctgcttcaacggccgcgtggtctcctggctggtcctggctgagggtgctcactcggatgcggggtcccagggcacggacagccacacagacctgcccccgcctcttgagcggacaggcggcatcggggactcccggcccccctccttccacccaaatgtggccagcagccgtgacgggatggacaacgagacaggcacggagtccatggtcagtcaccggcgggagcgtgcccgacgccggaaccgcgaggaggccgcccggaccaatgggcacccaaggggagaccgacggcgggatgtggggctgcccccagacagcgcgtccaccgccctcagcagcgagcttgagtccagcagctttgtggactcggacgaggatggcagcacgagcaggctcagcagctccacggagcagagcacctcatccagactcatccggaagcacaaacgccggcggaggaagcagcgccttcggcaggcggaccgggcctcctccttcagcagcataaccgactccaccatgtccctcaacatcgtcactgtcacgctcaacatggaaagacatcactttctgggcatcagcatcgtggggcagagcaacgaccgtggagacggcggcatctacattggctccatcatgaagggcggggctgtggccgctgacggccgcatcgagcccggcgacatgttgctgcaggtgaatgacgtgaactttgagaacatgagcaatgacgatgccgtgcgggtgctgcgggagatcgtttcccagacggggcccatcagcctcactgtggccaagtgctgggacccaacgccccgaagctacttcaccgtcccacgggctgacccggtgcggcccatcgaccccgccgcctggctgtcccacacggcggcactgacaggagccctgccccgctacgagctggaagaggcgccgctgacggtgaagagtgacatgagcgccgtcgtccgggtcatgcagctgccagactcgggactggagatccgcgaccgcatgtggctcaagatcaccatcgccaatgccgtcatcggggcggacgtggtggactggctgtacacacacgtggagggcttcaaggagcggcgggaggcccggaagtacgccagcagcttgctgaagcacggcttcctgcggcacacggtcaacaagatcaccttctccgagcagtgctactacgtcttcggggatctctgcagcaatctcgccaccctgaacctcaacagtggctccagtgggacttcggatcaggacacgctggccccgctgccccacccggctgccccctggcctctgggtcagggctacccctaccagtacccgggacccccaccctgcttcccgcctgcctaccaggacccgggctttagctatggcagcggcagcaccgggagtcagcagagtgaagggagcaaaagcagtgggtccacccggagcagccgccgggccccgggccgtgagaaggagcgtcgggcggcgggagctgggggcagtggcagtgaatcggatcacacggcaccgagtggggtggggagcagctggcgagagcgtccggccggccagctcagccgtggcagcagcccacgcagtcaggcctcggctaccgccccggggctccccccgccccaccccacgaccaaggcctatacagtggtgggggggccacccgggggaccccctgtccgggagctggctgccgtccccccggaattgacaggcagccgccagtccttccagaaggctatggggaacccctgcgagttcttcgtggacatcatgtgactcgtggcgcatgccccagccctgcctgaggtggggagctggcggtcctgccgcatgcagagctcgcgtgggcttgccttcgtgggggccaggacgggaggcagggtggggggcaggctggaccaccaccatctgccctggcagcctggctgctccagctcctgacagcacctgtgtctgagcagccgtgttgggggcgctccctctctgcccctcagcgagagcctcggacctcccaaccccttgtgtctggtggggatccctcctgggatgaggaagaccccctcgggctctcggctgacccccacctcctgcacagctgtgcccaggcccccagggtggtccatgcggggcaaccccctgcggtgcacaggccccctgtctggagtagggatctaatttatttatttattgcctggccggtgactcgggggaggaggcgaccctgtcatctgtcccacctgctgctgccccttggagcagcctgcaccttctctcctcccatccggcaacagtctgaaagtacgtggaggacgggaccggaagacgagagagggctggacatcctgcccaccgtgtcccagccagggcagggagggaccatggcccgcagggtcaaggggccccgatgtgcacagctgccacagggagggaggtcttggggagatgggcagtcaggtggcccgtccttggtgagtgcacacactgcgcgcacacatcgcggccttcctggcttctctggcccccacgtgtctgtgctgtagatactgtatcaaagtcccagcgtttagatggttaacatagagctgcttctgtgtaaatgctgcttattttaaacactaaaaagcgtttaattttatgggaca

SEQ ID NO: 8561 - DNA, 5254 bp, Homo sapiens
  source 1..5254: mol_type = unassigned DNA
gccgcggccaccggaagagtcgcggtcgccagtccagtcgggagagtggggagcggaagcggcggccgcggcggcggcgggcggcgctgggacccggtagcggccggagaacaagggagctggcgccgccagcagccgccgagctgggttgagccgctgggccgcgccgcgcgccgccgccgtctgggaggctcggcccggccgcccgagcaggccgcgcgcgggccgccgggcccgaggccagagccatgggcgagaccaagatcatctaccacttggatgggcaggagacgccgtaccttgtgaagctgcccctgcccgccgagcgcgtcaccttggcggactttaagggcgttttgcagcgacccagctataagttcttcttcaagtctatggacgacgatttcggagtggtgaaggaggagatctcggatgacaatgccaagctaccatgcttcaatggccgggtggtgtcctggctggtgtcagctgagggctcacacccagacccagcccccttctgtgctgataacccatcggagctgccaccacctatggagcgcacgggaggcatcggggactcccgacccccatccttccaccctcatgctggtgggggcagccaggagaacctggacaatgacacagagacggactctttggtgtctgcccagcgagagcggccacgccggagggatggcccagagcatgcaacccggctaaatggaactgcgaagggggaacggcggcgagaaccagggggttatgatagctcatccacccttatgagcagtgagctggagaccaccagcttctttgactcagatgaggatgactccaccagcaggttcagcagctccacagaacagagcagtgcctcacgcctgatgagaagacacaagcggcggcggcggaagcagaaggtttctcggattgagcggtcctcgtccttcagcagcatcacggactccaccatgtcactcaacatcatcacggtcactctcaacatggaaaaatataacttcttgggcatctccattgtgggccaaagcaacgagcgtggtgacggcggcatctacattggctctatcatgaagggtggggccgtggctgctgatggacgcatcgagccaggagatatgttgttacaggtaaacgagatcaactttgagaacatgagtaatgacgatgcagtccgggtactgcgggagattgtgcacaaaccggggcccatcaccctgactgtagccaagtgctgggacccaagtccacgtggttgcttcacattgcccaggagcgagcccatccggcccattgaccctgcggcctgggtctcccacactgcagccatgaccggcaccttccctgcatacggcatgagcccctccctgagcaccatcacctccaccagctcctccatcaccagttccatccctgacacagagcgcctagacgacttccacttgtccatccacagtgacatggctgccatcgtaaaagccatggcctcccctgaatcagggttggaggtccgtgaccgcatgtggctcaagattaccatccctaatgctttcatcggctcagatgtggtggactggctgtaccacaatgtggaaggcttcacggaccggagggaggcccgcaagtatgccagcaacctgctgaaagctggcttcatccgccataccgtcaacaagatcaccttctccgagcagtgctactacatcttcggtgacctctgcggcaacatggccaacctgtctctccacgatcacgatggctccagtggcgcctctgaccaggacacactggcccctttgccgcacccgggggccgccccttggcccatggctttcccgtaccagtacccgccacccccgcacccatacaacccgcacccgggcttcccggagctgggctacagctacggcgggggcagcgccagcagtcagcacagcgaaggcagtcggagcagtggctccaaccgtagcggcagcgatcggaggaaggagaaggacccgaaggccggggactccaagtccgggggcagcggcagcgaatcggaccacaccacacgcagcagcctgcgggggccgcgggagcgggcgcccagcgagcgctcagggccggcggccagcgagcacagccaccgcagccaccattccctggccagcagccttcgcagccaccacacacacccgagctacggtcctcccggagtgccccctctctacggcccccccatgctgatgatgcccccgccgcccgcggccatggggcccccaggagcccctccgggccgcgacctggcctcagtgcccccggaactgaccgccagcagacagtccttccgcatggccatgggaaaccccagtgagttctttgtggatgtgatgtgagcagggcccctcccccagctccattccgctcccaccccagccggctgcgttcctctctccatccgtccgtcttttttactttgtctggtacctgaaagggaaataaaaggaactaaatccaggtgcgctaactgctcgcagggtgctgcgagggtggggtgcacctaccgattggctctgcagccccctaacctgcctctggccccagttcgtttcctctgcccactaatccctgcgcaggacttcccaggaccccttttgtctctgggaccagacttgttggtgctaccccttactcccctctgcaacccccattttgggagttgaccccagcaatgaccttggtggcacgctcactccctcattctctcgtttcccctttagctccctttcaccatttattcagctacatcatccctctattaaccccaccccatcaggcacgtgtgcaaacctcttgactttaccccacattactgaaaccaaaatatatttgcttcatctgcccctactaaccatccccctgcctgctgcctcagtcctgcaacctaaagctgtagtcgcctccaatagccatccatgccatccctgcctgtgcctagatcagaggcccagagggccccctcagttgcctgagcagctggtggcttccagggagcatctctgctctacccctgccccatgcctgccctgcgtgctggttccttcagacccctaaccctactaaccagcaggctcatctcacctccaggcctgaaacatttcttttctttcttttttcctcccccaatttaccctgggcctggagcagccaagaatttcgggctgtttgactttctgtgagcccccagcgaggggaggcccagcctccgaggagaccaggaaccctgcttcagcagcccctcagggcttcccaaggatgtccagcccccacacccacacgttaacataatgagtcactaggcttctggggagggcccaacttcacccatgcatgagagactctcctcctttccagagagaatcggatcgcaccacgtgtggcagcctgcggcggggggaggggggcctctttagctctctttatctttctctctcactcatgtatgcatacatgcacagagatgcatacacaggtgcctatgcaagttcatttaagcctcagggctggtccctgcccaaagggctggaccctcctaatcctctcctaggttgtggggctggtcccctgacacccttctccccttcctggtagaccttaaacctcgcacacatgtccccagcattttctcacctggataaagcccataagctgggtctcaggctgggctcagcaaaggactcgccttgcaaccgacaggccattcccacccccacacacaacctcccctgttttcacattcaccatggcatcccagagcaaggacacaggagcccacaggccagttgaggttgggcaaggagacttccaggacttccagacagagtaccaggttttatttttcaccttattctctactttaaacaaatcataactttctctttaagcctctgctataaattctcctggctctcctgggcttccatattttgggggctggggtgtcaaaagtgagatgaagttcttagctccaggttttggggtaaaccaaggtaggaacattttggcatttatttcaattaacaatacttccttggacgggtgcggtggctcacgtctgtaatcccagcactttgggaggctgagacaggtggatcacttgaggtcgggagttcgagaccagcctggccaacatagcaaaaccctgtctctactaaaaatacaaaaattagatgggtgttttggcacctgcctgtaatctcagctactcaggaggctgaggcacaagaatcgcttgaatccaggaagcaagcggaggttgcagtgagttgagatcgcactccagcctgggtgacagagtgagattctgtctcaaaagcaaactaacaaagaaaaacaatacttcctggggttttggtgtgcagagggctttgttggaagtgtgactcaatcttgcctgccttctgggagctctagaattgttcccaacccagtccatggcttctagccaccactacagggctgtttcatgtacttctctctctgactctgtcttgtccgactctcttgagaatttctcaacgattgctcatgcctgtcagtatcagtgcttccatcgttccatctttgattcacttctctttcctttctatttactcccaaaatggagtcattcatcctgatgtcctcaattgctgctgatatgctggtgattcccaaatacatagctccaacccccaacttcccccagactttagatctgtattggtattacctactggacatctctatggacagttccgtatagactcaactcatctgcccaaccaagtatgttcctcctgaattcctctcctggttacttcatcacaatctacataggctcaccagctagaaacatttatgagcttacattccttcttcccatatcttatcagcatatcatatccatttcactccaacactctgtcttgaatttggccctccctctcccctctctactttaattcattggagcatgggatttggagttaggtggttttgggtttgaattccagctctactatttttggttgtgtgatagagttatttaacctctctgagcctcagttccctcgtatgtaaaatgatgataataatacctacctcacagggttgttgtgaggatttaaattagatattgtacgaaaagtgcctagcacagtgcctggcacacagtagagtaggtgctcaataaatggtagctattattatt

SEQ ID NO: 8562 - DNA, 2309 bp, Homo sapiens
  source 1..2309: mol_type = unassigned DNA
gaacaagggagctggcgccgccagcagccgccgagctgggttgagccgctgggccgcgccgcgcgccgccgccgtctgggaggctcggcccggccgcccgagcaggccgcgcgcgggccgccgggcccgaggccagagccatgggcgagaccaagatcatctaccacttggatgggcaggagacgccgtaccttgtgaagctgcccctgcccgccgagcgcgtcaccttggcggactttaagggcgttttgcagcgacccagctataagttcttcttcaagtctatggacgacgatttcggagtggtgaaggaggagatctcggatgacaatgccaagctaccatgcttcaatggccgggtggtgtcctggctggtgtcagctgagggctcacacccagacccagcccccttctgtgctgataacccatcggagctgccaccacctatggagcgcacgggaggcatcggggactcccgacccccatccttccaccctcatgctggtgggggcagccaggagaacctggacaatgacacagagacggactctttggtgtctgcccagcgagagcggccacgccggagggatggcccagagcatgcaacccggctaaatggaactgcgaagggggaacggcggcgagaaccagggggttatgatagctcatccacccttatgagcagtgagctggagaccaccagcttctttgactcagatgaggatgactccaccagcaggttcagcagctccacagaacagagcagtgcctcacgcctgatgagaagacacaagcggcggcggcggaagcagaaggtttctcggattgagcggtcctcgtccttcagcagcatcacggactccaccatgtcactcaacatcatcacggtcactctcaacatggaaaaatataacttcttgggcatctccattgtgggccaaagcaacgagcgtggtgacggcggcatctacattggctctatcatgaagggtggggccgtggctgctgatggacgcatcgagccaggagatatgttgttacaggtaaacgagatcaactttgagaacatgagtaatgacgatgcagtccgggtactgcgggagattgtgcacaaaccggggcccatcaccctgactgtagccaagtgctgggacccaagtccacgtggttgcttcacattgcccaggagcgagcccatccggcccattgaccctgcggcctgggtctcccacactgcagccatgaccggcaccttccctgcatacggcatgagcccctccctgagcaccatcacctccaccagctcctccatcaccagttccatccctgacacagagcgcctagacgacttccacttgtccatccacagtgacatggctgccatcgtaaaagccatggcctcccctgaatcagggttggaggtccgtgaccgcatgtggctcaagattaccatccctaatgctttcatcggctcagatgtggtggactggctgtaccacaatgtggaaggcttcacggaccggagggaggcccgcaagtatgccagcaacctgctgaaagctggcttcatccgccataccgtcaacaagatcaccttctccgagcagtgctactacatcttcggtgacctctgcggcaacatggccaacctgtctctccacgatcacgatggctccagtggcgcctctgaccaggacacactggcccctttgccgcacccgggggccgccccttggcccatggctttcccgtaccagtacccgccacccccgcacccatacaacccgcacccgggcttcccggagctgggctacagctacggcgggggcagcgccagcagtcagcacagcgaaggcagtcggagcagtggctccaaccgtagcggcagcgatcggaggaaggagaaggacccgaaggccggggactccaagtccgggggcagcggcagcgaatcggaccacaccacacgcagcagcctgcgggggccgcgggagcgggcgcccagcgagcgctcagggccggcggccagcgagcacagccaccgcagccaccattccctggccagcagccttcgcagccaccacacacacccgagctacggtcctcccggagtgccccctctctacggcccccccatgctgatgatgcccccgccgcccgcggccatggggcccccaggagcccctccgggccgcgacctggcctcagtgcccccggaactgaccgccagcagacagtccttccgcatggccatgggaaaccccagtgagttctttgtggatgtgatggtgctgcgagggtggggtgca

SEQ ID NO: 8563 - DNA, 2294 bp, Homo sapiens
  source 1..2294: mol_type = unassigned DNA
gccgccgccgtctgggaggctcggcccggccgcccgagcaggccgcgcgcgggccgccgggcccgaggccagagccatgggcgagaccaagatcatctaccacttggatgggcaggagacgccgtaccttgtgaagctgcccctgcccgccgagcgcgtcaccttggcggactttaagggcgttttgcagcgacccagctataagttcttcttcaagtctatggacgacgatttcggagtggtgaaggaggagatctcggatgacaatgccaagctaccatgcttcaatggccgggtggtgtcctggctggtgtcagctgagggctcacacccagacccagcccccttctgtgctgataacccatcggagctgccaccacctatggagcgcacgggaggcatcggggactcccgacccccatccttccaccctcatgctggtgggggcagccaggagaacctggacaatgacacagagacggactctttggtgtctgcccagcgagagcggccacgccggagggatggcccagagcatgcaacccggctaaatggaactgcgaagggggaacggcggcgagaaccagggggttatgatagctcatccacccttatgagcagtgagctggagaccaccagcttctttgactcagatgaggatgactccaccagcaggttcagcagctccacagaacagagcagtgcctcacgcctgatgagaagacacaagcggcggcggcggaagcagaaggtttctcggattgagcggtcctcgtccttcagcagcatcacggactccaccatgtcactcaacatcatcacggtcactctcaacatggaaaaatataacttcttgggcatctccattgtgggccaaagcaacgagcgtggtgacggcggcatctacattggctctatcatgaagggtggggccgtggctgctgatggacgcatcgagccaggagatatgttgttacaggtaaacgagatcaactttgagaacatgagtaatgacgatgcagtccgggtactgcgggagattgtgcacaaaccggggcccatcaccctgactgtagccaagtgctgggacccaagtccacgtggttgcttcacattgcccaggaccatgaccggcaccttccctgcatacggcatgagcccctccctgagcaccatcacctccaccagctcctccatcaccagttccatccctgacacagagcgcctagacgacttccacttgtccatccacagtgacatggctgccatcgtaaaagccatggcctcccctgaatcagggttggaggtccgtgaccgcatgtggctcaagattaccatccctaatgctttcatcggctcagatgtggtggactggctgtaccacaatgtggaaggcttcacggaccggagggaggcccgcaagtatgccagcaacctgctgaaagctggcttcatccgccataccgtcaacaagatcaccttctccgagcagtgctactacatcttcggtgacctctgcggcaacatggccaacctgtctctccacgatcacgatggctccagtggcgcctctgaccaggacacactggcccctttgccgcacccgggggccgccccttggcccatggctttcccgtaccagtacccgccacccccgcacccatacaacccgcacccgggcttcccggagctgggctacagctacggcgggggcagcgccagcagtcagcacagcgaaggcagtcggagcagtggctccaaccgtagcggcagcgatcggaggaaggagaaggacccgaaggccggggactccaagtccgggggcagcggcagcgaatcggaccacaccacacgcagcagcctgcgggggccgcgggagcgggcgcccagcgagcgctcagggccggcggccagcgagcacagccaccgcagccaccattccctggccagcagccttcgcagccaccacacacacccgagctacggtcctcccggagtgccccctctctacggcccccccatgctgatgatgcccccgccgcccgcggccatggggcccccaggagcccctccgggccgcgacctggcctcagtgcccccggaactgaccgccagcagacagtccttccgcatggccatgggaaaccccagtgagttctttgtggatgtgatgtgagcagggcccctcccccagctccattccgctcccaccccagccggctgcgttcctctctccatccgtccgtcttttttactttgtctggtacctgaaagggaaataaaaggaactaaat

SEQ ID NO: 8564 - DNA, 1037 bp, Homo sapiens
  source 1..1037: mol_type = unassigned DNA
tgacatgggcagagtttctcttgcccttaaagtcttactttccacttctaaataccttccaagatgttttcctccacaaacacaatatcttccttaaaagatagaccctgcatcagttgttaagctaacacatctttctcctcactacaaatgtatcactattgaatttctctccacaagtgtgaagatggctggagtagaaattctggcattgcttctcatcaccagaaggaaaaattcagagaaacagcccgaccacccaccctgacaaatgcctgaggcccacatgcagcctgcaaaactgcaaacatcactgcccaccacagaccacggaagcaagaagcctgtttcctgttacttgccaccactcagcaatgcccaccccatgtgtatagaggtccagaatgctcaaaattgttcttctgctgctgcaacattggagccttccatcatctcagacacatgcttttataaaccaataacaaaggatcaactttcttctaggtctgaattgaatactgtgaggctaaagtgtcttaactcattgagggggtggaaaatattaaaccaactaagccttacctaattacaatgccctgctgctgctcatctccctttattcgtttgtactcatactcaaaagaggttgtgtttttttcccttcattcaataacgattttccttgattcttagataagtccattccataatgtactccttaactgttctgaatttctttcagagaaaaactggaaaagacattaaatcatgttgaaatatttgactgactttcatctaggaaaaaatataaagttaaatctctacactaaaatataaacaaaataaaaagaaatttcagtaagaccaaaacatttacttttaaaaacctatatcatgttatatgtataactgaggaatgtaatcataattttgatttgtagaactgaagacaatatcaagtaaccctcaaaatgtaaattcaagaaacaaggtagttacgttagcctgcattaaaataaaaatatctgtgtgacaat

SEQ ID NO: 8565 - DNA, 3596 bp, Homo sapiens
  source 1..3596: mol_type = unassigned DNA
tttaacttggacacttcctccaaacaccccagggttccttgcccaacctcctcgaatacagcctctctgggagtttccctctccccgactcagccgcgctggtccctgccttttcagcgctacctgccctccgtctgggacctggctcctttcctctcgccggtgtttcctcgccacccgcggaggggagggcggaccccagcctccttgccgcctgccccgcctccccgcctccccgccggcccggctcgggccgcgcaggcgcaccaggcgcggtccggaggccgagggcgaccacagcagcctccgcctcctgctgctcaggactattctgcgctgggctagtcggcggtgacccggactgcgcccggcagtggcttcgcgggcgacgcgtcgccatgggctctcgctggagcagcgaagaggagaggcagccgctgctggggcccgggctcgggcctgggctgggggcctcctggagaagccgggaggcggcggcggcggcgctgcccgcggcggtcccgggtcccgggcgggtatacgggcgccgctggctggtgctgctgctcttctcgctgctggcgttcgttcagggcctggtctggaacacctggggtcccatccagaactcggcgcgccaggcctacggcttctccagctgggacatcgcgctgctcgtgctgtgggggcccatcggcttcctgccctgcttcgcgttcatgtggctcctggacaagagaggtctccggataactgtgctcctgacatccttccttatggttttgggaactggtctaagatgcatacctatatcagacttaatccttaaaagaagattaattcatggaggacagatgttaaatggattggcaggtccaactgtaatgaatgcagcaccatttctctctacgacgtggttttctgcagatgaaagggccacagccacagctattgcatcaatgctcagttatcttgggggagcatgtgcatttttagttggaccacttgttgttccagctcccaatgggacatcacctcttcttgctgcagagagcagcagggcgcatattaaagatcgcatagaggctgtgttatatgcagaatttggagttgtctgcttaatattttctgcaacactagcttatttcccaccccgacctcctcttcctcccagtgttgctgcagctagccagcggctgagttatcggagaagcgtttgtagattattaagcaattttcgatttttgatgattgctttagcatatgccataccacttggtgtatttgctggctggtctggagttctggacttaattttaacaccagcgcatgtcagccaagtagatgctggctggattggattttggtccatagttggaggctgtgttgttggaatagctatggcaaggtttgcagattttatcaggggtatgctgaaactaattcttctcctcctgttttcgggagctacactgtcatccacgtggttcaccctgacctgtttgaacagcatcacacacctacctttaaccacagtgacattgtatgcctcctgtattctcctgggagtgttcttgaatagcagcgtgcctatattttttgagctttttgtggaaactgtctacccagttccagaaggaattacttgtggagttgtcacttttttaagtaatatgtttatgggagtacttttattttttctcacattttatcatacagagttgtcttggttcaactggtgccttcccgggtcgtgtttgctcagtctcctcctcattctgtgcttcagggaatcctatgacagactctatcttgatgtggttgtctccgtttaatagcacagacttgaaggagtttaaaaggaggctggaaatcaatactgcacactgcacatttgctcagaattgcacatctaacaggaaaagagggagaagaaagaaacttcattcagaggttttgttaggttacagattatcacattaatttaattactactaggtaataataatgggagacttgagtgataataggggattttaaaactctacagatggcatacctgtgcctgcttctggggttggaagtgtgacttcttacacataaagcactacctaagtaattctctctctgttttgtgccagtgctaaactactgattacttgtaattatgaaaagaaataaagggtgtctatcatatgaagataacgccttccctaagtcacatatcagaataggaagatatgccactaacttctaaagaagttcaaaccctgtatccaattttaatgataaaatagccaagaggtatatcgatgatggaaattagccacatgtacactacattttttctaataaagccatttcttatatgactccttattttaatcaggtcagaagcccttggccatctttactatggtgatcaggtgctttccagtgacttctgagcataggcactgtgtctccatctcaacttatccttgtttctgtgaaatacaatttcatctactaggcccttaaataattatgtgagggtgtctaaatgtttaatatgattacattaaatattgtatgaaaaaatgtaattccattaggatctagcactttgttacaagtgaaatgacaagtcacatggacatactgtgtcttctgcctgtatatggtggcatgagatgtaatgtccagagccaacaattatttaccagggttagattttattcagtgacccttgtttaaaaataataatttatcacattgaaactttcagctctgtcgaatgatttctgaattacatcctgtgtttcagcttaggttgtaaaatactccgttctctgtggagtcagcatatttgagagggcagcgttttgccagtacctatcttctttctacagaagatagctttttaagaaataagagttccacattgagtggctgtcagacacagatttcactgtgacgtaaaatacactgcagtgagaatatggtatcaccactattcatatttacatcattcccctcacacagaaaaaccaacccttttcccaaaaagtcaagaatactgctatacctttattattctcagcttcctccagcccttcttgtttttcctcacttgaaattgaaccttcattgtcagctaagtatatatacttttgtgttttcctggacagagtgcaagtggctcttatcagccaaggtggtgaaggttcaggaaagctgggcagcactgggccctgctcctctctgcacctgtgtgcgccatgacacacccacatgcagattcccaagtctgtctcccctcccccttagcaagtacaaggctgtgcattaactcacctcggtcctagaggagtatcctagtactgcttggcaacttctaagaccctaacttgtgaaactagggaagtaagaaaccgttcaaatttaacatctgtcttcagtcatctttaaatcgtctctctttataaacactctgctcacttagcagaaggactgaaggaactaaggaacttgctaaagagaagaagaaaacaaaagctagacttagttccagttaattctgttattcttctgaaataaaaatgaaataaaaggaa

SEQ ID NO: 8566 - DNA, 2706 bp, Homo sapiens
  source 1..2706: mol_type = unassigned DNA
ggaaggagcaggaggcagcccaggcggagcgggaggagctggcagcggggcgcatgccaggcgggggtcctcagggcgccccagccgccgccggcggcggcggcgtgagccaccgcgcaggcagccgggattgcttaccacctgcagcgtgctttcggaggcggcggctggcacggaggccgggctacatgagaagctcgacagggcctgggatcgggttcctttccccagcagtgggcacactgttccggttcccaggaggggtgtctggcgaggagtcccaccactcggagtccagggccagacagtgtggccttgactcgagaggcctcttggtccggagccctgtttccaagagtgcagcagcccctactgtgacctctgtgagaggaacctcggcgcactttgggattcagctcagaggtggcaccagattgcctgacaggcttagctggccgtgtggccctgggagtgctgggtggcagcaagagtttgcagccatggatagttctgagaccctggacgccagctgggaggcagcctgcagcgatggagcaaggcgtgtccgggcagcaggctctctgccatcagcagagttgagtagcaacagctgcagccctggctgtggccctgaggtccccccaacccctcctggctctcacagtgcctttacctcaagctttagctttattcggctctcgcttggctctgccggggaacgtggagaagcagaaggctgcccaccatccagagaggctgagtcccattgccagagcccccaggagatgggagccaaagctgccagcttggacgggcctcacgaggacccgcgatgtctctctcggcccttcagtctcttggctacacgggtctctgcagacttggcccaggccgcaaggaacagctccaggccagagcgtgacatgcattctttaccagacatggaccctggctcctccagttctctggatccctcactggctggctgtggtggtgatgggagcagcggctcaggggatgcccactcttgggacaccctgctcaggaaatgggagccagtgctgcgggactgcctgctgagaaaccggaggcagatggaggtaatatccttaagattaaaacttcagaaacttcaggaagatgcagttgagaatgatgattatgataaagctgagacgttacaacaaagattagaagacctggaacaagagaaaatcagcctgcactttcaacttccttcaaggcagccagctcttagcagtttcctgggtcacctggcagcacaagtccaggctgccttgcgccgtggggccactcagcaggccagcggagatgacacccacaccccactgagaatggagccgaggctgttggaacccactgctcaggacagcttgcacgtgtccatcacgagacgagactggcttcttcaggaaaagcagcagctacagaaagaaatcgaagctctccaagcaaggatgtttgtgctggaagccaaagatcaacagctgagaagggaaatagaggagcaagagcagcaactccagtggcagggctgcgacctgaccccactggtgggccagctgtccctgggtcagctgcaggaggtcagcaaggccttgcaggacaccctggcctcagccggtcagattcccttccatgcagagccaccggaaaccataaggaggtgtgtatgagtgagaaattctgcagcaccctgaggaagaaagttaacgatattgaaacccaactaccagccttgcttgaagccaaaatgcatgccatatcaggaaaccatttctggacggctaaagacctcaccgaggagattagatcattaacatcagagagagaagggctggagggactcctcagcaagctgttggtgttgagttccaggaatgtcaaaaagctgggaagtgttaaagaagattacaacagactgagaagagaagtggagcaccaggagactgcctatggtaggtagtgcacaactgttccccggcaagatattgatgatatttgttgtgttttgtggccaggcagaatgttctgtgccttatgtgaacgtcactgtgaagagcgtcatggagcacatggcccttttccttggggacatttttggcaggtgccttggcaaaccgaatggaattacttgtcagcttttgttttcatattcacatgtgacatcttttctttttctgttccctgtctcaacctgtgtttgctaatagccttgttattatttagagcagtctctcccttggcaaggtcttgagcattttctttgtgtgacaattatcttccttttgtcccttggctccgtctccttgtctgcacaatcatagactaaatcaggctgatctgagaaaattgagggaagaccataaagtggctcttctatgtgtggacttttctgagagcttctttccccaggaaggatgatgtagaagatgtgaatgccgccttagccaaagtgtctgcttgtcagaggagttcaagtgttcctgtgttctttccttttccagtcgttaggagtaactgagcttactctgagatttgcacccagagggatggtctcagaagacgctggttcagtgcaaattgagatggtaaaaacttatttcttaaaaaatggttcctaaataaatgtcatttactaaaacaaatgaaagaaatatatatatgaataaatggctatatttt

SEQ ID NO: 8567 - DNA, 2636 bp, Homo sapiens
  source 1..2636: mol_type = unassigned DNA
ggaaggagcaggaggcagcccaggcggagcgggaggagctggcagcggggcgcatgccaggcgggggtcctcagggcgccccagccgccgccggcggcggcggcgtgagccaccgcgcaggcagccgggattgcttaccacctgcagcgtgctttcggaggcggcggctggcacggaggccgggctacatgagaagctcgacagggcctgggatcgggttcctttccccagcagtgggcacactgttccggttcccaggaggggtgtctggcgaggagtcccaccactcggagtccagggccagacagtgtggccttgactcgagaggcctcttggtccggagccctgtttccaagagtgcagcagcccctactgtgacctctgtgagaggaacctcggcgcactttgggattcagctcagaggtggcaccagattgcctgacaggcttagctggccgtgtggccctgggagtgctgggtggcagcaagagtttgcagccatggatagttctgagaccctggacgccagctgggaggcagcctgcagcgatggagcaaggcgtgtccgggcagcaggctctctgccatcagcagagttgagtagcaacagctgcagccctggctgtggccctgaggtccccccaacccctcctggctctcacagtgcctttacctcaagctttagctttattcggctctcgcttggctctgccggggaacgtggagaagcagaaggctgcccaccatccagagaggctgagtcccattgccagagcccccaggagatgggagccaaagctgccagcttggacgggcctcacgaggacccgcgatgtctctctcggcccttcagtctcttggctacacgggtctctgcagacttggcccaggccgcaaggaacagctccaggccagagcgtgacatgcattctttaccagacatggaccctggctcctccagttctctggatccctcactggctggctgtggtggtgatgggagcagcggctcaggggatgcccactcttgggacaccctgctcaggaaatgggagccagtgctgcgggactgcctgctgagaaaccggaggcagatggagctggaaccaattgctttggatccaccatggaagcctcgacatcctgaaccaaactcctattaatgaaacttcccaaatttaaacaaagcaagacaaatagatatccacacagcgtagatcatgacttctttagacatcatgaaaagaaaaagaggacccacgtggaagaatacgctcatttatgatcagggtagcatcatattcctctcccttttaacattatttcaggatagcagctgtctggatgctggccatgggcttgaaaaaaaccaggtgggcatttctgcccactgtaccgtttctcccatgcgtttcccagtcccctgtcatggcatgaaaaaaccgctattgttctgtgttgggacaattagatttttgtaggggggagaaaccacccaaaagcaaatggaaaaatatgctatgattaatgtcagttacgggaattaaacttcggaggcctttaggacaattatgaaggaatcattttccccttggtggcaatatgtactacagttgtcccttgatatccatgggggattaattccaggacgcctgtggatacagaaatccacgtgtactcaagtcttgttttcagtggatatgaaaagtcggccctccatatctgcaggttttacacttggcgaatgctgtatttttgattcatgttggattaaggatctggaacccctgatacagactgtatttattgaaaaaaaagtctgcctatgagtagactcacatgttaaaacccgtgttgttcaagggtcaaccataactgcaggcagaacatctgggcaggaagctcctgcaggaagacctgtaaactcaggtctgtggaacggcgatgatcttcttcccttgcttccagaattattgctgtgagatcaggtgcactggctacgaccttactctttgtgcagaacttatttctggtctggtttaagtgaacgttattctttctgtgcagtcctgtggttacatcaaaggttaaatttcatatagcatgtctgttatatcagacttctctgatggcctgtccagagcaaacattttaaaatattggtcctattctgtcttataacagtctgctctggtgatttttgtctcatcaattggattatgacactgtcagccactgttagtgttattctcaaattcagtcttccattcatctctccttcccttccctggcagacagacttctgcagccactgggactgttggggtgaggaaaggcaagaaccgatgtttcattctctccctcccttcttcctccctcttttttgttggttgtggggtgggctacatcttcttacccaaacaaccaggagcatttgttggcaagtttattgtgcccagtgccgatgtctggacaattaattccctaggtcagtggctttcacagtttgtgatggtgactccaggaaggaaactcaccatgaccctgtatatacatagaacaaaaatgcagcccactctgatattgtatttgttctattctagttcattaaaagtgaatgttggtcttcatccttt

SEQ ID NO: 8568 - DNA, 2872 bp, Homo sapiens
  source 1..2872: mol_type = unassigned DNA
gtaggattcatgccttccgactgtgaggctgttgtaaggaagtagcgtttgtgggaatgccacccaggagtcaaatctctagcctttgggtgatcaggaggctgacaggaaaacagcgacagagctttgcctctggtggaactcctggtggcctgcagacctgttggcgtctgtacctgcagtccactcagctttccagatgactgaaatgccccaacagggtagagtggctcgcctctccaagaaagagcagttggtgaataatcatgcctgggaaaacaatccgcctggcaaagagatggatggtatccgttggtgaatgtgatggcagcaagcccagtgcaagattctgtggcgattccttgattgacctgctcggcagccgggattgcttaccacctgcagcgtgctttcggaggcggcggctggcacggaggccgggctacatgagaagctcgacagggcctgggatcgggttcctttccccagcaaggcctcttggtccggagccctgtttccaagagtgcagcagcccctactgtgacctctgtgagaggaacctcggcgcactttgggattcagctcagaggtggcaccagattgcctgacaggcttagctggccgtgtggccctgggagtgctgggtggcagcaagagtttgcagccatggatagttctgagaccctggacgccagctgggaggcagcctgcagcgatggagcaaggcgtgtccgggcagcaggctctctgccatcagcagagttgagtagcaacagctgcagccctggctgtggccctgaggtccccccaacccctcctggctctcacagtgcctttacctcaagctttagctttattcggctctcgcttggctctgccggggaacgtggagaagcagaaggctgcccaccatccagagaggctgagtcccattgccagagcccccaggagatgggagccaaagctgccagcttggacgggcctcacgaggacccgcgatgtctctctcggcccttcagtctcttggctacacgggtctctgcagacttggcccaggccgcaaggaacagctccaggccagagcgtgacatgcattctttaccagacatggaccctggctcctccagttctctggatccctcactggctggctgtggtggtgatgggagcagcggctcaggggatgcccactcttgggacaccctgctcaggaaatgggagccagtgctgcgggactgcctgctgagaaaccggaggcagatggaggtaatatccttaagattaaaacttcagaaacttcaggaagatgcagttgagaatgatgattatgataaagctggaaccaattgctttggatccaccatggaagcctcgacatcctgaaccaaactcctattaatgaaacttcccaaatttaaacaaagcaagacaaatagatatccacacagcgtagatcatgacttctttagacatcatgaaaagaaaaagaggacccacgtggaagaatacgctcatttatgatcagggtagcatcatattcctctcccttttaacattatttcaggatagcagctgtctggatgctggccatgggcttgaaaaaaaccaggtgggcatttctgcccactgtaccgtttctcccatgcgtttcccagtcccctgtcatggcatgaaaaaaccgctattgttctgtgttgggacaattagatttttgtaggggggagaaaccacccaaaagcaaatggaaaaatatgctatgattaatgtcagttacgggaattaaacttcggaggcctttaggacaattatgaaggaatcattttccccttggtggcaatatgtactacagttgtcccttgatatccatgggggattaattccaggacgcctgtggatacagaaatccacgtgtactcaagtcttgttttcagtggatatgaaaagtcggccctccatatctgcaggttttacacttggcgaatgctgtatttttgattcatgttggattaaggatctggaacccctgatacagactgtatttattgaaaaaaaagtctgcctatgagtagactcacatgttaaaacccgtgttgttcaagggtcaaccataactgcaggcagaacatctgggcaggaagctcctgcaggaagacctgtaaactcaggtctgtggaacggcgatgatcttcttcccttgcttccagaattattgctgtgagatcaggtgcactggctacgaccttactctttgtgcagaacttatttctggtctggtttaagtgaacgttattctttctgtgcagtcctgtggttacatcaaaggttaaatttcatatagcatgtctgttatatcagacttctctgatggcctgtccagagcaaacattttaaaatattggtcctattctgtcttataacagtctgctctggtgatttttgtctcatcaattggattatgacactgtcagccactgttagtgttattctcaaattcagtcttccattcatctctccttcccttccctggcagacagacttctgcagccactgggactgttggggtgaggaaaggcaagaaccgatgtttcattctctccctcccttcttcctccctcttttttgttggttgtggggtgggctacatcttcttacccaaacaaccaggagcatttgttggcaagtttattgtgcccagtgccgatgtctggacaattaattccctaggtcagtggctttcacagtttgtgatggtgactccaggaaggaaactcaccatgaccctgtatatacatagaacaaaaatgcagcccactctgatattgtatttgttctattctagttcattaaaagtgaatgttggtcttcatccttt

SEQ ID NO: 8569 - DNA, 2676 bp, Homo sapiens
  source 1..2676: mol_type = unassigned DNA
ggaaggagcaggaggcagcccaggcggagcgggaggagctggcagcggggcgcatgccaggcgggggtcctcagggcgccccagccgccgccggcggcggcggcgtgagccaccgcgcaggcagccgggattgcttaccacctgcagcgtgctttcggaggcggcggctggcacggaggccgggctacatgagaagctcgacagggcctgggatcgggttcctttccccagcagtgggcacactgttccggttcccaggaggggtgtctggcgaggagtcccaccactcggagtccagggccagacagtgtggccttgactcgagaggcctcttggtccggagccctgtttccaagagtgcagcagcccctactgtgacctctgtgagaggaacctcggcgcactttgggattcagctcagaggtggcaccagattgcctgacaggcttagctggccgtgtggccctgggagtgctgggtggcagcaagagtttgcagccatggatagttctgagaccctggacgccagctgggaggcagcctgcagcgatggagcaaggcgtgtccgggcagcaggctctctgccatcagcagagttgagtagcaacagctgcagccctggctgtggccctgaggtccccccaacccctcctggctctcacagtgcctttacctcaagctttagctttattcggctctcgcttggctctgccggggaacgtggagaagcagaaggctgcccaccatccagagaggctgagtcccattgccagagcccccaggagatgggagccaaagctgccagcttggacgggcctcacgaggacccgcgatgtctctctcggcccttcagtctcttggctacacgggtctctgcagacttggcccaggccgcaaggaacagctccaggccagagcgtgacatgcattctttaccagacatggaccctggctcctccagttctctggatccctcactggctggctgtggtggtgatgggagcagcggctcaggggatgcccactcttgggacaccctgctcaggaaatgggagccagtgctgcgggactgcctgctgagaaaccggaggcagatggaggtaatatccttaagattaaaacttcagaaacttcaggaagatgcagttgagaatgatgattatgataaagctgagacgttacaacaaagattagaagacctggaacaagagaaaatcagcctgcactttcaacttccttcaaggcagccagctcttagcagtttcctgggtcacctggcagcacaagtccaggctgccttgcgccgtggggccactcagcaggccagcggagatgacacccacaccccactgagaatggagccgaggctgttggaacccactgctcaggacagcttgcacgtgtccatcacgagacgagactggcttcttcaggaaaagcagcagctacagaaagaaatcgaagctctccaagcaaggatgtttgtgctggaagccaaagatcaacagctgagaagggaaatagaggagcaagagcagcaactccagtggcagggctgcgacctgaccccactggtgggccagctgtccctgggtcagctgcaggaggtcagcaaggccttgcaggacaccctggcctcagccggtcagattcccttccatgcagagccaccggaaaccataaggagcctccaggaaagaataaaatccctcaacttgtcacttaaagaaatcactactaaggtgtgtatgagtgagaaattctgcagcaccctgaggaagaaagttaacgatattgaaacccaactaccagccttgcttgaagccaaaatgcatgccatatcaggaaaccatttctggacggctaaagacctcaccgaggagattagatcattaacatcagagagagaagggctggagggactcctcagcaagctgttggtgttgagttccaggaatgtcaaaaagctgggaagtgttaaagaagattacaacagactgagaagagaagtggagcaccaggagactgcctatgatggagtctcactctgtcgcccagtctggagtgcagtggtacgatcttgctcactgcaacctctgcctcccgagttcaagcaattctcctgcctcagcctccggagtagctgggattacaggtgcccgccaccatgcctggctaattttgtattcttagtagagatggggttttaccatgttgaccagactggtctaaaactcctgacctcaagtgatccaccttcctcagcctcccaaagtgctgggattacagacatgagccactgtgcctggcccctacaataattctttaatgtgaggaaatatcaaatgaaaaataagaaattctaggtaaggaaagaaatttatttagtggaagtataaaagaagtttaaaaagttgaagaaaattttggttttcaatgttgatgcagcgtcctttgtgaatctttaaatttgtgaatgacacttttgaaaacttacaccttattctaagtgtctttgttcactttacactgtactgtaaagaatcacaagagtgtctcataaataactttctatataacatatgtatatttcaaaataacatgttatatatataatacatacaatttttgtcaattaaacagtacattaaaaagacaaaaataactttccataaa

SEQ ID NO: 8570 - DNA, 2224 bp, Homo sapiens
  source 1..2224: mol_type = unassigned DNA
ggaaggagcaggaggcagcccaggcggagcgggaggagctggcagcggggcgcatgccaggcgggggtcctcagggcgccccagccgccgccggcggcggcggcgtgagccaccgcgcaggcagccgggattgcttaccacctgcagcgtgctttcggaggcggcggctggcacggaggccgggctacatgagaagctcgacagggcctgggatcgggttcctttccccagcagtgggcacactgttccggttcccaggaggggtgtctggcgaggagtcccaccactcggagtccagggccagacagtgtggccttgactcgagaggcctcttggtccggagccctgtttccaagagtgcagcagcccctactgtgacctctgtgagaggaacctcggcgcactttgggattcagctcagaggtggcaccagattgcctgacaggcttagctggccgtgtggccctgggagtgctgggtggcagcaagagtttgcagccatggatagttctgagaccctggacgccagctgggaggcagcctgcagcgatggagcaaggcgtgtccgggcagcaggctctctgccatcagcagagttgagtagcaacagctgcagccctggctgtggccctgaggtccccccaacccctcctggctctcacagtgcctttacctcaagctttagctttattcggctctcgcttggctctgccggggaacgtggagaagcagaaggctgcccaccatccagagaggctgagtcccattgccagagcccccaggagatgggagccaaagctgccagcttggacgggcctcacgaggacccgcgatgtctctctcggcccttcagtctcttggctacacgggtctctgcagacttggcccaggccgcaaggaacagctccaggccagagcgtgacatgcattctttaccagacatggaccctggctcctccagttctctggatccctcactggctggctgtggtggtgatgggagcagcggctcaggggatgcccactcttgggacaccctgctcaggaaatgggagccagtgctgcgggactgcctgctgagaaaccggaggcagatggaggtaatatccttaagattaaaacttcagaaacttcaggaagatgcagttgagaatgatgattatgataaagctgagacgttacaacaaagattagaagacctggaacaagagaaaatcagcctgcactttcaacttccttcaaggcagccagctcttagcagtttcctgggtcacctggcagcacaagtccaggctgccttgcgccgtggggccactcagcaggccagcggagatgacacccacaccccactgagaatggagccgaggctgttggaacccactgctcaggacagcttgcacgtgtccatcacgagacgagactggcttcttcaggaaaagcagcagctacagaaagaaatcgaagctctccaagcaaggatgtttgtgctggaagccaaagatcaacagctgagaagggaaatagaggagcaagagcagcaactccagtggcagggctgcgacctgaccccactggtgggccagctgtccctgggtcagctgcaggaggtcagcaaggccttgcaggacaccctggcctcagccggtcagattcccttccatgcagagccaccggaaaccataaggagcctccaggaaagaataaaatccctcaacttgtcacttaaagaaatcactactaaggtgtgtatgagtgagaaattctgcagcaccctgaggaagaaagttaacgatattgaaacccaactaccagccttgcttgaagccaaaatgcatgccatatcaggaaaccatttctggacggctaaagacctcaccgaggagattagatcattaacatcagagagagaagggctggagggactcctcagcaagctgttggtgttgagttccaggaatgtcaaaaagctgggaagtgttaaagaagattacaacagactgagaagagaagtggagcaccaggagactgcctatggatataagtactgtgatgcagagtcctggacacagagaagtcagcaacttgcctgaggacagcctgcaggacacagcactgtgatttgaacccagagagtctgacttcagcccccagcgctcaactactattaattgaaagggcattgaagagacatgatgtcacaataaaaagaaaaaaagaaaagaaa

SEQ ID NO: 8571 - DNA, 6848 bp, Homo sapiens
  source 1..6848: mol_type = unassigned DNA
ggaaggagcaggaggcagcccaggcggagcgggaggagctggcagcggggcgcatgccaggcgggggtcctcagggcgccccagccgccgccggcggcggcggcgtgagccaccgcgcaggcagccgggattgcttaccacctgcagcgtgctttcggaggcggcggctggcacggaggccgggctacatgagaagctcgacagggcctgggatcgggttcctttccccagcagtgggcacactgttccggttcccaggaggggtgtctggcgaggagtcccaccactcggagtccagggccagacagtgtggccttgactcgagaggcctcttggtccggagccctgtttccaagagtgcagcagcccctactgtgacctctgtgagaggaacctcggcgcactttgggattcagctcagaggtggcaccagattgcctgacaggcttagctggccgtgtggccctgggagtgctgggtggcagcaagagtttgcagccatggatagttctgagaccctggacgccagctgggaggcagcctgcagcgatggagcaaggcgtgtccgggcagcaggctctctgccatcagcagagttgagtagcaacagctgcagccctggctgtggccctgaggtccccccaacccctcctggctctcacagtgcctttacctcaagctttagctttattcggctctcgcttggctctgccggggaacgtggagaagcagaaggctgcccaccatccagagaggctgagtcccattgccagagcccccaggagatgggagccaaagctgccagcttggacgggcctcacgaggacccgcgatgtctctctcggcccttcagtctcttggctacacgggtctctgcagacttggcccaggccgcaaggaacagctccaggccagagcgtgacatgcattctttaccagacatggaccctggctcctccagttctctggatccctcactggctggctgtggtggtgatgggagcagcggctcaggggatgcccactcttgggacaccctgctcaggaaatgggagccagtgctgcgggactgcctgctgagaaaccggaggcagatggaggtaatatccttaagattaaaacttcagaaacttcaggaagatgcagttgagaatgatgattatgataaagctgagacgttacaacaaagattagaagacctggaacaagagaaaatcagcctgcactttcaacttccttcaaggcagccagctcttagcagtttcctgggtcacctggcagcacaagtccaggctgccttgcgccgtggggccactcagcaggccagcggagatgacacccacaccccactgagaatggagccgaggctgttggaacccactgctcaggacagcttgcacgtgtccatcacgagacgagactggcttcttcaggaaaagcagcagctacagaaagaaatcgaagctctccaagcaaggatgtttgtgctggaagccaaagatcaacagctgagaagggaaatagaggagcaagagcagcaactccagtggcagggctgcgacctgaccccactggtgggccagctgtccctgggtcagctgcaggaggtcagcaaggccttgcaggacaccctggcctcagccggtcagattcccttccatgcagagccaccggaaaccataaggagcctccaggaaagaataaaatccctcaacttgtcacttaaagaaatcactactaaggtgtgtatgagtgagaaattctgcagcaccctgaggaagaaagttaacgatattgaaacccaactaccagccttgcttgaagccaaaatgcatgccatatcaggaaaccatttctggacggctaaagacctcaccgaggagattagatcattaacatcagagagagaagggctggagggactcctcagcaagctgttggtgttgagttccaggaatgtcaaaaagctgggaagtgttaaagaagattacaacagactgagaagagaagtggagcaccaggagactgcctatgaaacaagtgtgaaggaaaatactatgaagtacatggaaacacttaagaataaactgtgcagctgcaagtgtccactgcttgggaaagtgtgggaagctgacttggaagcttgtcgattgcttatccagagcctacagctccaggaagccaggggaagcctgtctgtagaagatgagaggcagatggatgacttagagggagctgctcctcctattccccccaggctccactccgaggataaaaggaagacccctttgaaggaatcttacatcctttctgcagaacttggagaaaagtgtgaagacataggcaagaagctattgtacttggaagatcaacttcacacagcaatccacagtcatgatgaagatctcattcattctctcaggagggagctccagatggtgaaggaaactctgcaggccatgatcctgcagctccagccagcaaaggaggcgggagaaagagaagctgcagcttcctgcatgacagctggtgtccacgaagcacaagcctgaggagtgacgggatgggggagggaggtgggccaccatgtttggacccggggggctgctcttccctcccccgccatagctaagatgcctgaatcaattacggagatacagagccttgaggtctttcagtggaaaggtggttcatgttcattctcatcagtgtgaaactgaggagtctgcaatttggaatatggagagagagactgatttgctgaatttccttctaaatgtcactcaaaaatttcttttccatgtcattcttgggaatgtcttccacaggatttgagaatagtttcatctcagcccccattagagagaagttggggtgaattctggaaaaatgtctctttttcctgtgccatttgccttctgctgcaacgaaaatatttcctgattcaagattctataaaaaggaaaccaagcataagactctgtcatcatacctgttacacgttcctacaggtgcacaatctaagagagctaattaacctcagagtctggagttaacagcttttcaccttacttctcctgtgatctaatattatcttagaaaaattaatatgcaatttccaaaagatattttggtaagacaacaacctcccagtgatatgccacctttcaattttccttttgtggcaatgattgcatctgaagaaaggatccctgagagtctctgtttcatcaggacattctgaaatttacccacagtgaggctgtggatggatcaggggacctgtataaaatgtttgagcctgttccattttcccgtggaacctgtttcactcaatgccaggcagtgcagcatttaggaaagcagtgcagtactcagtaaggcagtgcagtactcagtaacacaatacagtactcaggcagtgcagtactcagtaagacagtgcagtgctcagtaaggcagtgcaatactcagtaacagtgtagtactcagtaacagtgaagtactcagtaatacagtacagtattcagtaaggcagtgaagtactcagtaatacaatacagtactcagttaggcagtgcagtactcaggaatgcagcacagtactcaggcagtgcaatactcagtgcggtactcagtaacacagtgcagtactcagtaacagtgcagtactcagtaacagtgcagtactcagtaaggcagtgcagtactcagtaacacagtgcagtactcagtaatacagtacagtactcagtaaggcagtatggtactcagtaaagcaatgcaatgctcagtaacacagtgcagtgctcaataaggcagtgcagtgctcagtaaggcagtgaattgcttagtaacacagtgtagtgctcagtaggacagcatagtactcagtaacacagggcagctagtactcagtactataagtactgagtacttatataggcaatgtagtactcagtaaatcagtgcagtactcagtaatgcaagggcatttcaggctcctgctgggctgcttctttggcccagctgggactcctattgagacagctgcaaaacaggctgatttcaattaggcagcacttcccaaagtgcactgaggaaggtggccccaagagaagctctctaaacaaaggagtaccctctctggtcaagtacctttggtaaatacaccataccataatatctgcttggagaaccacaatgcacattagcatattagtctgagagagaacttatagtaaggaaactcacttgattttatctaacctcaaactttccaagtttaatggatcgtgaatttttttcatgtaactcctattcatatcccatagatctagtattgtacagcactgcattctctgaggaagtcccagtccaaactctgatttacatcactttagaaaccacactcacacttttgcagagtgttgagcttaataactacctgccacagattggtaaatttaatccagtggttgttctgtttgtgcttctgttctcatttatgtgtttagggatagtgaggttcctgccttcactaggatccacggatatgagaccatttttgtcatttcctgaagtcacactggcgtttccagaaggcatctggtgctttgctcagccttccatgctgtgcagcacttctgtcctcagtcaaggagatggccatgcttaagccagcaattggctggggtccaggaaacaaagcaaaagcacaatatgtgaatgtgctgattgtgttccctatggctttatctcgagcaaaatacactctacatattttaataataagtataattagcttgttcctggacttcattttcaatgatgaaccaaattcctgaattatttataattgtgtctaaagaaaattatgaactggtcacatggcacttggaatccttgagttaattccagtgaagcaaaacttgggaagagtcaggattggccacattgccaataacaaattcctacttcgacatatgtcttttcaaaaagcctcccagacacaagacatcttaaccgtcactagcccaagtgttttgtattactcagacaccatcatgaaataattctgtgaggtcatgatgtatttgaaaattctgcaagttaataactgccttgaattgtttgaacccgaaataagggttctttggtacctctagtagatagtgtgttcatttccctgctgcaaattttgaagtatttgggcaggtgagtcatgttttaaccacaagccataactcatctgttgtctttgcttggtcttagagtatcattcagaaagtccgctaagggccagcgtgcttcttctggctacacaaccttctcaggacaagcccactgtcttaagccactttgaccctgggagacacaggactgtgtatcctcaatcatactatacagcagtttttgtcaggggaacataaaaatatccaagagaggttagggcttagatttaaaagcatcaaaacaacaacaatggaaatttatgttggcgatagccaagaccacaagcaaaagcacatactggaaatgatgagttagaatctgatttgactgggatgttttatgagaatgtaagtgtgatattatactgtctgccttgctggaatgctggctttcaaatggtcacccatttttctttcactggcctgagttaggacatgctatcagtaatagtcccagttccatccaactttctgaaatttcatttttttttttgagatggagtctctctctgtcacccaagttggagtgcagtggccccgcaatctcggctcactgcaacctctacctcccaggttcaagctattctactgcctcagcctcccaagtagctggggttacaggcatttgccaccgggccctgatgatttttgtatttttagtagagacagggcttcaccatgttggctaggagggtctcaaactcctgacctcaggcgatccacccccacctcggcttcccaaagtgctgagattacaggtgtgagccaccgcacccggccaactttctgaaatttcaaaactgaattgatccttctccaaattagtatatactattggaaacttgtctttccctgcagtaaggctggtttccccaccccagaaacatgtaacggttggtaccatgctaagcccttgccatgctaagccctttacagtcatatcctataatccccatatcaaccttataaggaaggtgtttgtagatgatgcaactgagccttaagaggactaattccctttttctaaggcacagagctggtaaaatgtgaagtaatagtgaacctaacagtcagagacaggcagcatgctcttaactagtgctcttcctaaagttcctttaatgtccttttgagattttgagccatggaacttacttgttcacctggctaagaactcatggccactgtggaaatcttggttagggagtcaaagaaactgagcctggggcaaacgaggcttcccacactgccaggggagcctcactgtgaagtctaggctcagacaggcatcaacaaacctattcaccccaccatcatcctgatctaaccattccccagtcatcccaggaaaaccactcacagcctgacactgggctgactttcttgaagatcctcatccaattggtgtttttcagaagtgttccaatattatgaattctgtgttgtggagaaaagcaaccatgcatttactggtcaatgccttcttgtatatgtaattcaatacttttacttttaatatcctcaccttatctaatctttgaattttgtcatgtaatttattgcttcattaaggttactttttgttatacaaaataaaagctgatatccaaggca

SEQ ID NO: 8572 - DNA, 7151 bp, Homo sapiens
  source 1..7151: mol_type = unassigned DNA
ggaaggagcaggaggcagcccaggcggagcgggaggagctggcagcggggcgcatgccaggcgggggtcctcagggcgccccagccgccgccggcggcggcggcgtgagccaccgcgcaggcagccgggattgcttaccacctgcagcgtgctttcggaggcggcggctggcacggaggccgggctacatgagaagctcgacagggcctgggatcgggttcctttccccagcagtgggcacactgttccggttcccaggaggggtgtctggcgaggagtcccaccactcggagtccagggccagacagtgtggccttgactcgagaggcctcttggtccggagccctgtttccaagagtgcagcagcccctactgtgacctctgtgagaggaacctcggcgcactttgggattcagctcagaggtggcaccagattgcctgacaggcttagctggccgtgtggccctgggagtgctgggtggcagcaagagtttgcagccatggatagttctgagaccctggacgccagctgggaggcagcctgcagcgatggagcaaggcgtgtccgggcagcaggctctctgccatcagcagagttgagtagcaacagctgcagccctggctgtggccctgaggtccccccaacccctcctggctctcacagtgcctttacctcaagctttagctttattcggctctcgcttggctctgccggggaacgtggagaagcagaaggctgcccaccatccagagaggctgagtcccattgccagagcccccaggagatgggagccaaagctgccagcttggacgggcctcacgaggacccgcgatgtctctctcggcccttcagtctcttggctacacgggtctctgcagacttggcccaggccgcaaggaacagctccaggccagagcgtgacatgcattctttaccagacatggaccctggctcctccagttctctggatccctcactggctggctgtggtggtgatgggagcagcggctcaggggatgcccactcttgggacaccctgctcaggaaatgggagccagtgctgcgggactgcctgctgagaaaccggaggcagatggaggtaatatccttaagattaaaacttcagaaacttcaggaagatgcagttgagaatgatgattatgataaagtagagacggggtttcactatgttggtcaagctggtcttgaactcctgacctcaagcaatccacctgcttcggcctcccaaagtgctgggattacagctgagacgttacaacaaagattagaagacctggaacaagagaaaatcagcctgcactttcaacttccttcaaggcagccagctcttagcagtttcctgggtcacctggcagcacaagtccaggctgccttgcgccgtggggccactcagcaggccagcggagatgacacccacaccccactgagaatggagccgaggctgttggaacccactgctcaggacagcttgcacgtgtccatcacgagacgagactggcttcttcaggaaaagcagcagctacagaaagaaatcgaagctctccaagcaaggatgtttgtgctggaagccaaagatcaacagctgagaagggaaatagaggagcaagagcagcaactccagtggcagggctgcgacctgaccccactggtgggccagctgtccctgggtcagctgcaggaggtcagcaaggccttgcaggacaccctggcctcagccggtcagattcccttccatgcagagccaccggaaaccataaggagcctccaggaaagaataaaatccctcaacttgtcacttaaagaaatcactactaaggtgtgtatgagtgagaaattctgcagcaccctgaggaagaaagttaacgatattgaaacccaactaccagccttgcttgaagccaaaatgcatgccatatcaggaaaccatttctggacggctaaagacctcaccgaggagattagatcattaacatcagagagagaagggctggagggactcctcagcaagctgttggtgttgagttccaggaatgtcaaaaagctgggaagtgttaaagaagattacaacagactgagaagagaagtggagcaccaggagactgcctatgaaacaagtgtgaaggaaaatactatgaagtacatggaaacacttaagaataaactgtgcagctgcaagtgtccactgcttgggaaagtgtgggaagctgacttggaagcttgtcgattgcttatccagagcctacagctccaggaagccaggggaagcctgtctgtagaagatgagaggcagatggatgacttagagggagctgctcctcctattccccccaggctccactccgaggataaaaggaagacccctttgaaggtattggaagaatggaagactcacctcatcccctctctgcactgtgctggaggtgaacagaaagaggaatcttacatcctttctgcagaacttggagaaaagtgtgaagacataggcaagaagctattgtacttggaagatcaacttcacacagcaatccacagtcatgatgaagatctcattcattctctcaggagggagctccagatggtgaaggaaactctgcaggccatgatcctgcagctccagccagcaaaggaggcgggagaaagagaagctgcagcttcctgcatgacagctggtgtccacgaagcacaagcctgaggagtgacgggatgggggagggaggtgggccaccatgtttggacccggggggctgctcttccctcccccgccatagctaagatgcctgaatcaattacggagatacagagccttgaggtctttcagtggaaaggtggttcatgttcattctcatcagtgtgaaactgaggagtctgcaatttggaatatggagagagagactgatttgctgaatttccttctaaatgtcactcaaaaatttcttttccatgtcattcttgggaatgtcttccacaggatttgagaatagtttcatctcagcccccattagagagaagttggggtgaattctggaaaaatgtctctttttcctgtgccatttgccttctgctgcaacgaaaatatttcctgattcaagattctataaaaaggaaaccaagcataagactctgtcatcatacctgttacacgttcctacaggtgcacaatctaagagagctaattaacctcagagtctggagttaacagcttttcaccttacttctcctgtgatctaatattatcttagaaaaattaatatgcaatttccaaaagatattttggtaagacaacaacctcccagtgatatgccacctttcaattttccttttgtggcaatgattgcatctgaagaaaggatccctgagagtctctgtttcatcaggacattctgaaatttacccacagtgaggctgtggatggatcaggggacctgtataaaatgtttgagcctgttccattttcccgtggaacctgtttcactcaatgccaggcagtgcagcatttaggaaagcagtgcagtactcagtaaggcagtgcagtactcagtaacacaatacagtactcaggcagtgcagtactcagtaagacagtgcagtgctcagtaaggcagtgcaatactcagtaacagtgtagtactcagtaacagtgaagtactcagtaatacagtacagtattcagtaaggcagtgaagtactcagtaatacaatacagtactcagttaggcagtgcagtactcaggaatgcagcacagtactcaggcagtgcaatactcagtgcggtactcagtaacacagtgcagtactcagtaacagtgcagtactcagtaacagtgcagtactcagtaaggcagtgcagtactcagtaacacagtgcagtactcagtaatacagtacagtactcagtaaggcagtatggtactcagtaaagcaatgcaatgctcagtaacacagtgcagtgctcaataaggcagtgcagtgctcagtaaggcagtgaattgcttagtaacacagtgtagtgctcagtaggacagcatagtactcagtaacacagggcagctagtactcagtactataagtactgagtacttatataggcaatgtagtactcagtaaatcagtgcagtactcagtaatgcaagggcatttcaggctcctgctgggctgcttctttggcccagctgggactcctattgagacagctgcaaaacaggctgatttcaattaggcagcacttcccaaagtgcactgaggaaggtggccccaagagaagctctctaaacaaaggagtaccctctctggtcaagtacctttggtaaatacaccataccataatatctgcttggagaaccacaatgcacattagcatattagtctgagagagaacttatagtaaggaaactcacttgattttatctaacctcaaactttccaagtttaatggatcgtgaatttttttcatgtaactcctattcatatcccatagatctagtattgtacagcactgcattctctgaggaagtcccagtccaaactctgatttacatcactttagaaaccacactcacacttttgcagagtgttgagcttaataactacctgccacagattggtaaatttaatccagtggttgttctgtttgtgcttctgttctcatttatgtgtttagggatagtgaggttcctgccttcactaggatccacggatatgagaccatttttgtcatttcctgaagtcacactggcgtttccagaaggcatctggtgctttgctcagccttccatgctgtgcagcacttctgtcctcagtcaaggagatggccatgcttaagccagcaattggctggggtccaggaaacaaagcaaaagcacaatatgtgaatgtgctgattgtgttccctatggctttatctcgagcaaaatacactctacatattttaataataagtataattagcttgttcctggacttcattttcaatgatgaaccaaattcctgaattatttataattgtgtctaaagaaaattatgaactggtcacatggcacttggaatccttgagttaattccagtgaagcaaaacttgggaagagtcaggattggccacattgccaataacaaattcctacttcgacatatgtcttttcaaaaagcctcccagacacaagacatcttaaccgtcactagcccaagtgttttgtattactcagacaccatcatgaaataattctgtgaggtcatgatgtatttgaaaattctgcaagttaataactgccttgaattgtttgaacccgaaataagggttctttggtacctctagtagatagtgtgttcatttccctgctgcaaattttgaagtatttgggcaggtgagtcatgttttaaccacaagccataactcatctgttgtctttgcttggtcttagagtatcattcagaaagtccgctaagggccagcgtgcttcttctggctacacaaccttctcaggacaagcccactgtcttaagccactttgaccctgggagacacaggactgtgtatcctcaatcatactatacagcagtttttgtcaggggaacataaaaatatccaagagaggttagggcttagatttaaaagcatcaaaacaacaacaatggaaatttatgttggcgatagccaagaccacaagcaaaagcacatactggaaatgatgagttagaatctgatttgactgggatgttttatgagaatgtaagtgtgatattatactgtctgccttgctggaatgctggctttcaaatggtcacccatttttctttcactggcctgagttaggacatgctatcagtaatagtcccagttccatccaactttctgaaatttcatttttttttttgagatggagtctctctctgtcacccaagttggagtgcagtggccccgcaatctcggctcactgcaacctctacctcccaggttcaagctattctactgcctcagcctcccaagtagctggggttacaggcatttgccaccgggccctgatgatttttgtatttttagtagagacagggcttcaccatgttggctaggagggtctcaaactcctgacctcaggcgatccacccccacctcggcttcccaaagtgctgagattacaggtgtgagccaccgcacccggccaactttctgaaatttcaaaactgaattgatccttctccaaattagtatatactattggaaacttgtctttccctgcagtaaggctggtttccccaccccagaaacatgtaacggttggtaccatgctaagcccttgccatgctaagccctttacagtcatatcctataatccccatatcaaccttataaggaaggtgtttgtagatgatgcaactgagccttaagaggactaattccctttttctaaggcacagagctggtaaaatgtgaagtaatagtgaacctaacagtcagagacaggcagcatgctcttaactagtgctcttcctaaagttcctttaatgtccttttgagattttgagccatggaacttacttgttcacctggctaagaactcatggccactgtggaaatcttggttagggagtcaaagaaactgagcctggggcaaacgaggcttcccacactgccaggggagcctcactgtgaagtctaggctcagacaggcatcaacaaacctattcaccccaccatcatcctgatctaaccattccccagtcatcccaggaaaaccactcacagcctgacactgggctgactttcttgaagatcctcatccaattggtgtttttcagaagtgttccaatattatgaattctgtgttgtggagaaaagcaaccatgcatttactggtcaatgccttcttgtatatgtaattcaatacttttacttttaatatcctcaccttatctaatctttgaattttgtcatgtaatttattgcttcattaaggttactttttgttatacaaaataaaagctgatatccaaggcatggtgcatcttgatgattttttgtcctttgaagtatggatgatagaaaaatgtatcaggtttattcatctcatctttctgttacaggatgattaattgtacagttacatcacacgaaacatttataataaagtcatgcttt

SEQ ID NO: 8573 - DNA, 1118 bp, Homo sapiens
  source 1..1118: mol_type = unassigned DNA
gaaaccatttctggacggctaaagacctcaccgaggagattagatcattaacatcagagagagaagggctggagggactcctcagcaagctgttggtgttgagttccaggaatgtcaaaaagctgggaagtgttaaagaagattacaacagactgagaagagaagtggagcaccaggagactgcctatgaaacaagtgtgaaggaaaatactatgaagtacatggaaacacttaagaataaactgtgcagctgcaagtgtccactgcttgggaaagtgtgggaagctgacttggaagcttgtcgattgcttatccagagcctacagctccaggaagccaggggaagcctgtctgtagaagatgagaggcagatggatgacttagagggagctgctcctcctattccccccaggctccactccgaggataaaaggaagacccctttgaaggtattggaagaatggaagactcacctcatcccctctctgcactgtgctggaggtgaacagaaagaggtctgtccttttcacatggcctccagaggggacccttattctaaggggtgctttgggaccatgctccaaatgggaacaataaatattgggaaggcttcccattgagcatataaacttttaaaagtttcaataactcttgaatatgattacaaaataaagtagaatttttgtagaagtttgaaatatagaagagcaaaaaaacccaacttttggcatatttagttccattttcattctaatttagtggctagaattagaatatgcagtctaatatagaattaccatatatagcatacattatatatgtcatatataatatagttattatattcactatagattatatatgccatacatgatatttaacatatatactatacattatgtattgtatgtcatatatgatgtttatatatttagaatctatatattacaatatattattatttatttgaatgaaacattcaaatatatgtatttatcccattaattgtttttaccaaaaccagatcataatgaatgtttataatgttcttctttcataaacacaactaaagtttggcctgagatatatgtattacaaattaaaatatggttttattt

SEQ ID NO: 8574 - DNA, 545 bp, Homo sapiens
  source 1..545: mol_type = unassigned DNA
gagaaaattgagggaagaccataaagtggctcttctatgtgtggacttttctgagagcttctttccccaggaaggatgatgtagaagatgtgaatgccgccttagccaaagtgtctgcttgtcagaggagttcaagtgttcctgtgttctttccttttccagtcgttaggagtaactgagcttactctgagatttgcacccagagggatggtctcagaagacgctggttcagtgcaaattgagatgaaacaagtgtgaaggaaaatactatgaagtacatggaaacacttaagaataaactgtgcagctgcaagtgtccactgcttgggaaagtgtgggaagctgacttggaagcttgtcgattgcttatccagagcctacagctccaggaagccaggggaagcctgtctgtagaagatgagaggcagatggatgacttagagggagctgctcctcctattccccccaggctccactccgaggataaaaggaagacccctttgaaggtattggaagaatggaagactcacctcatcccctctctg

SEQ ID NO: 8575 - DNA, 7059 bp, Homo sapiens
  source 1..7059: mol_type = unassigned DNA
ggaaggagcaggaggcagcccaggcggagcgggaggagctggcagcggggcgcatgccaggcgggggtcctcagggcgccccagccgccgccggcggcggcggcgtgagccaccgcgcaggcagccgggattgcttaccacctgcagcgtgctttcggaggcggcggctggcacggaggccgggctacatgagaagctcgacagggcctgggatcgggttcctttccccagcagtgggcacactgttccggttcccaggaggggtgtctggcgaggagtcccaccactcggagtccagggccagacagtgtggccttgactcgagaggcctcttggtccggagccctgtttccaagagtgcagcagcccctactgtgacctctgtgagaggaacctcggcgcactttgggattcagctcagaggtggcaccagattgcctgacaggcttagctggccgtgtggccctgggagtgctgggtggcagcaagagtttgcagccatggatagttctgagaccctggacgccagctgggaggcagcctgcagcgatggagcaaggcgtgtccgggcagcaggctctctgccatcagcagagttgagtagcaacagctgcagccctggctgtggccctgaggtccccccaacccctcctggctctcacagtgcctttacctcaagctttagctttattcggctctcgcttggctctgccggggaacgtggagaagcagaaggctgcccaccatccagagaggctgagtcccattgccagagcccccaggagatgggagccaaagctgccagcttggacgggcctcacgaggacccgcgatgtctctctcggcccttcagtctcttggctacacgggtctctgcagacttggcccaggccgcaaggaacagctccaggccagagcgtgacatgcattctttaccagacatggaccctggctcctccagttctctggatccctcactggctggctgtggtggtgatgggagcagcggctcaggggatgcccactcttgggacaccctgctcaggaaatgggagccagtgctgcgggactgcctgctgagaaaccggaggcagatggaggtaatatccttaagattaaaacttcagaaacttcaggaagatgcagttgagaatgatgattatgataaagctgagacgttacaacaaagattagaagacctggaacaagagaaaatcagcctgcactttcaacttccttcaaggcagccagctcttagcagtttcctgggtcacctggcagcacaagtccaggctgccttgcgccgtggggccactcagcaggccagcggagatgacacccacaccccactgagaatggagccgaggctgttggaacccactgctcaggacagcttgcacgtgtccatcacgagacgagactggcttcttcaggaaaagcagcagctacagaaagaaatcgaagctctccaagcaaggatgtttgtgctggaagccaaagatcaacagctgagaagggaaatagaggagcaagagcagcaactccagtggcagggctgcgacctgaccccactggtgggccagctgtccctgggtcagctgcaggaggtcagcaaggccttgcaggacaccctggcctcagccggtcagattcccttccatgcagagccaccggaaaccataaggagcctccaggaaagaataaaatccctcaacttgtcacttaaagaaatcactactaaggtgtgtatgagtgagaaattctgcagcaccctgaggaagaaagttaacgatattgaaacccaactaccagccttgcttgaagccaaaatgcatgccatatcaggaaaccatttctggacggctaaagacctcaccgaggagattagatcattaacatcagagagagaagggctggagggactcctcagcaagctgttggtgttgagttccaggaatgtcaaaaagctgggaagtgttaaagaagattacaacagactgagaagagaagtggagcaccaggagactgcctatgaaacaagtgtgaaggaaaatactatgaagtacatggaaacacttaagaataaactgtgcagctgcaagtgtccactgcttgggaaagtgtgggaagctgacttggaagcttgtcgattgcttatccagagcctacagctccaggaagccaggggaagcctgtctgtagaagatgagaggcagatggatgacttagagggagctgctcctcctattccccccaggctccactccgaggataaaaggaagacccctttgaaggtattggaagaatggaagactcacctcatcccctctctgcactgtgctggaggtgaacagaaagaggaatcttacatcctttctgcagaacttggagaaaagtgtgaagacataggcaagaagctattgtacttggaagatcaacttcacacagcaatccacagtcatgatgaagatctcattcattctctcaggagggagctccagatggtgaaggaaactctgcaggccatgatcctgcagctccagccagcaaaggaggcgggagaaagagaagctgcagcttcctgcatgacagctggtgtccacgaagcacaagcctgaggagtgacgggatgggggagggaggtgggccaccatgtttggacccggggggctgctcttccctcccccgccatagctaagatgcctgaatcaattacggagatacagagccttgaggtctttcagtggaaaggtggttcatgttcattctcatcagtgtgaaactgaggagtctgcaatttggaatatggagagagagactgatttgctgaatttccttctaaatgtcactcaaaaatttcttttccatgtcattcttgggaatgtcttccacaggatttgagaatagtttcatctcagcccccattagagagaagttggggtgaattctggaaaaatgtctctttttcctgtgccatttgccttctgctgcaacgaaaatatttcctgattcaagattctataaaaaggaaaccaagcataagactctgtcatcatacctgttacacgttcctacaggtgcacaatctaagagagctaattaacctcagagtctggagttaacagcttttcaccttacttctcctgtgatctaatattatcttagaaaaattaatatgcaatttccaaaagatattttggtaagacaacaacctcccagtgatatgccacctttcaattttccttttgtggcaatgattgcatctgaagaaaggatccctgagagtctctgtttcatcaggacattctgaaatttacccacagtgaggctgtggatggatcaggggacctgtataaaatgtttgagcctgttccattttcccgtggaacctgtttcactcaatgccaggcagtgcagcatttaggaaagcagtgcagtactcagtaaggcagtgcagtactcagtaacacaatacagtactcaggcagtgcagtactcagtaagacagtgcagtgctcagtaaggcagtgcaatactcagtaacagtgtagtactcagtaacagtgaagtactcagtaatacagtacagtattcagtaaggcagtgaagtactcagtaatacaatacagtactcagttaggcagtgcagtactcaggaatgcagcacagtactcaggcagtgcaatactcagtgcggtactcagtaacacagtgcagtactcagtaacagtgcagtactcagtaacagtgcagtactcagtaaggcagtgcagtactcagtaacacagtgcagtactcagtaatacagtacagtactcagtaaggcagtatggtactcagtaaagcaatgcaatgctcagtaacacagtgcagtgctcaataaggcagtgcagtgctcagtaaggcagtgaattgcttagtaacacagtgtagtgctcagtaggacagcatagtactcagtaacacagggcagctagtactcagtactataagtactgagtacttatataggcaatgtagtactcagtaaatcagtgcagtactcagtaatgcaagggcatttcaggctcctgctgggctgcttctttggcccagctgggactcctattgagacagctgcaaaacaggctgatttcaattaggcagcacttcccaaagtgcactgaggaaggtggccccaagagaagctctctaaacaaaggagtaccctctctggtcaagtacctttggtaaatacaccataccataatatctgcttggagaaccacaatgcacattagcatattagtctgagagagaacttatagtaaggaaactcacttgattttatctaacctcaaactttccaagtttaatggatcgtgaatttttttcatgtaactcctattcatatcccatagatctagtattgtacagcactgcattctctgaggaagtcccagtccaaactctgatttacatcactttagaaaccacactcacacttttgcagagtgttgagcttaataactacctgccacagattggtaaatttaatccagtggttgttctgtttgtgcttctgttctcatttatgtgtttagggatagtgaggttcctgccttcactaggatccacggatatgagaccatttttgtcatttcctgaagtcacactggcgtttccagaaggcatctggtgctttgctcagccttccatgctgtgcagcacttctgtcctcagtcaaggagatggccatgcttaagccagcaattggctggggtccaggaaacaaagcaaaagcacaatatgtgaatgtgctgattgtgttccctatggctttatctcgagcaaaatacactctacatattttaataataagtataattagcttgttcctggacttcattttcaatgatgaaccaaattcctgaattatttataattgtgtctaaagaaaattatgaactggtcacatggcacttggaatccttgagttaattccagtgaagcaaaacttgggaagagtcaggattggccacattgccaataacaaattcctacttcgacatatgtcttttcaaaaagcctcccagacacaagacatcttaaccgtcactagcccaagtgttttgtattactcagacaccatcatgaaataattctgtgaggtcatgatgtatttgaaaattctgcaagttaataactgccttgaattgtttgaacccgaaataagggttctttggtacctctagtagatagtgtgttcatttccctgctgcaaattttgaagtatttgggcaggtgagtcatgttttaaccacaagccataactcatctgttgtctttgcttggtcttagagtatcattcagaaagtccgctaagggccagcgtgcttcttctggctacacaaccttctcaggacaagcccactgtcttaagccactttgaccctgggagacacaggactgtgtatcctcaatcatactatacagcagtttttgtcaggggaacataaaaatatccaagagaggttagggcttagatttaaaagcatcaaaacaacaacaatggaaatttatgttggcgatagccaagaccacaagcaaaagcacatactggaaatgatgagttagaatctgatttgactgggatgttttatgagaatgtaagtgtgatattatactgtctgccttgctggaatgctggctttcaaatggtcacccatttttctttcactggcctgagttaggacatgctatcagtaatagtcccagttccatccaactttctgaaatttcatttttttttttgagatggagtctctctctgtcacccaagttggagtgcagtggccccgcaatctcggctcactgcaacctctacctcccaggttcaagctattctactgcctcagcctcccaagtagctggggttacaggcatttgccaccgggccctgatgatttttgtatttttagtagagacagggcttcaccatgttggctaggagggtctcaaactcctgacctcaggcgatccacccccacctcggcttcccaaagtgctgagattacaggtgtgagccaccgcacccggccaactttctgaaatttcaaaactgaattgatccttctccaaattagtatatactattggaaacttgtctttccctgcagtaaggctggtttccccaccccagaaacatgtaacggttggtaccatgctaagcccttgccatgctaagccctttacagtcatatcctataatccccatatcaaccttataaggaaggtgtttgtagatgatgcaactgagccttaagaggactaattccctttttctaaggcacagagctggtaaaatgtgaagtaatagtgaacctaacagtcagagacaggcagcatgctcttaactagtgctcttcctaaagttcctttaatgtccttttgagattttgagccatggaacttacttgttcacctggctaagaactcatggccactgtggaaatcttggttagggagtcaaagaaactgagcctggggcaaacgaggcttcccacactgccaggggagcctcactgtgaagtctaggctcagacaggcatcaacaaacctattcaccccaccatcatcctgatctaaccattccccagtcatcccaggaaaaccactcacagcctgacactgggctgactttcttgaagatcctcatccaattggtgtttttcagaagtgttccaatattatgaattctgtgttgtggagaaaagcaaccatgcatttactggtcaatgccttcttgtatatgtaattcaatacttttacttttaatatcctcaccttatctaatctttgaattttgtcatgtaatttattgcttcattaaggttactttttgttatacaaaataaaagctgatatccaaggcatggtgcatcttgatgattttttgtcctttgaagtatggatgatagaaaaatgtatcaggtttattcatctcatctttctgttacaggatgattaattgtacagttacatcacacgaaacatttataataaagtcatgctttagaa

SEQ ID NO: 8576 - DNA, 6689 bp, Homo sapiens
  source 1..6689: mol_type = unassigned DNA
ggaaggagcaggaggcagcccaggcggagcgggaggagctggcagcggggcgcatgccaggcgggggtcctcagggcgccccagccgccgccggcggcggcggcgtgagccaccgcgcaggcagccgggattgcttaccacctgcagcgtgctttcggaggcggcggctggcacggaggccgggctacatgagaagctcgacagggcctgggatcgggttcctttccccagcagtgggcacactgttccggttcccaggaggggtgtctggcgaggagtcccaccactcggagtccagggccagacagtgtggccttgactcgagaggcctcttggtccggagccctgtttccaagagtgcagcagcccctactgtgacctctgtgagaggaacctcggcgcactttgggattcagctcagaggtggcaccagattgcctgacaggcttagctggccgtgtggccctgggagtgctgggtggcagcaagagtttgcagccatggatagttctgagaccctggacgccagctgggaggcagcctgcagcgatggagcaaggcgtgtccgggcagcaggctctctgccatcagcagagttgagtagcaacagctgcagccctggctgtggccctgaggtccccccaacccctcctggctctcacagtgcctttacctcaagctttagctttattcggctctcgcttggctctgccggggaacgtggagaagcagaaggctgcccaccatccagagaggctgagtcccattgccagagcccccaggagatgggagccaaagctgccagcttggacgggcctcacgaggacccgcgatgtctctctcggcccttcagtctcttggctacacgggtctctgcagacttggcccaggccgcaaggaacagctccaggccagagcgtgacatgcattctttaccagacatggaccctggctcctccagttctctggatccctcactggctggctgtggtggtgatgggagcagcggctcaggggatgcccactcttgggacaccctgctcaggaaatgggagccagtgctgcgggactgcctgctgagaaaccggaggcagatggaggtaatatccttaagattaaaacttcagaaacttcaggaagatgcagttgagaatgatgattatgataaagctgagacgttacaacaaagattagaagacctggaacaagagaaaatcagcctgcactttcaacttccttcaaggcagccagctcttagcagtttcctgggtcacctggcagcacaagtccaggctgccttgcgccgtggggccactcagcacctccaggaaagaataaaatccctcaacttgtcacttaaagaaatcactactaaggtgtgtatgagtgagaaattctgcagcaccctgaggaagaaagttaacgatattgaaacccaactaccagccttgcttgaagccaaaatgcatgccatatcaggaaaccatttctggacggctaaagacctcaccgaggagattagatcattaacatcagagagagaagggctggagggactcctcagcaagctgttggtgttgagttccaggaatgtcaaaaagctgggaagtgttaaagaagattacaacagactgagaagagaagtggagcaccaggagactgcctatgaaacaagtgtgaaggaaaatactatgaagtacatggaaacacttaagaataaactgtgcagctgcaagtgtccactgcttgggaaagtgtgggaagctgacttggaagcttgtcgattgcttatccagagcctacagctccaggaagccaggggaagcctgtctgtagaagatgagaggcagatggatgacttagagggagctgctcctcctattccccccaggctccactccgaggataaaaggaagacccctttgaaggtattggaagaatggaagactcacctcatcccctctctgcactgtgctggaggtgaacagaaagaggaatcttacatcctttctgcagaacttggagaaaagtgtgaagacataggcaagaagctattgtacttggaagatcaacttcacacagcaatccacagtcatgatgaagatctcattcattctctcaggagggagctccagatggtgaaggaaactctgcaggccatgatcctgcagctccagccagcaaaggaggcgggagaaagagaagctgcagcttcctgcatgacagctggtgtccacgaagcacaagcctgaggagtgacgggatgggggagggaggtgggccaccatgtttggacccggggggctgctcttccctcccccgccatagctaagatgcctgaatcaattacggagatacagagccttgaggtctttcagtggaaaggtggttcatgttcattctcatcagtgtgaaactgaggagtctgcaatttggaatatggagagagagactgatttgctgaatttccttctaaatgtcactcaaaaatttcttttccatgtcattcttgggaatgtcttccacaggatttgagaatagtttcatctcagcccccattagagagaagttggggtgaattctggaaaaatgtctctttttcctgtgccatttgccttctgctgcaacgaaaatatttcctgattcaagattctataaaaaggaaaccaagcataagactctgtcatcatacctgttacacgttcctacaggtgcacaatctaagagagctaattaacctcagagtctggagttaacagcttttcaccttacttctcctgtgatctaatattatcttagaaaaattaatatgcaatttccaaaagatattttggtaagacaacaacctcccagtgatatgccacctttcaattttccttttgtggcaatgattgcatctgaagaaaggatccctgagagtctctgtttcatcaggacattctgaaatttacccacagtgaggctgtggatggatcaggggacctgtataaaatgtttgagcctgttccattttcccgtggaacctgtttcactcaatgccaggcagtgcagcatttaggaaagcagtgcagtactcagtaaggcagtgcagtactcagtaacacaatacagtactcaggcagtgcagtactcagtaagacagtgcagtgctcagtaaggcagtgcaatactcagtaacagtgtagtactcagtaacagtgaagtactcagtaatacagtacagtattcagtaaggcagtgaagtactcagtaatacaatacagtactcagttaggcagtgcagtactcaggaatgcagcacagtactcaggcagtgcaatactcagtgcggtactcagtaacacagtgcagtactcagtaacagtgcagtactcagtaacagtgcagtactcagtaaggcagtgcagtactcagtaacacagtgcagtactcagtaatacagtacagtactcagtaaggcagtatggtactcagtaaagcaatgcaatgctcagtaacacagtgcagtgctcaataaggcagtgcagtgctcagtaaggcagtgaattgcttagtaacacagtgtagtgctcagtaggacagcatagtactcagtaacacagggcagctagtactcagtactataagtactgagtacttatataggcaatgtagtactcagtaaatcagtgcagtactcagtaatgcaagggcatttcaggctcctgctgggctgcttctttggcccagctgggactcctattgagacagctgcaaaacaggctgatttcaattaggcagcacttcccaaagtgcactgaggaaggtggccccaagagaagctctctaaacaaaggagtaccctctctggtcaagtacctttggtaaatacaccataccataatatctgcttggagaaccacaatgcacattagcatattagtctgagagagaacttatagtaaggaaactcacttgattttatctaacctcaaactttccaagtttaatggatcgtgaatttttttcatgtaactcctattcatatcccatagatctagtattgtacagcactgcattctctgaggaagtcccagtccaaactctgatttacatcactttagaaaccacactcacacttttgcagagtgttgagcttaataactacctgccacagattggtaaatttaatccagtggttgttctgtttgtgcttctgttctcatttatgtgtttagggatagtgaggttcctgccttcactaggatccacggatatgagaccatttttgtcatttcctgaagtcacactggcgtttccagaaggcatctggtgctttgctcagccttccatgctgtgcagcacttctgtcctcagtcaaggagatggccatgcttaagccagcaattggctggggtccaggaaacaaagcaaaagcacaatatgtgaatgtgctgattgtgttccctatggctttatctcgagcaaaatacactctacatattttaataataagtataattagcttgttcctggacttcattttcaatgatgaaccaaattcctgaattatttataattgtgtctaaagaaaattatgaactggtcacatggcacttggaatccttgagttaattccagtgaagcaaaacttgggaagagtcaggattggccacattgccaataacaaattcctacttcgacatatgtcttttcaaaaagcctcccagacacaagacatcttaaccgtcactagcccaagtgttttgtattactcagacaccatcatgaaataattctgtgaggtcatgatgtatttgaaaattctgcaagttaataactgccttgaattgtttgaacccgaaataagggttctttggtacctctagtagatagtgtgttcatttccctgctgcaaattttgaagtatttgggcaggtgagtcatgttttaaccacaagccataactcatctgttgtctttgcttggtcttagagtatcattcagaaagtccgctaagggccagcgtgcttcttctggctacacaaccttctcaggacaagcccactgtcttaagccactttgaccctgggagacacaggactgtgtatcctcaatcatactatacagcagtttttgtcaggggaacataaaaatatccaagagaggttagggcttagatttaaaagcatcaaaacaacaacaatggaaatttatgttggcgatagccaagaccacaagcaaaagcacatactggaaatgatgagttagaatctgatttgactgggatgttttatgagaatgtaagtgtgatattatactgtctgccttgctggaatgctggctttcaaatggtcacccatttttctttcactggcctgagttaggacatgctatcagtaatagtcccagttccatccaactttctgaaatttcatttttttttttgagatggagtctctctctgtcacccaagttggagtgcagtggccccgcaatctcggctcactgcaacctctacctcccaggttcaagctattctactgcctcagcctcccaagtagctggggttacaggcatttgccaccgggccctgatgatttttgtatttttagtagagacagggcttcaccatgttggctaggagggtctcaaactcctgacctcaggcgatccacccccacctcggcttcccaaagtgctgagattacaggtgtgagccaccgcacccggccaactttctgaaatttcaaaactgaattgatccttctccaaattagtatatactattggaaacttgtctttccctgcagtaaggctggtttccccaccccagaaacatgtaacggttggtaccatgctaagcccttgccatgctaagccctttacagtcatatcctataatccccatatcaaccttataaggaaggtgtttgtagatgatgcaactgagccttaagaggactaattccctttttctaaggcacagagctggtaaaatgtgaagtaatagtgaacctaacagtcagagacaggcagcatgctcttaactagtgctcttcctaaagttcctttaatgtccttttgagattttgagccatggaacttacttgttcacctggctaagaactcatggccactgtggaaatcttggttagggagtcaaagaaactgagcctggggcaaacgaggcttcccacactgccaggggagcctcactgtgaagtctaggctcagacaggcatcaacaaacctattcaccccaccatcatcctgatctaaccattccccagtcatcccaggaaaaccactcacagcctgacactgggctgactttcttgaagatcctcatccaattggtgtttttcagaagtgttccaatattatgaattctgtgttgtggagaaaagcaaccatgcatttactggtcaatgccttcttgtatatgtaattcaatacttttacttttaatatcctcaccttatctaatctttgaattttgtcatgtaatttattgcttcattaaggttactttttgttatacaaaataaaagctgatatccaaggcatggtgcatcttgatgattttttgtcctttgaagtatggatgatagaaaaatgtatcaggtttattcatctcatctttctgttacaggatgattaattgtacagttacatcacacgaaacatttataataaagtcatgcttt

SEQ ID NO: 8577 - DNA, 2940 bp, Homo sapiens
  source 1..2940: mol_type = unassigned DNA
ggaaggagcaggaggcagcccaggcggagcgggaggagctggcagcggggcgcatgccaggcgggggtcctcagggcgccccagccgccgccggcggcggcggcgtgagccaccgcgcaggcagccgggattgcttaccacctgcagcgtgctttcggaggcggcggctggcacggaggccgggctacatgagaagctcgacagggcctgggatcgggttcctttccccagcagtgggcacactgttccggttcccaggaggggtgtctggcgaggagtcccaccactcggagtccagggccagacagtgtggccttgactcgagaggcctcttggtccggagccctgtttccaagagtgcagcagcccctactgtgacctctgtgagaggaacctcggcgcactttgggattcagctcagaggtggcaccagattgcctgacaggcttagctggccgtgtggccctgggagtgctgggtggcagcaagagtttgcagccatggatagttctgagaccctggacgccagctgggaggcagcctgcagcgatggagcaaggcgtgtccgggcagcaggctctctgccatcagcagagttgagtagcaacagctgcagccctggctgtggccctgaggtccccccaacccctcctggctctcacagtgcctttacctcaagctttagctttattcggctctcgcttggctctgccggggaacgtggagaagcagaaggctgcccaccatccagagaggctgagtcccattgccagagcccccaggagatgggagccaaagctgccagcttggacgggcctcacgaggacccgcgatgtctctctcggcccttcagtctcttggctacacgggtctctgcagacttggcccaggccgcaaggaacagctccaggccagagcgtgacatgcattctttaccagacatggaccctggctcctccagttctctggatccctcactggctggctgtggtggtgatgggagcagcggctcaggggatgcccactcttgggacaccctgctcaggaaatgggagccagtgctgcgggactgcctgctgagaaaccggaggcagatggaggtaatatccttaagattaaaacttcagaaacttcaggaagatgcagttgagaatgatgattatgataaagctgagacgttacaacaaagattagaagacctggaacaagagaaaatcagcctgcactttcaacttccttcaaggcagccagctcttagcagtttcctgggtcacctggcagcacaagtccaggctgccttgcgccgtggggccactcagcaggccagcggagatgacacccacaccccactgagaatggagccgaggctgttggaacccactgctcaggacagcttgcacgtgtccatcacgagacgagactggcttcttcaggaaaagcagcagctacagaaagaaatcgaagctctccaagcaaggatgtttgtgctggaagccaaagatcaacagctgagaagggaaatagaggagcaagagcagcaactccagtggcagggctgcgacctgaccccactggtgggccagctgtccctgggtcagctgcaggaggtcagcaaggccttgcaggacaccctggcctcagccggtcagattcccttccatgcagagccaccggaaaccataaggagggaggtgaggcatcagactgctccctgccgtaaccatcaactagagaaacccgtcatcaatatttgggctttccatttgagaaggaagatatgtcttttccaagctgatgggctgcagcatggatctgcagaagtgaagcatttgaaagaaaccagtgtagaaccagctggctcaacagcctccaggaaagaataaaatccctcaacttgtcacttaaagaaatcactactaaggtgtgtatgagtgagaaattctgcagcaccctgaggaagaaagttaacgatattgaaacccaactaccagccttgcttgaagccaaaatgcatgccatatcaggaaaccatttctggacggctaaagacctcaccgaggagattagatcattaacatcagagagagaagggctggagggactcctcagcaagctgttggtgttgagttccaggaatgtcaaaaagctgggaagtgttaaagaagattacaacagactgagaagagaagtggagcaccaggagactgcctatggtaggtagtgcacaactgttccccggcaagatattgatgatatttgttgtgttttgtggccaggcagaatgttctgtgccttatgtgaacgtcactgtgaagagcgtcatggagcacatggcccttttccttggggacatttttggcaggtgccttggcaaaccgaatggaattacttgtcagcttttgttttcatattcacatgtgacatcttttctttttctgttccctgtctcaacctgtgtttgctaatagccttgttattatttagagcagtctctcccttggcaaggtcttgagcattttctttgtgtgacaattatcttccttttgtcccttggctccgtctccttgtctgcacaatcatagactaaatcaggctgatctgagaaaattgagggaagaccataaagtggctcttctatgtgtggacttttctgagagcttctttccccaggaaggatgatgtagaagatgtgaatgccgccttagccaaagtgtctgcttgtcagaggagttcaagtgttcctgtgttctttccttttccagtcgttaggagtaactgagcttactctgagatttgcacccagagggatggtctcagaagacgctggttcagtgcaaattgagatggtaaaaacttatttcttaaaaaatggttcctaaataaatgtcatttactaaaacaaatgaaagaaatatatatatgaataaatggctatatttt

SEQ ID NO: 8578 - DNA, 2902 bp, Homo sapiens
  source 1..2902: mol_type = unassigned DNA
ggaaggagcaggaggcagcccaggcggagcgggaggagctggcagcggggcgcatgccaggcgggggtcctcagggcgccccagccgccgccggcggcggcggcgtgagccaccgcgcaggcagccgggattgcttaccacctgcagcgtgctttcggaggcggcggctggcacggaggccgggctacatgagaagctcgacagggcctgggatcgggttcctttccccagcagtgggcacactgttccggttcccaggaggggtgtctggcgaggagtcccaccactcggagtccagggccagacagtgtggccttgactcgagaggcctcttggtccggagccctgtttccaagagtgcagcagcccctactgtgacctctgtgagaggaacctcggcgcactttgggattcagctcagaggtggcaccagattgcctgacaggcttagctggccgtgtggccctgggagtgctgggtggcagcaagagtttgcagccatggatagttctgagaccctggacgccagctgggaggcagcctgcagcgatggagcaaggcgtgtccgggcagcaggctctctgccatcagcagagttgagtagcaacagctgcagccctggctgtggccctgaggtccccccaacccctcctggctctcacagtgcctttacctcaagctttagctttattcggctctcgcttggctctgccggggaacgtggagaagcagaaggctgcccaccatccagagaggctgagtcccattgccagagcccccaggagatgggagccaaagctgccagcttggacgggcctcacgaggacccgcgatgtctctctcggcccttcagtctcttggctacacgggtctctgcagacttggcccaggccgcaaggaacagctccaggccagagcgtgacatgcattctttaccagacatggaccctggctcctccagttctctggatccctcactggctggctgtggtggtgatgggagcagcggctcaggggatgcccactcttgggacaccctgctcaggaaatgggagccagtgctgcgggactgcctgctgagaaaccggaggcagatggaggtaatatccttaagattaaaacttcagaaacttcaggaagatgcagttgagaatgatgattatgataaagctgagacgttacaacaaagattagaagacctggaacaagagaaaatcagcctgcactttcaacttccttcaaggcagccagctcttagcagtttcctgggtcacctggcagcacaagtccaggctgccttgcgccgtggggccactcagcaggccagcggagatgacacccacaccccactgagaatggagccgaggctgttggaacccactgctcaggacagcttgcacgtgtccatcacgagacgagactggcttcttcaggaaaagcagcagctacagaaagaaatcgaagctctccaagcaaggatgtttgtgctggaagccaaagatcaacagctgagaagggaaatagaggagcaagagcagcaactccagtggcagggctgcgacctgaccccactggtgggccagctgtccctgggtcagctgcaggaggtcagcaaggccttgcaggacaccctggcctcagccggtcagattcccttccatgcagagccaccggaaaccataaggagcctccaggaaagaataaaatccctcaacttgtcacttaaagaaatcactactaaggtgtgtatgagtgagaaattctgcagcaccctgaggaagaaagttaacgatattgaaacccaactaccagccttgcttgaagccaaaatgcatgccatatcaggaaaccatttctggacggctaaagacctcaccgaggagattagatcattaacatcagagagagaagggctggagggactcctcagcaagctgttggtgttgagttccaggaatgtcaaaaagctgggaagtgttaaagaagattacaacagactgagaagagaagtggagcaccaggagactgcctatgctgcaagtgtccactgcttgggaaagtgtgggaagctgacttggaagcttgtcgattgcttatccagagcctacagctccaggaagccaggggaagcctgtctgtagaagatgagaggcagatggatgacttagagggagctgctcctcctattccccccaggctccactccgaggataaaaggaagacccctttgaaggtattggaagaatggaagactcacctcatcccctctctgcactgtgctggaggtgaacagaaagaggtctgtccttttcacatggcctccagaggggacccttattctaaggggtgctttgggaccatgctccaaatgggaacaataaatattgggaaggcttcccattgagcatataaacttttaaaagtttcaataactcttgaatatgattacaaaataaagtagaatttttgtagaagtttgaaatatagaagagcaaaaaaacccaacttttggcatatttagttccattttcattctaatttagtggctagaattagaatatgcagtctaatatagaattaccatatatagcatacattatatatgtcatatataatatagttattatattcactatagattatatatgccatacatgatatttaacatatatactatacattatgtattgtatgtcatatatgatgtttatatatttagaatctatatattacaatatattattatttatttgaatgaaacattcaaatatatgtatttatcccattaattgtttttaccaaaaccagatcataatgaatgtttataatgttcttctttcataaacacaactaaagtttggcctgagatatatgtattacaaattaaaatatggttttattt

SEQ ID NO: 8579 - DNA, 2616 bp, Homo sapiens
  source 1..2616: mol_type = unassigned DNA
ggaaggagcaggaggcagcccaggcggagcgggaggagctggcagcggggcgcatgccaggcgggggtcctcagggcgccccagccgccgccggcggcggcggcgtgagccaccgcgcaggcagccgggattgcttaccacctgcagcgtgctttcggaggcggcggctggcacggaggccgggctacatgagaagctcgacagggcctgggatcgggttcctttccccagcagtgggcacactgttccggttcccaggaggggtgtctggcgaggagtcccaccactcggagtccagggccagacagtgtggccttgactcgagaggcctcttggtccggagccctgtttccaagagtgcagcagcccctactgtgacctctgtgagaggaacctcggcgcactttgggattcagctcagaggtggcaccagattgcctgacaggcttagctggccgtgtggccctgggagtgctgggtggcagcaagagtttgcagccatggatagttctgagaccctggacgccagctgggaggcagcctgcagcgatggagcaaggcgtgtccgggcagcaggctctctgccatcagcagagttgagtagcaacagctgcagccctggctgtggccctgaggtccccccaacccctcctggctctcacagtgcctttacctcaagctttagctttattcggctctcgcttggctctgccggggaacgtggagaagcagaaggctgcccaccatccagagaggctgagtcccattgccagagcccccaggagatgggagccaaagctgccagcttggacgggcctcacgaggacccgcgatgtctctctcggcccttcagtctcttggctacacgggtctctgcagacttggcccaggccgcaaggaacagctccaggccagagcgtgacatgcattctttaccagacatggaccctggctcctccagttctctggatccctcactggctggctgtggtggtgatgggagcagcggctcaggggatgcccactcttgggacaccctgctcaggaaatgggagccagtgctgcgggactgcctgctgagaaaccggaggcagatggaggtaatatccttaagattaaaacttcagaaacttcaggaagatgcagttgagaatgatgattatgataaagctgagacgttacaacaaagattagaagacctggaacaagagaaaatcagcctgcactttcaacttccttcaaggcagccagctcttagcagtttcctgggtcacctggcagcacaagtccaggctgccttgcgccgtggggccactcagcaggccagcggagatgacacccacaccccactgagaatggagccgaggctgttggaacccactgctcaggacagcttgcacgtgtccatcacgagacgagactggcttcttcaggaaaagcagcagctacagaaagaaatcgaagctctccaagcaaggatgtttgtgctggaagccaaagatcaacagctgagaagggaaatagaggagcaagagcagcaactccagtggcagggctgcgacctgaccccactggtgggccagctgtccctgggtcagctgcaggaggtcagcaaggccttgcaggacaccctggcctcagccggtcagattcccttccatgcagagccaccggaaaccataaggagaaacaagtgtgaaggaaaatactatgaagtacatggaaacacttaagaataaactgtgcagctgcaagtgtccactgcttgggaaagtgtgggaagctgacttggaagcttgtcgattgcttatccagagcctacagctccaggaagccaggggaagcctgtctgtagaagatgagaggcagatggatgacttagagggagctgctcctcctattccccccaggctccactccgaggataaaaggaagacccctttgaaggtattggaagaatggaagactcacctcatcccctctctgcactgtgctggaggtgaacagaaagaggtctgtccttttcacatggcctccagaggggacccttattctaaggggtgctttgggaccatgctccaaatgggaacaataaatattgggaaggcttcccattgagcatataaacttttaaaagtttcaataactcttgaatatgattacaaaataaagtagaatttttgtagaagtttgaaatatagaagagcaaaaaaacccaacttttggcatatttagttccattttcattctaatttagtggctagaattagaatatgcagtctaatatagaattaccatatatagcatacattatatatgtcatatataatatagttattatattcactatagattatatatgccatacatgatatttaacatatatactatacattatgtattgtatgtcatatatgatgtttatatatttagaatctatatattacaatatattattatttatttgaatgaaacattcaaatatatgtatttatcccattaattgtttttaccaaaaccagatcataatgaatgtttataatgttcttctttcataaacacaactaaagtttggcctgagatatatgtattacaaattaaaatatggttttattt

SEQ ID NO: 8580 - DNA, 2658 bp, Homo sapiens
  source 1..2658: mol_type = unassigned DNA
ggaaggagcaggaggcagcccaggcggagcgggaggagctggcagcggggcgcatgccaggcgggggtcctcagggcgccccagccgccgccggcggcggcggcgtgagccaccgcgcaggcagccgggattgcttaccacctgcagcgtgctttcggaggcggcggctggcacggaggccgggctacatgagaagctcgacagggcctgggatcgggttcctttccccagcagtgggcacactgttccggttcccaggaggggtgtctggcgaggagtcccaccactcggagtccagggccagacagtgtggccttgactcgagaggcctcttggtccggagccctgtttccaagagtgcagcagcccctactgtgacctctgtgagaggaacctcggcgcactttgggattcagctcagaggtggcaccagattgcctgacaggcttagctggccgtgtggccctgggagtgctgggtggcagcaagagtttgcagccatggatagttctgagaccctggacgccagctgggaggcagcctgcagcgatggagcaaggcgtgtccgggcagcaggctctctgccatcagcagagttgagtagcaacagctgcagccctggctgtggccctgaggtccccccaacccctcctggctctcacagtgcctttacctcaagctttagctttattcggctctcgcttggctctgccggggaacgtggagaagcagaaggctgcccaccatccagagaggctgagtcccattgccagagcccccaggagatgggagccaaagctgccagcttggacgggcctcacgaggacccgcgatgtctctctcggcccttcagtctcttggctacacgggtctctgcagacttggcccaggccgcaaggaacagctccaggccagagcgtgacatgcattctttaccagacatggaccctggctcctccagttctctggatccctcactggctggctgtggtggtgatgggagcagcggctcaggggatgcccactcttgggacaccctgctcaggaaatgggagccagtgctgcgggactgcctgctgagaaaccggaggcagatggaggtaatatccttaagattaaaacttcagaaacttcaggaagatgcagttgagaatgatgattatgataaagctgagacgttacaacaaagattagaagacctggaacaagagaaaatcagcctgcactttcaacttccttcaaggcagccagctcttagcagtttcctgggtcacctggcagcacaagtccaggctgccttgcgccgtggggccactcagcaggccagcggagatgacacccacaccccactgagaatggagccgaggctgttggaacccactgctcaggacagcttgcacgtgtccatcacgagacgagactggcttcttcaggaaaagcagcagctacagaaagaaatcgaagctctccaagcaaggatgtttgtgctggaagccaaagatcaacagctgagaagggaaatagaggagcaagagcagcaactccagtggcagggctgcgacctgaccccactggtgggccagctgtccctgggtcagctgcaggaggtcagcaaggccttgcaggacaccctggcctcagccggtcagattcccttccatgcagagccaccggaaaccataaggagcctccaggaaagaataaaatccctcaacttgtcacttaaagaaatcactactaaggaaaccatttctggacggctaaagacctcaccgaggagattagatcattaacatcagagagagaagggctggagggactcctcagcaagctgttggtgttgagttccaggaatgtcaaaaagctgggaagtgttaaagaagattacaacagactgagaagagaagtggagcaccaggagactgcctatggtaggtagtgcacaactgttccccggcaagatattgatgatatttgttgtgttttgtggccaggcagaatgttctgtgccttatgtgaacgtcactgtgaagagcgtcatggagcacatggcccttttccttggggacatttttggcaggtgccttggcaaaccgaatggaattacttgtcagcttttgttttcatattcacatgtgacatcttttctttttctgttccctgtctcaacctgtgtttgctaatagccttgttattatttagagcagtctctcccttggcaaggtcttgagcattttctttgtgtgacaattatcttccttttgtcccttggctccgtctccttgtctgcacaatcatagactaaatcaggctgatctgagaaaattgagggaagaccataaagtggctcttctatgtgtggacttttctgagagcttctttccccaggaaggatgatgtagaagatgtgaatgccgccttagccaaagtgtctgcttgtcagaggagttcaagtgttcctgtgttctttccttttccagtcgttaggagtaactgagcttactctgagatttgcacccagagggatggtctcagaagacgctggttcagtgcaaattgagatggtaaaaacttatttcttaaaaaatggttcctaaataaatgtcatttactaaaacaaatgaaagaaatatatatatgaataaatggctatatttt

SEQ ID NO: 8581 - DNA, 2130 bp, Homo sapiens
  source 1..2130: mol_type = unassigned DNA
gacaaactccattttcttatgaatggaaagtgaaaacccctgttccgcttaaattgggttccttcctgtcctgagaaacatagagacccccaaaagggaagcagaggagagaaagtcccacacccagaccccgcgagaagagatgaccatgaccaccatgccagaaagtctcaacagccccgtgtcgggcaaggcggtgtttatggagtttgggccgcccaaccagcaaatgtctccttctcccatgtcccacgggcactactccatgcactgtttacactcggcgggccattcgcagcccgacggcgcctacagctcagcctcgtccttctcccgaccgctgggctacccctacgtcaactcggtcagcagccacgcatccagcccctacatcagttcggtgcagtcctacccgggcagcgccagcctcgcccagagccgcctggaggacccaggtcaagatctggttccaaaacaagcgatccaagttcaagaagctgatgaagcagggtggggcggctctggagggtagtgcgttggccaacggtcgggccctgtctgctggctccccacccgtgccgcccggctggaaccctaactcttcatccgggaagggctcaggaggaaacgcgggctcctatatccccagctacacatcgtggtacccttcagcgcaccaagaagctatgcagcaaccccaacttatgtgaggttgcccgcccgtctccttcttgtctccccggcccaggtccctcccgcctccaggtccatccatcccgtccggaaaagaaggacccagagggaagaaggaacagtggaggcgggacgccctccatctcctcggagccccgcgaggtccggcccagcaacttcccggcatccgcgctctagcctgaaccctggcctgggccgagcagtggcagcagagagtggcctcggagggaagccactgccacctgagacagcccaagcagcaagataaacccgctccacccgacccgccgaccttcagctttgtgggactatcaggaaaaaacaaaacaaaaacaaaatgtagaaaaagcaaaagctcttttctgtcctgtcagtctcctgtctccttttgctctgtctgtgcgctggtaaagtccaggtcctcatccgtccgctgtcctcattctgcggcctcagcaaaaagccacaaggtctgagcggcccgggtcctgccgggctgaccatctccggatcctgggacactctgcctgaccatctgtgtagctggtgtgggaatctgggggcattggagggagggggttttatttattgagaaatggacttcgcctgaggctgtttgccaattcagggttctgctgggcgcaaggaacgcactgttcaaacgcactgtttactttaagcgcacggggagaaacgaataaggaggacgtggtgatttttaatttatacagtaacttttgtacttctctggtatggagagtttggagccgaatgatttgcattttttacatgtccgacattatttaataaataatttttaaaagaaaagaacgataaatgaagccaacatgattttctcatttcgggaggaactctgttgcttcgcctggacaagaaggaaaatgctgatttcctccttgggtagaaagagggagcgagggcaaatggggagtagagagaaaacaggcgagaacaagcactctaattccagtgggctttaaaataagacaaaatcagctttacaacaatccctagaggctcgaccacagaataatgccagtcaccaccctgaacgcacaatctccagtgcaggatctaatgactgtacatattattgttattattattattgttattattgttgttctgtaaacatgttgcacaagcttagcctttttgcgttctgttgtgtgtggctgtaaaaccccatgctttgtgaaatgagaatcttgacatttttcttgtgaaatttggaaaatgtgatcaattgaaatcaactgtgttttgtgttctctatgtcaaagtttagttttatattgagaatgttaacttattgctttgtatcttgggaaaaaaactttgtaaataagttataaagtttctttgagacagtaaaattatgatttcttgaaagaa

SEQ ID NO: 8582 - DNA, 1022 bp, Homo sapiens
  source 1..1022: mol_type = unassigned DNA
gggaggagaagcgcgggttcctggctctccacgcgcactgctttaatcagacccgtgcagcctcgagctggagtggccagctgggcctggagcaatgcgagcgggccccagggagcgacagcggcgttggcgcagcggccgaaggagccccggccgggaagtgtggatgcgtcttacccgaggccgggccgcctcgcccgctctagtccagcggagcccgagcgcctcggaccaatccccagtgattatgcaagacagcggaccaatcagctccgccagctcatgaatatttatgaccttcgctgagtcaaagctttgaaccgagtttggggagctcagcagcatcatgcttagacttttcaaagagacaaactccattttcttatgaatggaaagtgaaaacccctgttccgcttaaattgggttccttcctgtcctgagaaacatagagacccccaaaagggaagcagaggagagaaagtcccacacccagaccccgcgagaagagatgaccatgaccaccatgccagaaagtctcaacagccccgtgtcgggcaaggcggtgtttatggagtttgggccgcccaaccagcaaatgtctccttctcccatgtcccacgggcactactccatgcactgtttacactcggcgggccattcgcagcccgacggcgcctacagctcagcctcgtccttctcccgaccgctgggctacccctacgtcaactcggtcagcagccacgcatccagcccctacatcagttcggtgcagtcctacccgggcagcgccagcctcgcccagagccgcctggaggacccaggggcggactcggagaagagcacggtggtggaaggcggtgaagtgcgcttcaatggcaagggaaaaaagatccgtaaacccaggacgatttattccagtttgcagttgcaggctttgaaccggaggttccagcaaactcagtacctagctctgccggagagggcggagctcgcggcctctttgggactcacacagactcagg

SEQ ID NO: 8583 - DNA, 2640 bp, Homo sapiens
  source 1..2640: mol_type = unassigned DNA
gggaggccgatgagccgcgggccgcaggggccccggcgcagacgccgcagcccattgtgcttcctgcccggcgcgctctgttgcagaggagccccggccgggaagtgtggatgcgtcttacccgaggccgggccgcctcgcccgctctagtccagcggagcccgagcgcctcggaccaatccccagtgattatgcaagacagcggaccaatcagctccgccagctcatgaatatttatgaccttcgctgagtcaaagctttgaaccgagtttggggagctcagcagcatcatgcttagacttttcaaagagacaaactccattttcttatgaatggaaagtgaaaacccctgttccgcttaaattgggttccttcctgtcctgagaaacatagagacccccaaaagggaagcagaggagagaaagtcccacacccagaccccgcgagaagagatgaccatgaccaccatgccagaaagtctcaacagccccgtgtcgggcaaggcggtgtttatggagtttgggccgcccaaccagcaaatgtctccttctcccatgtcccacgggcactactccatgcactgtttacactcggcgggccattcgcagcccgacggcgcctacagctcagcctcgtccttctcccgaccgctgggctacccctacgtcaactcggtcagcagccacgcatccagcccctacatcagttcggtgcagtcctacccgggcagcgccagcctcgcccagagccgcctggaggacccaggggcggactcggagaagagcacggtggtggaaggcggtgaagtgcgcttcaatggcaagggaaaaaagatccgtaaacccaggacgatttattccagtttgcagttgcaggctttgaaccggaggttccagcaaactcagtacctagctctgccggagagggcggagctcgcggcctctttgggactcacacagactcaggtcaagatctggttccaaaacaagcgatccaagttcaagaagctgatgaagcagggtggggcggctctggagggtagtgcgttggccaacggtcgggccctgtctgctggctccccacccgtgccgcccggctggaaccctaactcttcatccgggaagggctcaggaggaaacgcgggctcctatatccccagctacacatcgtggtacccttcagcgcaccaagaagctatgcagcaaccccaacttatgtgaggttgcccgcccgtctccttcttgtctccccggcccaggtccctcccgcctccaggtccatccatcccgtccggaaaagaaggacccagagggaagaaggaacagtggaggcgggacgccctccatctcctcggagccccgcgaggtccggcccagcaacttcccggcatccgcgctctagcctgaaccctggcctgggccgagcagtggcagcagagagtggcctcggagggaagccactgccacctgagacagcccaagcagcaagataaacccgctccacccgacccgccgaccttcagctttgtgggactatcaggaaaaaacaaaacaaaaacaaaatgtagaaaaagcaaaagctcttttctgtcctgtcagtctcctgtctccttttgctctgtctgtgcgctggtaaagtccaggtcctcatccgtccgctgtcctcattctgcggcctcagcaaaaagccacaaggtctgagcggcccgggtcctgccgggctgaccatctccggatcctgggacactctgcctgaccatctgtgtagctggtgtgggaatctgggggcattggagggagggggttttatttattgagaaatggacttcgcctgaggctgtttgccaattcagggttctgctgggcgcaaggaacgcactgttcaaacgcactgtttactttaagcgcacggggagaaacgaataaggaggacgtggtgatttttaatttatacagtaacttttgtacttctctggtatggagagtttggagccgaatgatttgcattttttacatgtccgacattatttaataaataatttttaaaagaaaagaacgataaatgaagccaacatgattttctcatttcgggaggaactctgttgcttcgcctggacaagaaggaaaatgctgatttcctccttgggtagaaagagggagcgagggcaaatggggagtagagagaaaacaggcgagaacaagcactctaattccagtgggctttaaaataagacaaaatcagctttacaacaatccctagaggctcgaccacagaataatgccagtcaccaccctgaacgcacaatctccagtgcaggatctaatgactgtacatattattgttattattattattgttattattgttgttctgtaaacatgttgcacaagcttagcctttttgcgttctgttgtgtgtggctgtaaaaccccatgctttgtgaaatgagaatcttgacatttttcttgtgaaatttggaaaatgtgatcaattgaaatcaactgtgttttgtgttctctatgtcaaagtttagttttatattgagaatgttaacttattgctttgtatcttgggaaaaaaactttgtaaataagttataaagtttctttgagacagtaaaattatgatttcttgaaagaa

SEQ ID NO: 8584 - DNA, 762 bp, Homo sapiens
  source 1..762: mol_type = unassigned DNA
agcgcgggttcctggctctccacgcgcactgctttaatcagacccgtgcagcctcgagctggagtggccagctgggcctggagcaatgcgagcgggccccagggagcgacagcggcgttggcgcagcggccgaaaacatagagacccccaaaagggaagcagaggagagaaagtcccacacccagaccccgcgagaagagatgaccatgaccaccatgccagaaagtctcaacagccccgtgtcgggcaaggcggtgtttatggagtttgggccgcccaaccagcaaatgtctccttctcccatgtcccacgggcactactccatgcactgtttacactcggcgggccattcgcagcccgacggcgcctacagctcagcctcgtccttctcccgaccgctgggctacccctacgtcaactcggtcagcagccacgcatccagcccctacatcagttcggtgcagtcctacccgggcagcgccagcctcgcccagagccgcctggaggacccaggggcggactcggagaagagcacggtggtggaaggcggtgaagtgcgcttcaatggcaagggaaaaaagatccgtaaacccaggacgatttattccagtttgcagttgcaggctttgaaccggaggttccagcaaactcagtacctagctctgccggagagggcggagctcgcggcctctttgggactcacacagactcaggtcaagatctggttccaaaacaagcgatccaagttcaagaagctgatga

SEQ ID NO: 8585 - DNA, 2453 bp, Homo sapiens
  source 1..2453: mol_type = unassigned DNA
agacaatcgtaaagccgctcggggccgctcacctgctcccgcctcccagagccccgacccggcccagccacccctgccccctccactgcccgccccccgccagagcccgcgctcgcgctgggcaaggagccgagcgggcccagaggccgaaagaggatgcgaccagaggcagctgtcccgagcagcgcacggtgatcgcctcccccggaggaggaggcgcctagacggttgcctcctttcttgtttccccaccaccacccccgtaattacattggctgctggaggggaccgggagagacagaggaggcgcctggcttcccccgcacgcccgccacctctgctctttcccgtctcgggccaggatgactggagtctttgacagtctagtggctgatatgcactcgacccagatcgccgcctccagcacgtaccaccagcaccagcagcccccgagcggcggcggcgccggcccgggtggcaacagcagcagcagcagcagcctccacaagccccaggagtcgcccacccttccggtgtccaccgccaccgacagcagctactacaccaaccagcagcacccggcgggcggcggcggcggcgggggctcgccctacgcgcacatgggttcctaccagtaccaagccagcggcctcaacaacgtcccttactccgccaagagcagctatgacctgggctacaccgccgcctacacctcctacgctccctatggaaccagttcgtccccagccaacaacgagcctgagaaggaggaccttgagcctgaaattcggatagtgaacgggaagccaaagaaagtccggaaaccccgcaccatctactccagtttccagctggcggctcttcagcggcgtttccaaaagactcaatacttggccttgccggagcgagccgagctggcggcctctctgggcctcacccagactcaggtcaaaatctggttccagaaccgccggtccaagttcaagaagatgtggaaaagtggtgagatcccctcggagcagcaccctggggccagcgcttctccaccttgtgcttcgccgccagtctcagcgccggcctcctgggactttggtgtgccgcagcggatggcgggcggcggtggtccgggcagtggcggcagcggcgccggcagctcgggctccagcccgagcagcgcggcctcggcttttctgggcaactacccctggtaccaccagacctcgggatccgcctcacacctgcaggccacggcgccgctgctgcaccccactcagaccccgcagccgcatcaccaccaccaccatcacggcggcgggggcgccccggtgagcgcggggacgattttctaaccccagggagaactcgccagagactgagagcagagaccacttatcctcattgcttaccccgagccggggttccctcctcccggcccgctgccgccacccacctctcctgcaggctgcgacctgcagtggcccgtctcaggccctgctcactcccggggccaccaaacgggcccctctctcgggggaaccggacagcagcttggcaaaggcctccctaaaaggccgcatttctgacctgagccccgggtctcggctgtttcgagccccgcctcggacttgccttccctcccctccgggtgagcctgtctggcgccttcctcgccccgggctgagagctgggtcccgggagatggaagcctcccaggcgcgcgaggcttcccgggcgctctgaggcttctttctcctcgcccgctcccctgggctcagctcggacgctgcagttattgacctcccggtcccgcctgcccgccctcccccacgtggccccttgacccgggcggccccgccgcttctttccttcctgcagttcccagccctcggagcccccatcccttatcttacccccaccgcgctcccccaggagcgctccctcagctctctcctcatccatcaccagtggagtttttttatttgttatttttttaaaagtttaggtgcctttgcggatgacctcattttgacgttgaaaaaatgattttttaatatgtgaacactgcaaaaatgtgtttaaattatcttttttaaaacctattcaggattattagcctggacttggacacagagtttgtaaataaaggtgtctgtgcagattttcccactgatttatttgtataaaaatactcatcttttcagacttttttgtaaacccccagttgtgaaaactgcagtttagcagtgacctcagcaacccctcctttttattttttcctttaaaaacatttcagttaaattaagctactgatttggatttgttttatcgtatcctaaagtctttgttgttgaaatgaaaggtattttggggttatttattatgaaaacaacatgctcttaatgttgattttacaatatgaagagattatttaaataaattattgttttcattgg

SEQ ID NO: 8586 - DNA, 1852 bp, Homo sapiens
  source 1..1852: mol_type = unassigned DNA
agacaatcgtaaagccgctcggggccgctcacctgctcccgcctcccagagccccgacccggcccagccacccctgccccctccactgcccgccccccgccagagcccgcgctcgcgctgggcaaggagccgagcgggcccagaggccgaaagaggatgcgaccagaggcagctgtcccgagcagcgcacggtgatcgcctcccccggaggaggaggcgcctagacggttgcctcctttcttgtttccccaccaccacccccgtaattacattggctgctggaggggaccgggagagacagaggaggcgcctggcttcccccgcacgcccgccacctctgctctttcccgtctcgggccaggatgactggagtctttgacagtctagtggctgatatgcactcgacccagatcgccgcctccagcacgtaccaccagcaccagcagcccccgagcggcggcggcgccggcccgggtggcaacagcagcagcagcagcagcctccacaagccccaggagtcgcccacccttccggtgtccaccgccaccgacagcagctactacaccaaccagcagcacccggcgggcggcggcggcggcgggggctcgccctacgcgcacatgggttcctaccagtaccaagccagcggcctcaacaacgtcccttactccgccaagagcagctatgacctgggctacaccgccgcctacacctcctacgctccctatggaaccagttcgtccccagccaacaacgagcctgagaaggaggaccttgagcctgaaattcggatagtgaacgggaagccaaagaaagtccggaaaccccgcaccatctactccagtttccagctggcggctcttcagcggcgtttccaaaagactcaatacttggccttgccggagcgagccgagctggcggcctctctgggcctcacccagactcaggtggggctcgcgccctgcaggggcgaggagagcgcgggcctgagatggctgggaagcaggcgggtttaggacaatgctttttaaagttcattttaagtacttttaaggatttccaggcctgcgcctcgagcggccctaagtaagcttctaggcccaaagctggaaacccccaaggggccgccgtgggagggaaggaaagggaccgggtggacagaaatcccgtacctctcgctactgattaagcgggtgaaataactggccctcctcaccctcccgctgtcaccatcatcacagtgcacgtacaccagcagtcctggccttttggcaattacctccccagggagcaggaaccggcagagcctcgaaggccgccgcccgtgatcctcttatctccccagggcgctcgctgcccaccgctagccagcggtttttctctgccttcttttttctcctcttcgaacccctactgccccaagactaggttcctccactaatgctcaggtctttttcctcaaaggtcaaaatctggttccagaaccgccggtccaagttcaagaagatgtggaaaagtggtgagatcccctcggagcagcaccctggggccagcgcttctccaccttgtgcttcgccgccagtctcagcgccggcctcctgggactttggtgtgccgcagcggatggcgggcggcggtggtccgggcagtggcggcagcggcgccggcagctcgggctccagcccgagcagcgcggcctcggcttttctgggcaactacccctggtaccaccagacctcgggatccgcctcacacctgcaggccacggcgccgctgctgcaccccactcagaccccgcagccgcatcaccaccaccaccatcacggcggcgggggcgccccggtgagcgcgg

SEQ ID NO: 8587 - DNA, 2602 bp, Homo sapiens
  source 1..2602: mol_type = unassigned DNA
agcatttgattgtggcttgggacgcgaggagaggcgcgcagcgaccgcctgacggcaggcaatggtgtaagcgcctctcggcctccccctccccccagacgcggccgggtcctcccttcgccttctggacacacacccctgcctcgtctcttccgcctctctcgcactccggtccgttcctgtcctctgcggaggccagccctggggaggtgcagcgcccgccaggatgagtggctccttcgatcgcaagctcagcagcatcctcaccgacatctccagctcccttagctgccatgcgggctccaaggactcgcctaccctgcccgagtcttctgtcactgacctgggctactacagcgctccccagcacgattactactcgggccagccctatggccagacggtgaacccctacacctaccaccaccaattcaatctcaatgggcttgcaggcacgggcgcttactcgcccaagtcggaatatacctacggagcctcctaccggcaatacggggcgtatcgggagcagccgctgccagcccaggacccagtgtcggtgaaggaggagccggaagcagaggtgcgcatggtgaatgggaagcccaagaaggtccgaaagccgcgtacgatctactccagctaccagctggccgccctgcagcgccgcttccagaaggcccagtacctggcgctgcccgagcgcgccgagctggccgcgcagctgggcctcacgcagacacaggtgaaaatctggttccagaaccgccgttccaagttcaagaaactctacaagaacggggaggtgccgctggagcacagtcccaataacagtgattccatggcctgcaactcaccaccatcacccgccctctgggacacctcttcccactccactccggcccctgcccgcagtcagctgcccccgccgctcccatacagtgcctcccccagctacctggacgaccccaccaactcctggtatcacgcacagaacctgagtggaccccacttacagcagcagccgcctcagccagccaccctgcaccatgcctctcccgggcccccgcccaaccctggggctgtgtactgagcacccatctggcctgcacccttgacaaaggaccccaggaccaggcagaaggcgcctccgtcctagccactcaggaatcatcgaggagcacagggaaaaggaactccctttccccctcccttgccccttcctccagggacccaagcgcttccagatgacaattgcatggaccaaggatgccccctgaacctccctccctctgcctagacactggggtacccctccagatgtggggacattccaccccagtggggacagccattcccctacctgctccaggagcctggattggctttaaatggctcatcatcttccagcttcttaaacttagtgcctgttcccagactggagaccttgggatgggggagagtgtggagggtttgcgggtcctgcctgtgctggggcacctggcaccgtggatcttaaaacttgccaggcctagttcctcctgagcctctggtggtctccccctgctcgagcggcccctcggccaataagacagtggacatcatgacgaggactccgggtggggacctgaactggtcaccgccctgcacttctagccctcatttaagatttgagggtgaaaccaaagaaaaccccctaagtgagggaatcttttaatatttgtggctttagaggaaagaactaaaggagccatctctctcccctctcctccgttccgagaggaggggtgggtctcagacgtttttcctatggacttatttcttccatgtccaggactttgcacaactttggttttaaaagctgttgaaaaataggaaaacaaagggcattgttcacagatagggccaagtctccccttgcaagggtgcctctgttctgtccctgcccccacctcaccttctctactcctccagtaagttggcagttttggtgccaaaccccaaatctccaaagagacataccaggcaagacaaacccccaaacacctcctttccggtggccttggaaacagattgctccgagctggagaatgtcgggtgaggtgtatgggagaggaggggagagttagaacttgtgcctttgggagtaaggggtaactgcctggagggctggtggcactgcccctccctgacccagacatcccaccaaagctaactttcccccacccctgatgcagtaaaacattgaaaaaaaaaaaaaaggagaggtagaagactgtagctatatatataaatatatagtaagttttttttttttaagagcaacagagagaagcagcctcctccctgctgcggtttcctatttatgtggccatgttcctcctggacggatctccctgtgtgtttcaagctgagagatgtgggctccggctggatttgggttttgtgggaggtgcaggggccaagagagacgtggtaggtctccaagagtcccacccgggggggaagaagcaaagccatctcccaccccctcccagccttctcatttctgctttcttactggactcatctttatatataatgttaataaaaaagacgaaaataa

SEQ ID NO: 8588 - DNA, 2032 bp, Homo sapiens
  source 1..2032: mol_type = unassigned DNA
agagggcggggcccccgtcgggtcccgggaaccgaacccgatggagaggagggggcccccatggatttagggggggaggggaaagtcatggggggcacccccccggaacccctttcccaggcgcgcgttctccgctgaaagaggctcagagagacactttctccgggatcttaagtgtgggggctgctggctggggggcccgtccggcccaacgccggaggcttggaaaagagagttggcagcgggagcggactacgtgccgggccatggcccttctgcccgggccctggccacaatgacctctttgccctgccccctccccggccgggacgcctccaaagctgtcttcccagacctcgcccctgtcccgtcggtagcggctgcctacccgcttggcttgtcccctacaaccgcagcctcccccaatttgtcctactccaggccgtatggccacctcctgtcttacccctacaccgagccagcgaaccccggagactcctacctgtcctgccagcaacccgcggcgctctctcagcccctctgcggacctgcagagcaccctcaggaactcgaggcagactcggagaagccgcggctgtccccggaaccctccgagcggcgccctcaggcccccgccaaaaagctccgcaagccgaggaccatctactccagcctgcagctgcagcacctaaaccagcgtttccagcacacgcagtacctggcgctgcccgagagggcccagctggcagcgcagctcggcctcacccagacccaggtaaagatctggtttcagaacaaacgctccaagtataagaagctcctgaagcagaattctggggggcaggaaggggacttccctgggaggaccttctctgtgtctccctgctccccacccctcccctccctctgggatctacccaaggcagggaccctgcccaccagtggctatggcaacagctttggagcctggtatcagcatcactcctcagatgtcctggcttcgcctcagatgatgtgaatctggggaagggcgggtcaggcccacagccttcctgcaaagcccaggacccaggcagtccacctgcaccccttctgggctgggaggaaaccagctccagatgggttttctctggaggacaagcagttagaggagaaaaaggaatggagcagagcctgtacccctaaccctaacagctaaatcaaggacctcagccttatataatcattgtccccaccactaccatggactggacaccttcactccagctggacaaagactctggagagagagccattggctggagttgagactgtccccagaacccttggtcttgccactcccccactccttcttccctctctccctttctcctctccctgctttcttgaaaaggactgaatcgccactacagcctgggtgcaaaatcagcaagaaacattgagtatttttttttctttgtatgcctttggccttgcacaacccatttgtgagcaaaagcagaagtggaccaccatcagctcccacccacccagcgatttttccttggaggtcagcccgttacccccataactgatttacctacttaccatactgggaggtagaagagatgcagagaaatgtggaatttgtggacctatgggtaatttatgctttcctcctaaaaaaaaaaaaaaagccctctttcccaccccctccccatctcccctttttgaatagataatggatccaattatccatataattcaataggtatttattgagaggctcccttctattccccatccctaatccctaacgaacccacgggcacacacttttggaaacctggtaaagtaacacttagggggaaatggggacaaactggctctctggattagtgcgggtatagacacccccaaataggtgggtaggcccattgattcagctccttgcagctgtctctgttcaaaggaactgtgcagatttagaacgaattggagcttgagcttcacaccaccagcttccagagattaaagtttgtacaaaacattg

SEQ ID NO: 8589 - DNA, 1399 bp, Homo sapiens
  source 1..1399: mol_type = unassigned DNA
ccgcaggcgccgcggtaccctggctgtggccctcggcgctttcttcctagggtcacaggacccatacgagtgggagctccctgggagcagaactgcgtcttgtatcacctggcgcggtgaacgtgggggttgaaacgctccacgcggaaggtagagggcaggggccaagggggcgatcctggtggctgcgctttttgctatttgctgccgacggcatgcagacgagatgcaaataagcttatgaaactgtccgtcctaccccctcgctccctcctcgccccctacaccgtgttgtgctgcccaccagactcggagaagccgcggctgtccccggaaccctccgagcggcgccctcaggcccccgccaaaaagctccgcaagccgaggaccatctactccagcctgcagctgcagcacctaaaccagcgtttccagcacacgcagtacctggcgctgcccgagagggcccagctggcagcgcagctcggcctcacccagacccaggtaaagatctggtttcagaacaaacgctccaagtataagaagctcctgaagcagaattctggggggcaggaaggggacttccctgggaggaccttctctgtgtctccctgctccccacccctcccctccctctgggatctacccaaggcagggaccctgcccaccagtggctatggcaacagctttggagcctggtatcagcatcactcctcagatgtcctggcttcgcctcagatgatgtgaatctggggaagggcgggtcaggcccacagccttcctgcaaagcccaggacccaggcagtccacctgcaccccttctgggctgggaggaaaccagctccagatgggttttctctggaggacaagcagttagaggagaaaaaggaatggagcagagcctgtacccctaaccctaacagctaaatcaaggacctcagccttatataatcattgtccccaccactaccatggactggacaccttcactccagctggacaaagactctggagagagagccattggctggagttgagactgtccccagaacccttggtcttgccactcccccactccttcttccctctctccctttctcctctccctgctttcttgaaaaggactgaatcgccactacagcctgggtgcaaaatcagcaagaaacattgagtatttttttttctttgtatgcctttggccttgcacaacccatttgtgagcaaaagcagaagtggaccaccatcagctcccacccacccagcgatttttccttggaggtcagcccgttacccccataactgatttacctacttaccatactgggaggtagaagagatgcagagaaatgtggaatttgtggacctatgggtaatttatgctttcctcctaaaaaaaaaa

SEQ ID NO: 8590 - DNA, 1688 bp, Homo sapiens
  source 1..1688: mol_type = unassigned DNA
actaaaaacagatagactaagacccctccccactccacaacaagcaaaaacacacacaagcgcgcgggcgcgcacacacacaaacacacacaccccctcagtaccccccaccccctttttaagcaatgctttgttgtgctaaaactagttggacgagttagggtgttactgttgctcccgaggccctggccaatagaaccagatccaccccgctgtgcgtaagcgcgcaattaaggatttaaccaaggctgtgctgcgcctcagccagcagtcagccggccggagacagagacttcacgactcccagtctcctcctcgccgcggccgccgcctcctccttctctcctcctcctcttcctcctcctccctcgctcccacagccatgtctgcttagaccagagcagccccacagccaactagggcagctgccgccgccacaacagcaaggacagccgctgccgccgcccgtgagcgatgacaggagtgtttgacagaagggtccccagcatccgatccggcgacttccaagctccgttccagacgtccgcagctatgcaccatccgtctcaggaatcgccaactttgcccgagtcttcagctaccgattctgactactacagccctacggggggagccccgcacggctactgctctcctacctcggcttcctatggcaaagctctcaacccctaccagtatcagtatcacggcgtgaacggctccgccgggagctacccagccaaagcttatgccgactatagctacgctagctcctaccaccagtacggcggcgcctacaaccgcgtcccaagcgccaccaaccagccagagaaagaagtgaccgagcccgaggtgagaatggtgaatggcaaaccaaagaaagttcgtaaacccaggactatttattccagctttcagctggccgcattacagagaaggtttcagaagactcagtacctcgccttgccggaacgcgccgagctggccgcctcgctgggattgacacaaacacaggtgaaaatctggtttcagaacaaaagatccaagatcaagaagatcatgaaaaacggggagatgcccccggagcacagtcccagctccagcgacccaatggcgtgtaactcgccgcagtctccagcggtgtgggagccccagggctcgtcccgctcgctcagccaccaccctcatgcccaccctccgacctccaaccagtccccagcgtccagctacctggagaactctgcatcctggtacacaagtgcagccagctcaatcaattcccacctgccgccgccgggctccttacagcacccgctggcgctggcctccgggacactctattagatgggctgctctctcttactctcttttttgggactactgtgttttgctgttctagaaaatcataaagaaaggaattcatatggggaagttcggaaaactgaaaaagattcatgtgtaaagcttttttttgcatgtaagttattgcatttcaaaagaccccccctttttttacagaggactttttttgcgcaactgtggacactttcaatggtgccttgaaatctatgacctcaacttttcaaaagacttttttcaatgttattttagccatgtaaataagtgtagatagaggaattaaactgtatattctggataaataaaattatttcgaccatgaaaagcgg

SEQ ID NO: 8591 - DNA, 1790 bp, Homo sapiens
  source 1..1790: mol_type = unassigned DNA
atgatgaccatgactacgatggctgacggcttggaaggccaggactcgtccaaatccgccttcatggagttcgggcagcagcagcagcagcagcactccccggccatggcaggcgcgcactaccctctgcactgcctgcactcggcggcggcggcggcagcggccggctcgcaccaccaccaccaccaccagcaccaccaccacggctcgccctacgcgtcgggcggagggaactcctacaaccaccgctcgctcgccgcctacccctacatgagccactcgcagcacagcccttacctccagtcctaccacaacagcagcgcagccgcccagacgcgaggggacgacacagatcaacaaaaaactacagtgattgaaaacggggaaatcaggttcaatggaaaagggaaaaagattcggaagcctcggaccatttattccagcctgcagctccaggctttaaaccatcgctttcagcagacacagtatctggcccttccagagagagccgaactggcagcttccttaggactgacacaaacacaggtgaagatatggtttcagaacaaacgctctaagtttaagaaactgctgaagcagggcagtaatcctcatgagagcgaccccctccagggctcggcggccctgtcgccacgctcgccagcgctgcctccagtctgggacgtttctgcctcggccaagggtgtcagtatgccccccaacagctacatgcctggctattctcactggtactcctctccacaccaggacacgatgcagagaccacagatgatgtgagttgcccaagggaacaccctagggaaacgtctgaacaaggaaaagaggatccgggacctgcttgtatctgcgaaaaggagccaaaggagcaggcttaggagagctcataagtgtggcaagaagccgactaggctcattctctctccctctctctctctctccctctcctttctttttacttcttcctttcctccattccttctttctttccttttcctttctacctttcttttctttttgcctttcaccttttttctcatttaccttctctcttgagcaacgtcagtaattgatcttgcatctcagagagagagaaagagcatgtgtgagagagaaactggtttctatgccagcactcctgaaaccccttactgtaaggatattttctcttaccccttgggatccaggctctgagtctcttctctttgggagtatccatcaaaatgactttttttaaaaacagattttcccccaaccagaagaatctgcacaaacttggcagcgtttttacttgtttaatgagtttaagacattacatggtgaaagagaagcattttggactcctgcatttttatttaccattcccagactgacgagaaaaagaaaattcctcacataacagcccttctctaaagaaaaaggaaaaagtggctgtaagattagaacattgctacaaagggaatgctgcatgttttatcaaaatgcaatgaccaggaatgatggttgattaaaaaaaaacaaaacaaaaaccactctttccccaccccacccccccaaaccctgaactggaatcaggaaagacggaggaaacaatcaaaatcaccattctattgctttgacacctttactaggtgaattggtggcattcacaaagctaatagggacgtttatatcaagaaacatttctgtatatattgttgaattttagttgtacatatactttgtatgtttttgtcttctttcatatatggagtaaaagccacaaaacgctg

SEQ ID NO: 8592 - DNA, 2304 bp, Homo sapiens
  source 1..2304: mol_type = unassigned DNA
aaaccattcgactcgtggcgtctgcatcaagtctgaaagcagacgcgcaactttcgcagaatccaccttaaaatctctgccttaaactgcaccagcccccaaaaaatccaaggggggaaagcaggcggggggagagcagattcccccctccccctctcctctcccatccctcctccttcctcctccctttgagttaacaaggccccgctcactatatctctttatattaaatatatatatatattagagaagagcgagggagagggagaaccacctccacccccctctttaaattcttttttttttttttttttttttttgcaaggatccaaagagctaaggtggctgcagaggggagagcggcgcgagccaagtgggggagggtggaggaaacccgggagaaggctttctccagcccccaaagtttttgatgatgaccatgactacgatggctgacggcttggaaggccaggactcgtccaaatccgccttcatggagttcgggcagcagcagcagcagcagcagcaacagcagcagcagcagcagcagcaacagcaacagccgccgccgccgccgccgccgccgccgcagccgcactcgcagcagagctccccggccatggcaggcgcgcactaccctctgcactgcctgcactcggcggcggcggcggcagcggccggctcgcaccaccaccaccaccaccagcaccaccaccacggctcgccctacgcgtcgggcggagggaactcctacaaccaccgctcgctcgccgcctacccctacatgagccactcgcagcacagcccttacctccagtcctaccacaacagcagcgcagccgcccagacgcgaggggacgacacagatcaacaaaaaactacagtgattgaaaacggggaaatcaggttcaatggaaaagggaaaaagattcggaagcctcggaccatttattccagcctgcagctccaggctttaaaccatcgctttcagcagacacagtatctggcccttccagagagagccgaactggcagcttccttaggactgacacaaacacaggtgaagatatggtttcagaacaaacgctctaagtttaagaaactgctgaagcagggcagtaatcctcatgagagcgaccccctccagggctcggcggccctgtcgccacgctcgccagcgctgcctccagtctgggacgtttctgcctcggccaagggtgtcagtatgccccccaacagctacatgcctggctattctcactggtactcctctccacaccaggacacgatgcagagaccacagatgatgtgagttgcccaagggaacaccctagggaaacgtctgaacaaggaaaagaggatccgggacctgcttgtatctgcgaaaaggagccaaaggagcaggcttaggagagctcataagtgtggcaagaagccgactaggctcattctctctccctctctctctctctccctctcctttctttttacttcttcctttcctccattccttctttctttccttttcctttctacctttcttttctttttgcctttcaccttttttctcatttaccttctctcttgagcaacgtcagtaattgatcttgcatctcagagagagagaaagagcatgtgtgagagagaaactggtttctatgccagcactcctgaaaccccttactgtaaggatattttctcttaccccttgggatccaggctctgagtctcttctctttgggagtatccatcaaaatgactttttttaaaaacagattttcccccaaccagaagaatctgcacaaacttggcagcgtttttacttgtttaatgagtttaagacattacatggtgaaagagaagcattttggactcctgcatttttatttaccattcccagactgacgagaaaaagaaaattcctcacataacagcccttctctaaagaaaaaggaaaaagtggctgtaagattagaacattgctacaaagggaatgctgcatgttttatcaaaatgcaatgaccaggaatgatggttgattaaaaaaaaacaaaacaaaaaccactctttccccaccccacccccccaaaccctgaactggaatcaggaaagacggaggaaacaatcaaaatcaccattctattgctttgacacctttactaggtgaattggtggcattcacaaagctaatagggacgtttatatcaagaaacatttctgtatatattgttgaattttagttgtacatatactttgtatgtttttgtcttctttcatatatggagtaaaagccacaaaacgctg

SEQ ID NO: 8593 - DNA, 11072 bp, Homo sapiens
  source 1..11072: mol_type = unassigned DNA
gagggaaggagggagggaagcagccgctgacccgtggcatgagctggatgcggtgtccgttgcaggactagggcgccgacatgaacctgcaccaggtgctgaccggggctgtgaaccctggcgaccactgcttctccgtgggcagcattggcgaccagcgcttcacggcttatgcatctggatgtgacattgtaatactgggaagcgattttgaaagattacagataatcccaggagctaaacatggaaatattcaagtgggatgtgtagactgttcaatgcaacaaggcaagattgcagcgtcttatggaaatgttatctccatttttgaaccagttaacctaccaaaacaaaagaaaaatttggaattatatagtcagtggcagaaaagtggccaattttttctggaatcaatagcacacaatataacctgggatcccacaggcagtcgtcttttaactggttccagctatttgcaactctggtccaatactaacttggagaagccaactgaagatgaaaatttaaataaaacagatcttaactttggagattggaaatgcatttggcattgcaaaactgcttcccaagttcatttaatgaaattttcaccagatggagaattttttgccactgctgggaaggatgactgtcttttgaaggtttggtataatgtagaaaactggcggacagctgttacttctccagatggaagttcagaaaaacaatcccaaggagaaattgacttttcttttgtgtatctggcccatcctcgagcagtaaatggattttcctggcgtaaaacaagcaaatatatgcctagggcttctgtatgtaatgtactgttgacttgctgcaaagataatgtgtgtcgtctttgggtagagacatttttaccaaatgattgtttgctatacggaggtgactgcagccattggactgaatcaattaatttaacaaataacttcaagagaaatgcttccagtaaagaacgagttcaaaatgctttagaagtaaatctgagacattttcgtagaggtcggaggagatcacttgctcttgtagcacatacgggatatctaccacatcagcaggatcctcatcatgttcacaggaacactccactgcatgccaatgcactttgccactttcatattgcagccagcatcaacccagccacagacattccacttcttccatctattacatctctgagtctaaatgaaaatgaagagaagaccggaccttttgttgtacactggctaaacaataaagaactgcattttactttgtccatggaagtttttttacagcaacttagaaaaagttttgaacaaccatcttctgaggccagtgtagaagattctaatcaggcagatgtaaaatctgatgaagaaactgatgatggtgttgatgatctgaaaataaatcccgaaaagaaggaattaggctgtgataaaatggtaccaaactcaagttttacatcattatcgtcagctgccattgatcatcagattgaagtacttctgtctgaatggagtaaaaatgcagatatgctatttagtattcatcccatggatggttctttgctagtttggcatgtggattggctggatgaataccagcctggtatgtttcgtcaagtacaggtgtcctttgtttccagaattccagtagctttccccacaggtgatgcaaactctctctgtaaaagcataatgatgtatgcctgtaccaagaatgttgacttggctattcagcaggggaaacaaaaaccttctggcctcacccgttccacatcaatgcttatttcttctggtcacaataaatcatctaatagtttaaaattaagtatttttacgcctaatgttatgatgatatcaaaacatgctgatggttctctgaatcagtggctggtcagttttgccgaggaatctgctttttctactgttctcagtatttcccacaaatccagatattgtggtcatcgttttcatcttaatgatttagcttgccactcagtattaccattattgctgacaacatcacaccataatgcattaaggacaccagatgttgataacccagagcaaccttttgatgctctaaatattgaagaatgctctttgacacaacaaaataaaagcactgttgacgtggcatttcaggatcccagtgcagtttacagtgagcttattctgtggagggttgacccagttgggccattgtctttttctggaggagtttctgagcttgcccggattaattctcttcatgtttctgccttttccaatgtggcatggctgcccactcttatacccagttattgtctgggtgcatactgcaactctcctagtgcatgctttgtagccagtgatggacaatatctgagattatatgaagcagttattgatgctaagaaacttttatctgagctttctaaccctgaaatttctaaatatgttggtgaagtctttaacatcgtcagtcaacaatcaacagccaggccaggatgcattattgcattagatcccattaccaaacttcatggcagaaaaacccaactgcttcatgtttttgaagaagacttcattttgaataaccttgagaagaaaagccttggcaaagacagcattttatctaatgcaggcagctcacctaatggattttctgagaagttctacctaattgtaatagaatgcactcaagacaaccgttcactgttacacatgtggaatttacatctaaagtcaattcctgtctcattagatgaaaaagtagatacaaaattatccgaagcggtttggcagccagaagaacattattcttcttctccagagaagatcctatctcctttttcacaaaagtatcaggcttgcagagcaaatctccagagtaccagcaggttgactctgttttcagaaatggtttatagccaagaattgcatttaccagaaggagttgagataataagtattaagccatcagcaggacatctgagttcatcttctatatatcctgcatgcagtgctccttatttattggcaacttcatgttcagatgagaaagtaagattctggagatgcagagtaacagatggagaatctgccacgtcaaagaatggaaaaattgatcttgcatacatttgggaagaatggccattacttattgaagatggacttcagagcaatagtagtataactgtacctggtaggcctgtagaagttagctgtgcacatacaaatcgtttagcagtagcttataagcagcctgcatctaatagtagatcttcccaggactttgtgatgcatgtaagtatttttgaatgtgagtcaacaggaggttcatgttgggtccttgagcagacaattcatttagatgagttaagcacagtattggattctggcattagtgttgatagcaatttagtggcctataataaacaagacatgtatttatctagtaaagagaatatcacatcaaacacaaagcatttagttcacttagattggatgtctagagaagacggttctcatatcctgactgtaggaattggatcaaaactttttatgtatggacccctggctggcaaggtacaagaccaaactggtaaggaaaccctggcatttcctctctgggagagtaccaaagttgtgcccctttctaaatttgtactattacgaagtgtggacctagtttcttctgtagatggctccccaccttttcctgtttctttatcgtgggtccgggatggcatccttgtggtaggaatggactgtgaaatgcatgtgtattgccaatggcaaccatcttctaaacaagaacctgttataacagattcgtacagtgggagcactccatctataacaagtttaataaaacagagtaactccagttctgggttacatcctccaaagaaaactctgactcgatccatgaccagtcttgcacagaaaatctgtggaaagaaaactgcattcgatccttcagtggatatggaagattcaggtctttttgaagcagctcatgtactttccccgactctacctcagtatcatcccttgcagcttttggaactcatggatcttggtaaagttcggagagccaaggccatcttgtcccatcttgttaagtgcattgctggggaagttgtggctctgaatgaagctgaatctaatcatgaacgccgccttaggtctctcacaatcagtgctagtggaagcactaccagagacccccaggcattcaacaaggctgaaaatacagattacacagaaatagattctgttcctccacttcctttatatgccttacttgcagcagatgatgatagctgttactcatctttggagaaatctagtaatgagagtacgttaagtaaatcaaaccaattatctaaagaaagttatgatgagctttttcagactcaacttctaatgactgatactcatatgttagagacagatgaagaaaatacaaagcctagagttattgacctttcacagtacagtccgacttactttggacctgagcatgctcaggttctttctggccacttacttcattctagtttaccaggactcagccggatggagcagatgtctttgatggccttagcagatacaattgcaactacaagcactgatattggagaaagccgagacagaagccaaggtggagaaactcttgatgaatgtgggttaaaatttcttttggctgttcgactccatacctttcttacaacttcccttccagcctatcgagctcaactccttcaccaaggcctgtctacaagtcattttgcttgggcatttcactcagtagcagaagaagaactgctgaacatgttgccagccatgcagaaagatgatcccacttggtctgaactaagagctatgggtgtggggtggtgggtccggaatacccgcatcttacgcaaatgcatagaaaaagtagctaaagcagccttttatagaaagaatgatcctttagatgctgccattttttaccttgcaatgaaaaagaaagctgtgatttggggattatatagagctgaaaaaaacaccaggatgacacagttttttggacacaattttgaggatgagaggtggcgtaaagcagctttaaagaatgctttttctttgctaggcaaacaaagatttgaacattctgcagcattttttcttttagctggttgcctcagagatgcaattgaggtatgtcttgagaaattgaatgacattcagttggctcttgtaatagcaagactctatgagtctgaatttgatacatctgcagcatataaatctattttacgtaaaaaagttttgggaatcgattctcctgtcagtgaactgtgttcattgaacataaatatgcatcatgatccttttcttcggagcatggcatattggattttggaagattatagtggtgctctggaaacattaataaagcaacctatcagagagaatgatgatcaagttttatcagccagtaatcctacagtttttaatttctacaattatctaagaacacatcctcttttgctgagacgtcattttggatcatctgatacattttccacacatatgagcctaacaggaaaaagtggactggcaggaacaattaatttaagtgaaagacgtttattttttaccactgccagtgctcatttaaaagctggctgcccaatgttggctttggaagtattatcaaagatgcctaaagtcatcaagaaaacaagacctttttatagggcttctagttttctggatactagtaaagactgttctccttcttctccattaaagttggatgcaagggaagataagtcttctgctgttgattggtcacagtcactgataaatggttttggatcttcttcagagggttcctcagagaagcaatcaaactccactctttcttttgactggagccaaccaagtgttgtgtttcaggatgactctttagagttaaaatgggacagtgataatgatgaagaaaatgaggatgtccctatttcaatgaaagaactaaaacctttacagagaaaaacagataaaaagttggatgacataagttctaactacacagaatctttcagcacactagatgaaaatgaccttttaaatccatcagaagatataattgcagttcagttaaaatttagagcatgtttaaagattctcacagtagaacttcgtactttatctactggctatgaaatagatggtggaaaattgcgttaccaactataccactggcttgaaaaagaggtgatagctcttcagaggacttgtgacttttgctcagatgctgaagaactacagtctgcatttggcagaaatgaagatgaatttggattaaatgaggatgctgaagatttgcctcaccaaacaaaagtgaaacaactgagagaaaattttcaggaaaaaagacagtggctcttgaagtatcagtcacttttgagaatgtttcttagttactgcatacttcatggatcccatggtgggggtcttgcatctgtaagaatggaattgattttgcttttgcaagaatctcagcaggaaacatcagaaccactattttctagccctctgtcagagcaaacctcagtgcctctcctctttgcttgtacagccaatgccaaaacagtagttgccaatccattattgcaccttagtaatctgacacatgatattctccatgccataataaactttgattcaccaccccaccctgatatccaaagcaataaagtgtatgtaatgcatactttagcagcttcactttctgcttgtatttatcagtgcctttgtggtagtcataactacagttcatttcagacgaatcagtttactggaatggtatatcagacagtactgcttcctcatcgaccttctttgaaaacaggaagcttagatgaagcattaactcccaatacgtcaccagctcaatggccaggaataacttgtctaattcgacttttgaattcttctggcgaggaagcccagtcagggcttacagtcttgctctgtgagattctcacagcagtgtatcttagtctcttcatccatggcctggccacacattcaagtaatgagctatttcggattgtggcccatcctctaaatgagaaaatgtggtctgctgtgtttggtggaggtgcacatgttcctagcaaagaacagacacattcaaaaactttacctgtttcttcactagttgaagaaggagaaaaacagaacaaacgttttaggccgtcaaaaatgtcttgcagagaatctgccccactgaccccttcctcggcaccagtaagccaggagtcactggcggttaaagaaaagttcatcccacctgagctcagtatctgggactatttcatagctaagccttttctaccctcttctcaaagtagagccgaatatgattcagaggagagtctgggaagtgatgatgatgacaatgatgatgatgatgatgttttagcatcagatttccatctccaggaacattctaattcaaattcatatagttggtccttgatgcggttggcgatggtgcaattggtgctcaacaatttgaagactttttatcccttcgcaggtcatgatcttgcagagcttccagttagttcacctctttgtcatgcggttctaaaaactcttcaatgttgggaacaagttcttctccgacgacttgaaatccatggtgggccacctcaaaattatatcgcaagtcataccgccgaagagagtttgtctgcaggtcctgcaattcttcgccacaaagctttactggaacctacaaacactcctttcaaatccaaacaccatctggcactgtctgtgaagaggctttggcagtatttggtgaagcaggaagaaattcaggaaacctttatcaaaaatatattcacaaagaaacggtgtctaaatgagatagaagcagatttgggatatcctggaggtaaagcaagaattattcataaggaatctgatatcattactgcgtttgctgttaataaggcaaatagaaactgcatagcaatcgcttccagtcatgatgttcaagaactggatgtttctggaattctggccacacaggtctacacttgggtagatgatgatatagaagtggaaaccaaaggatcagaagatttcttggttatacatgctcgtgatgatttaacagctgttcaaggtacaactccatatacacatagcaatcctggcactccaatcaacatgccatggcttggtagtacacagactggcagaggagcatctgtgatgattaagaaagccattaataatgttagaagaatgacttctcatccaactcttccttactatctgacaggagctcaagatggaagtgtcagaatgtttgaatggggccattctcaacaaataacctgttttcgatctggtggcaattcaagagttacaagaatgagatttaactatcagggaaataagtttggaatagttgatgctgatggatatttaagtttgtatcaaacaaactggaaatgttgtccagttactggaagcatgcctaagccatacctgacttggcagtgtcataacaaaacagccaatgattttgtcttcgttagttcctcctctctgatagctacagctggtctttcaactgacaatagaaacgtatgtttgtgggatactcttgtagcacctgccaatagtttagtccatgcatttacctgccatgacagtggagccacagttttagcatatgctccaaaacatcagctactaatatcaggtggcagaaaaggttttacatatgtatttgacctttgtcaacgacaacagaggcagcttttccagagccatgattctcctgttaaagccgttgctgttgatccaactgaagagtactttgttacaggatctgccgaaggcaatataaagatttggagtctctctacctttggtcttctccatacttttgtcagtgaacatgctcggcagtccatttttagaaatattggaactggagtgatgcaaattgagacagggcctgcaaatcacattttctcctgtggagctgatggaacaatgaaaatgagaatactgccagatcagtttagccctttaaatgaagtgttgaaaaatgatgtgaaatttatgctataacatttttacaataagatgtacaatttattacctatatggaagtggccaacagatataatatacagtgatcattctctatgccacaaattagctaatgctttcttgtttttatatttattttatggagctttgcccttgatgcactgatgccttaaaaattaacaaggtcattcagaagtagattacattgcctaaagtagaatgtgtaagtaatgctgtaataatacatatcatagtatattataatcagtatgtcatagtgttaaaggtgttttgttttcttattgatacttttccacaggcatctctgcatgaatttcttccacagtaaaaatacgttttttgtaaaggcaattgtacataatactcatcacttaattcaccacactctcacttcctttattagccttatacatctcaaactcttctcttaattaatgataggtatttgagtaagaatgaaaaaaataatgaacatcttcattaaaattgtcattgagacgtcagtgataaatgagctagatggctcaatatgtaaggttttcagtagtttaccctccggaacccaagttgtatgtatgtatacgtgtgtgtgtgtgtgtgtgtgtgtatcttacacatcttatttgaacttagttgtatatattagcgaaaactggtttttcatgtgtttttgtgccataacaactattgccaccagaataactttttttttgcaactgtgcttttcatttttaaaaaatttttgaattcccatcctaattttcaaataagtttcaaggagactatcaggattattattttaaagattagatttagtcaaataagtcttagcaggcaataaagtttctgtggtggcatatatcatgtaagacacttaaagtaagtttgtgaatttgtcaactttcgagcatcaaacaaatattttacttaaattttattttatcttatttttaggtgcttttaatctcaaaattctgaaaagcgaatagcagtgttttcagaaacaaatgtgaaagcagtcaaattaagtagatactatttagaaatgtaaaatactctccagatctaccattaatagaaaataaactaaaccttatattttatttttgccaaaatattttattataaaatatgaccaaaatatttaaaatgcacaatgcttttaacttaaatgtgctaaccctgtttctgtctgttttgtgctgtaccttttctgattcagaattatagaaaacttgataaatacttgattttaaccaatgagactacaggcagatgggactaagtgtttatgggacaattatgtactatttaacttaaatatattttgtttaataggaaatatataataatagcattttatgtaataaaatatgggcaacgattatcttggaaattaaagagtcaaagcaaagaaatgaagggctggtaaaatgaattttgtaatatcctcaggatacttttatcttaaaagtatgttgttaaagattttgtaaattgtatttcaacaattttaaatgtgttgagcaagttgcagtgcaaacactgtcattatgtagagagtttatatgcacataataacctgtacctataaatcgtgcaataaccatatgcgactattttgccatggagaaatctgacagcattgcaaacaatagtattgtttgatgtagttaaccttaagttatttttcagtaatttcttcacaaatcaagattcaaacagctttaaacacttccaatgagataaaatatttactattatgcttattagaacaaaaggtgtttaaggatgaactaaatattttaattgagcatttatatggataatcatacattatgtaagcccatatgtatttacatccagagtcataatattttaaataaacaatcatgcagaaacttt

SEQ ID NO: 8594 - DNA, 1835 bp, Homo sapiens
  source 1..1835: mol_type = unassigned DNA
gcggctgcccgaggtccagaggaagtgtgtggacagcgcggccttcctggccggactagggcgccgacatgaacctgcaccaggtgctgaccggggctgtgaaccctggcgaccactgcttctccgtgggcagcattggcgaccagcgcttcacggcttatgcatctggatgtgacattgtaatactgggaagcgattttgaaagattacagataatcccaggagctaaacatggaaatattcaagtgggatgtgtagactgttcaatgcaacaaggcaagattgcagcgtcttatggaaatgttatctccatttttgaaccagttaacctaccaaaacaaaagaaaaatttggaattatatagtcagtggcagaaaagtggccaattttttctggaatcaatagcacacaatataacctgggatcccacaggcagtcgtcttttaactggttccagctatttgcaactctggtccaatactaacttggagaagccaactgaagatgaaaatttaaataaaacagatcttaactttggagattggaaatgcatttggcattgcaaaactgcttcccaagttcatttaatgaaattttcaccagatggagaattttttgccactgctgggaaggatgactgtcttttgaaggtttggtataatgtagaaaactggcggacagctgttacttctccagatggaagttcagaaaaacaatcccaaggagaaattgacttttcttttgtgtatctggcccatcctcgagcagtaaatggattttcctggcgtaaaacaagcaaatatatgcctagggcttctgtatgtaatgtactgttgacttgctgcaaagataatgtgtgtcgtctttgggtagagacatttttaccaaatgattgtttgctatacggaggtgactgcagccattggactgaatcaattaatttaacaaataacttcaagagaaatgcttccagtaaagaacgagttcaaaatgctttagaagtaaatctgagacattttcgtagaggtcggaggagatcacttgctcttgtagcacatacgggatatctaccacatcagcaggatcctcatcatgttcacaggaacactccactgcatgccaatgcactttgccactttcatattgcagccagcatcaacccagccacagacattccacttcttccatctattacatctctgagtctaaatgaaaatgaagagaagaccggaccttttgttgtacactggctaaacaataaagaactgcattttactttgtccatggaagtttttttacagcaacttagaaaaagttttgaacaaccatcttctgaggccagtgtagaagattctaatcaggcagatgtaaaatctgatgaagaaactgatgatggtgttgatgatctgaaaataaatcccgaaaagaaggaattaggctgtgataaaatggtaccaaactcaagttttacatcattatcgtcagctgccattgatcatcagattgaagtacttctgtctgaatggagtaaaaatgcagatatgctatttagtattcatcccatggatggttctttgctagtttggcatgtggattggctggatgaataccagcctggtatgtttcgtcaagtacaggtgtcctttgtttccagaattccagtagctttccccacaggtgatgcaaactctctctgtaaaagcataatgatgtatgcctgtaccaagaatgttgacttggctattcagcaggggaaacaaaaaccttctggcctcacccgttccacatcaatgcttatttcttctggtcacaataaatcatctaatagtttaaaa

SEQ ID NO: 8595 - DNA, 9319 bp, Homo sapiens
  source 1..9319: mol_type = unassigned DNA
gtccgttgcaggactagggcgccgacatgaacctgcaccaggtgctgaccggggctgtgaaccctggcgaccactgcttctccgtgggcagcattggcgaccagcgcttcacggcttatgcatctggatgtgacattgtaatactgggaagcgattttgaaagattacagataatcccaggagctaaacatggaaatattcaagtgggatgtgtagactgttcaatgcaacaaggcaagattgcagcgtcttatggaaatgttatctccatttttgaaccagttaacctaccaaaacaaaagaaaaatttggaattatatagtcagtggcagaaaagtggccaattttttctggaatcaatagcacacaatataacctgggatcccacaggcagtcgtcttttaactggttccagctatttgcaactctggtccaatactaacttggagaagccaactgaagatgaaaatttaaataaaacagatcttaactttggagattggaaatgcatttggcattgcaaaactgcttcccaagttcatttaatgaaattttcaccagatggagaattttttgccactgctgggaaggatgactgtcttttgaaggtttggtataatgtagaaaactggcggacagctgttacttctccagatggaagttcagaaaaacaatcccaaggagaaattgacttttcttttgtgtatctggcccatcctcgagcagtaaatggattttcctggcgtaaaacaagcaaatatatgcctagggcttctgtatgtaatgtactgttgacttgctgcaaagataatgtgtgtcgtctttgggtagagacatttttaccaaatgattgtttgctatacggaggtgactgcagccattggactgaatcaattaatttaacaaataacttcaagagaaatgcttccagtaaagaacgagttcaaaatgctttagaagtaaatctgagacattttcgtagaggtcggaggagatcacttgctcttgtagcacatacgggatatctaccacatcagcaggatcctcatcatgttcacaggaacactccactgcatgccaatgcactttgccactttcatattgcagccagcatcaacccagccacagacattccacttcttccatctattacatctctgagtctaaatgaaaatgaagagaagaccggaccttttgttgtacactggctaaacaataaagaactgcattttactttgtccatggaagtttttttacagcaacttagaaaaagttttgaacaaccatcttctgaggccagtgtagaagattctaatcaggcagatgtaaaatctgatgaagaaactgatgatggtgttgatgatctgaaaataaatcccgaaaagaaggaattaggctgtgataaaatggtaccaaactcaagttttacatcattatcgtcagctgccattgatcatcagattgaagtacttctgtctgaatggagtaaaaatgcagatatgctatttagtattcatcccatggatggttctttgctagtttggcatgtggattggctggatgaataccagcctggtatgtttcgtcaagtacaggtgtcctttgtttccagaattccagtagctttccccacaggtgatgcaaactctctctgtaaaagcataatgatgtatgcctgtaccaagaatgttgacttggctattcagcaggggaaacaaaaaccttctggcctcacccgttccacatcaatgcttatttcttctggtcacaataaatcatctaatagtttaaaattaagtatttttacgcctaatgttatgatgatatcaaaacatgctgatggttctctgaatcagtggctggtcagttttgccgaggaatctgctttttctactgttctcagtatttcccacaaatccagatattgtggtcatcgttttcatcttaatgatttagcttgccactcagtattaccattattgctgacaacatcacaccataatgcattaaggacaccagatgttgataacccagagcaaccttttgatgctctaaatattgaagaatgctctttgacacaacaaaataaaagcactgttgacgtggcatttcaggatcccagtgcagtttacagtgagcttattctgtggagggttgacccagttgggccattgtctttttctggaggagtttctgagcttgcccggattaattctcttcatgtttctgccttttccaatgtggcatggctgcccactcttatacccagttattgtctgggtgcatactgcaactctcctagtgcatgctttgtagccagtgatggacaatatctgagattatatgaagcagttattgatgctaagaaacttttatctgagctttctaaccctgaaatttctaaatatgttggtgaagtctttaacatcgtcagtcaacaatcaacagccaggccaggatgcattattgcattagatcccattaccaaacttcatggcagaaaaacccaactgcttcatgtttttgaagaagacttcattttgaataaccttgagaagaaaagccttggcaaagacagcattttatctaatgcaggcagctcacctaatggattttctgagaagttctacctaattgtaatagaatgcactcaagacaaccgttcactgttacacatgtggaatttacatctaaagtcaattcctgtctcattagatgaaaaagtagatacaaaattatccgaagcggtttggcagccagaagaacattattcttcttctccagagaagatcctatctcctttttcacaaaagtatcaggcttgcagagcaaatctccagagtaccagcaggttgactctgttttcagaaatggtttatagccaagaattgcatttaccagaaggagttgagataataagtattaagccatcagcaggacatctgagttcatcttctatatatcctgcatgcagtgctccttatttattggcaacttcatgttcagatgagaaagtaagattctggagatgcagagtaacagatggagaatctgccacgtcaaagaatggaaaaattgatcttgcatacatttgggaagaatggccattacttattgaagatggacttcagagcaatagtagtataactgtacctggtaggcctgtagaagttagctgtgcacatacaaatcgtttagcagtagcttataagcagcctgcatctaatagtagatcttcccaggactttgtgatgcatgtaagtatttttgaatgtgagtcaacaggaggttcatgttgggtccttgagcagacaattcatttagatgagttaagcacagtattggattctggcattagtgttgatagcaatttagtggcctataataaacaagacatgtatttatctagtaaagagaatatcacatcaaacacaaagcatttagttcacttagattggatgtctagagaagacggttctcatatcctgactgtaggaattggatcaaaactttttatgtatggacccctggctggcaaggtacaagaccaaactggtaaggaaaccctggcatttcctctctgggagagtaccaaagttgtgcccctttctaaatttgtactattacgaagtgtggacctagtttcttctgtagatggctccccaccttttcctgtttctttatcgtgggtccgggatggcatccttgtggtaggaatggactgtgaaatgcatgtgtattgccaatggcaaccatcttctaaacaagaacctgttataacagattcgtacagtgggagcactccatctataacaagtttaataaaacagagtaactccagttctgggttacatcctccaaagaaaactctgactcgatccatgaccagtcttgcacagaaaatctgtggaaagaaaactgcattcgatccttcagtggatatggaagattcaggtctttttgaagcagctcatgtactttccccgactctacctcagtatcatcccttgcagcttttggaactcatggatcttggtaaagttcggagagccaaggccatcttgtcccatcttgttaagtgcattgctggggaagttgtggctctgaatgaagctgaatctaatcatgaacgccgccttaggtctctcacaatcagtgctagtggaagcactaccagagacccccaggcattcaacaaggctgaaaatacagattacacagaaatagattctgttcctccacttcctttatatgccttacttgcagcagatgatgatagctgttactcatctttggagaaatctagtaatgagagtacgttaagtaaatcaaaccaattatctaaagaaagttatgatgagctttttcagactcaacttctaatgactgatactcatatgttagagacagatgaagaaaatacaaagcctagagttattgacctttcacagtacagtccgacttactttggacctgagcatgctcaggttctttctggccacttacttcattctagtttaccaggactcagccggatggagcagatgtctttgatggccttagcagatacaattgcaactacaagcactgatattggagaaagccgagacagaagccaaggtggagaaactcttgatgaatgtgggttaaaatttcttttggctgttcgactccatacctttcttacaacttcccttccagcctatcgagctcaactccttcaccaaggcctgtctacaagtcattttgcttgggcatttcactcagtagcagaagaagaactgctgaacatgttgccagccatgcagaaagatgatcccacttggtctgaactaagagctatgggtgtggggtggtgggtccggaatacccgcatcttacgcaaatgcatagaaaaagtagctaaagcagccttttatagaaagaatgatcctttagatgctgccattttttaccttgcaatgaaaaagaaagctgtgatttggggattatatagagctgaaaaaaacaccaggatgacacagttttttggacacaattttgaggatgagaggtggcgtaaagcagctttaaagaatgctttttctttgctaggcaaacaaagatttgaacattctgcagcattttttcttttagctggttgcctcagagatgcaattgaggtatgtcttgagaaattgaatgacattcagttggctcttgtaatagcaagactctatgagtctgaatttgatacatctgcagcatataaatctattttacgtaaaaaagttttgggaatcgattctcctgtcagtgaactgtgttcattgaacataaatatgcatcatgatccttttcttcggagcatggcatattggattttggaagattatagtggtgctctggaaacattaataaagcaacctatcagagagaatgatgatcaagttttatcagccagtaatcctacagtttttaatttctacaattatctaagaacacatcctcttttgctgagacgtcattttggatcatctgatacattttccacacatatgagcctaacaggaaaaagtggactggcaggaacaattaatttaagtgaaagacgtttattttttaccactgccagtgctcatttaaaagctggctgcccaatgttggctttggaagtattatcaaagatgcctaaagtcatcaagaaaacaagacctttttatagggcttctagttttctggatactagtaaagactgttctccttcttctccattaaagttggatgcaagggaagataagtcttctgctgttgattggtcacagtcactgataaatggttttggatcttcttcagagggttcctcagagaagcaatcaaactccactctttcttttgactggagccaaccaagtgttgtgtttcaggatgactctttagagttaaaatgggacagtgataatgatgaagaaaatgaggatgtccctatttcaatgaaagaactaaaacctttacagagaaaaacagataaaaagttggatgacataagttctaactacacagaatctttcagcacactagatgaaaatgaccttttaaatccatcagaagatataattgcagttcagttaaaatttagagcatgtttaaagattctcacagtagaacttcgtactttatctactggctatgaaatagatggtggaaaattgcgttaccaactataccactggcttgaaaaagaggtgatagctcttcagaggacttgtgacttttgctcagatgctgaagaactacagtctgcatttggcagaaatgaagatgaatttggattaaatgaggatgctgaagatttgcctcaccaaacaaaagtgaaacaactgagagaaaattttcaggaaaaaagacagtggctcttgaagtatcagtcacttttgagaatgtttcttagttactgcatacttcatggatcccatggtgggggtcttgcatctgtaagaatggaattgattttgcttttgcaagaatctcagcaggaaacatcagaaccactattttctagccctctgtcagagcaaacctcagtgcctctcctctttgcttgtacagccaatgccaaaacagtagttgccaatccattattgcaccttagtaatctgacacatgatattctccatgccataataaactttgattcaccaccccaccctgatatccaaagcaataaagtgtatgtaatgcatactttagcagcttcactttctgcttgtatttatcagtgcctttgtggtagtcataactacagttcatttcagacgaatcagtttactggaatggtatatcagacagtactgcttcctcatcgaccttctttgaaaacaggaagcttagatgaagcattaactcccaatacgtcaccagctcaatggccaggaataacttgtctaattcgacttttgaattcttctggcgaggaagcccagtcagggcttacagtcttgctctgtgagattctcacagcagtgtatcttagtctcttcatccatggcctggccacacattcaagtaatgagctatttcggattgtggcccatcctctaaatgagaaaatgtggtctgctgtgtttggtggaggtgcacatgttcctagcaaagaacagacacattcaaaaactttacctgtttcttcactagttgaagaaggagaaaaacagaacaaacgttttaggccgtcaaaaatgtcttgcagagaatctgccccactgaccccttcctcggcaccagtaagccaggagtcactggcggttaaagaaaagttcatcccacctgagctcagtatctgggactatttcatagctaagccttttctaccctcttctcaaagtagagccgaatatgattcagaggagagtctgggaagtgatgatgatgacaatgatgatgatgatgatgttttagcatcagatttccatctccaggaacattctaattcaaattcatatagttggtccttgatgcggttggcgatggtgcaattggtgctcaacaatttgaagactttttatcccttcgcaggtcatgatcttgcagagcttccagttagttcacctctttgtcatgcggttctaaaaactcttcaatgttgggaacaagttcttctccgacgacttgaaatccatggtgggccacctcaaaattatatcgcaagtcataccgccgaagagagtttgtctgcaggtcctgcaattcttcgccacaaagctttactggaacctacaaacactcctttcaaatccaaacaccatctggcactgtctgtgaagaggctttggcagtatttggtgaagcaggaagaaattcaggaaacctttatcaaaaatatattcacaaagaaacggtgtctaaatgagtcattagaggacaacagtgaaaccatcaaaaattctatgatggaggagccaaacatcaataagatagaagcagatttgggatatcctggaggtaaagcaagaattattcataaggaatctgatatcattactgcgtttgctgttaataaggcaaatagaaactgcatagcaatcgcttccagtcatgatgttcaagaactggatgtttctggaattctggccacacaggtctacacttgggtagatgatgatatagaagtggaaaccaaaggatcagaagatttcttggttatacatgctcgtgatgatttaacagctgttcaaggtacaactccatatacacatagcaatcctggcactccaatcaacatgccatggcttggtagtacacagactggcagaggagcatctgtgatgattaagaaagccattaataatgttagaagaatgacttctcatccaactcttccttactatctgacaggagctcaagatggaagtgtcagaatgtttgaatggggccattctcaacaaataacctgttttcgatctggtggcaattcaagagttacaagaatgagatttaactatcagggaaataagtttggaatagttgatgctgatggatatttaagtttgtatcaaacaaactggaaatgttgtccagttactggaagcatgcctaagccatacctgacttggcagtgtcataacaaaacagccaatgattttgtcttcgttagttcctcctctctgatagctacagctggtctttcaactgacaatagaaacgtatgtttgtgggatactcttgtagcacctgccaatagtttagtccatgcatttacctgccatgacagtggagccacagttttagcatatgctccaaaacatcagctactaatatcaggtggcagaaaaggttttacatatgtatttgacctttgtcaacgacaacagaggcagcttttccagagccatgattctcctgttaaagccgttgctgttgatccaactgaagagtactttgttacaggatctgccgaaggcaatataaagatttggagtctctctacctttggtcttctccatacttttgtcagtgaacatgctcggcagtccatttttagaaatattggaactggagtgatgcaaattgagacagggcctgcaaatcacattttctcctgtggagctgatggaacaatgaaaatgagaatactgccagatcagtttagccctttaaatgaagtgttgaaaaatgatgtgaaatttatgctataacatttttacaataagatgtacaatttattacctatatggaagtggccaacagatataatatacagtgatcattctctatgccacaaattagctaatgctttcttgtttttatatttattttatggagctttgcccttgatgcactg

SEQ ID NO: 8596 - DNA, 10672 bp, Homo sapiens
  source 1..10672: mol_type = unassigned DNA
acaagcacccttgccctcccgcatttgtgcgccggtgcagcaggcagtgggaacatccgggcatttccgcagctgagcggcgacccgggcggcggcggcggtcgaggagctcccatggcagggacgaggcggagggaaggcgaaaggggggcgaggagttaagccagagcctccgcggggcgggtttccgagggaggcacagagggaaacggctctcgcagcccgaggagggtcaggcgcggagcttgtcgcacctcccgcgcattctgtccagcccgggctccggagatgcatctgcatcaggtcctcaccggagctgtcaaccctggagacaactgctactccgtgggcagcgtcggggatgtccccttcacggcatatggatcaggctgtgatattgttattttggcaaatgactttgaatgtgtacagatcattcctggtgctaagcatggaaacatccaagtcagctgtgtggagtgttctaaccaacaaggaagaattgcagcttcatatggtaatgctgtttgtatatttgagcccttgggcataaattctcataaaagaaattgtcaactcaagtgccagtggcttaaaactgggcagttttttttgagttctgtgacatacaacttagcatgggatcctcaagataatagattgttgacagcaactgattctattcagttgtgggctcctccaggagatgatattctggaagaggaggaagaaattgataatacagttcctcctgttttaaatgattggaagtgtgtctggcagtgcaaaacctcagtatctgtacatttgatggaatggtctcctgatggtgaatattttgctactgctggaaaggatgattgtcttttgaaagtgtggtatcctatgactggttggaagtcttcaattatacctcaggatcatcatgaagtaaaaaggagacagtcctctactcaattttcttttgtttacttggcacatccccgagctgtgacaggtttttcgtggcgcaaaactagcaagtatatgcccaggggttctgtctgtaatgtgttgttaacttcatgtcatgatggtgtgtgccggctctgggcagaaactttattaccagaagactgtcttttgggtgagcagatttgtgagactaccacttccagcattgccagcagcctttctcatgctggaagacacaaagacagaatacagcatgctcttgagacaatacaccatttgaaaaatttaaggaaaggacagaggaggtcatctgttcttgtaactcatgctgaattaatgcccgaccagacagcaatgcatgaagttcaaagacacatttcccaccatgcaaatgcactctgtcattttcatattgcagcaagcatcaaccctgccacagatattccaaatgtcttggttggcactgcatttaatgttgatgatggaaatgggggctttgtagttcattggttaaacaacaaggaatttcattttacatcatctacagaagtatttatgcatcaattacgaaaactttctgataagcaggtagatcatgaaaatgatgatgcagatagagaagatgaggaacattcacaggaggatagagaacggggtttacatatgaaattagaccatgatttatccctggatagagaatctgaggcaggtacaggatcatcagaacatgaagatggagaaagagaaggaagtcctagaacttactcacgacttagtgtaccaatgccactgcctacggttctgcttgatcggaagattgaaacgctgctaactgaatggaataagaatcctgatatgctttttacaatacaccctgtagatggtacctttctagtgtggcatgtgaagtatttggatgaatataatcctggaatatttagacaagttcaggtttctttttcttctcggattcctgttgcatttccctctggtgatgcaagctctcttagtaaaaatatcatgatgtatgcctgtataaatgcgacaaaagattctcaccacacgctgttacaccaggaggggatgtctgtaggcagtcctcacggatcacagccacactctagatcccacagtacacatatgaacatcttagctcccacagtaatgatgatctctaaacacatagatggttctttaaatcagtgggcagtcacttttgctgataagtctgcctttaccactgttctaactgtatctcacaaatttagatattgcggtcatcgatttcacctcaatgacctggcatgtcattcagttttaccactgttattgacatcctctcatcataatgctctattgactcctgaattagattgtcagtgggactcagacaataaattaagtagattaatggaccctgtaaaacatataaaaggttcctcgaaacaacctcttagaaatgcagcaactcgtacatttcatgacccaaatgcaatctacagtgaacttattctgtggcgtgtagacccaataggacctttgtcatacactggaggagtatcagaattggctcgaattaactctttacatacctcagcgttctctaatgtggcttggcttccaactctcattcccagttactgtctaggcacatactgcaattctgcaagtgcttgctttgttgcttctgatggcaaaaatctgagactctatcaagctgtagtggatgcaaggaaattattagatgaattgtcagacccagaatcttcaaaacttattggagaagtgtttaatattgtgagccaacagtctactgctcgacctggctgcattattgaactcgacgcaataaccaaccaatgtggctcaaatacacagttgcttcatgtgtttcaagaagacttcattataggatataaaccacataaggaagatatggagaaaaaggaaacagaaatattttttcagccatcacaaggataccgcccaccaccattttcagaaaagttctttctagtagtaattgagaaggacagcaataataactctattctgcatatgtggcaccttcatcttaaatctgtacaagcatgtttagctaaagcttcagaaggggcttcctctgagagtctactttcagtccctggacagaagaacgtagattcttctccagaaacctctcctagtgtgagccccatgccacattcttcatcaattgccaatcttcaaactgccagtaaacttattctgagttctagactggtgtatagccaaccccttgatctcccagaatcagttgaagtaataagagcaacgccttcagcaggccatctgagttcttcttcaatttatccagtgtgccttgcaccttatttagtggttacaacttgttctgacaataaagtacgcttctggaaatgttgtatggaagccaacccagagtgtaataaaagtgatgagaaagaaatttatcattggaagagatggcctttgatgaatgatgaaggagaagataatagcagtacagtgagcattgtgggaagaccagttgctgttagctgttcatacacaggtcgccttgcagtggcttataagcagcctatccaccataatggttttgtttctaaagaattttccatgcatgtttgtatatttgaatgtgaatctacaggaggatcagagtgggttttagaacaaacaattcatcttgatgatttggttaaggttgggagtgtacttgattcaagggtcagcgtcgacagtaatctgtttgtgtatagcaagtcagatgcactcttgagcaaggatagatatcttattccgaatatcaaacatttagtacatttggactgggtatcaaaagaagatggctcccacattcttacagtgggagtcggtgcgaatatcttcatgtatggaaggctttcaggaattgtgactgagcaaaccaacagtaaggatggagtagctgtcatcactttaccactaggtggtagtatcaagcaaggagttaagtcaagatgggttcttcttagatctatagacttggtatcttctgttgatggtactccttcactgcctgtttctctctcttgggtaagagatgggatattggtggtaggaatggattgtgaaatgcatgtatatgcacagtggaagcatgctgtcaaatttggagacactgaagctgatagttctaatgcagaagaggcagcaatgcaagatcattcgacctttaaatctaatatgctggcaagaaaaagtgttgttgaaggaacagctatttctgatgatgttttttgttcaccaactgtaattcaagatggtggcttatttgaggctgcacatgtactttcccctactcttccacaatatcatccaactcagctgttagaattgatggatttagggaaagtgcgaagggctaaagccattctctctcatttagtaaaatgtattgcaggtgaagtagcaatagttagagatcctgatgctggagaaggaactaagcgacatctctctcgaactattagtgtaagtggcagtacagcaaaggaaacagtcaccgtaggaaaagatggtactcgagattatactgagatagattctatccctccactaccactatatgcattacttgctgcagatcaagatacatcctacagaatttcagaagaaagtacaaagataccacagagctatgaagatcagacagtaagtcaaccagaggatcagtattcagagctgtttcaaatccaggatataccaacggatgatattgatttagagcctgaaaagagagaaaacaaatcaaaagtaataaatctttctcaatatggaccagcttactttggccaagaacatgcaagggtactttcaagtcatcttatgcactcaagtctaccaggccttacccgtttggagcagatgttccttgtagctttggctgatacagtggctactactagtactgagcttgatgaaagcagagataagagttgctcaggaagagatacattagatgagtgtggtttgagatacttgttagctatgcgcctacacacatgccttttgacatcgctgcctcctttataccgagtgcagctacttcatcaaggtgtctctacatgccattttgcctgggcttttcattctgaggctgaagaagaactgattaatatgattccagcaattcagagaggggacccccagtggtctgaattaagagctatgggcataggatggtgggtgaggaacattaacacgcttcgaagatgcattgaaaaggttgccaaagcttcttttcaaaggaacaatgatgccttagatgctgcactattctacctttcaatgaagaagaaagcagtagtgtggggtctgtttaggtcacagcatgatgaaaaaatgacaacatttttcagccacaactttaatgaagatagatggcgaaaagctgctttgaaaaatgctttttccttacttggaaaacaacgctttgaacaatcggctgcttttttcttgctagctggttcattgaaagatgccatagaggtatgtcttgaaaaaatggaagatattcagctagccatggttattgcccgtttatatgaatctgaatttgagacttcatccacttatatatccatcctaaatcagaagattttgggttgccaaaaggatggctcaggattcagttgcaaaagattacatcctgatcctttcctgcgtagtcttgcctattgggtaatgaaagattacacccgagccttggacacattactggaacaaacaccaaaggaggatgatgaacatcaagttatcatcaagtcttgtaacccggtggcatttagtttttataactaccttcgaactcatcctttgctcattcgaagaaatcttgcctcccctgaaggaactttggcaaccttaggtctcaaaactgagaagaactttgttgataaaattaacctcatagaaagaaaattattctttaccactgcaaatgctcattttaaagttggatgccctgttttagccttggaggtactctccaaaattccaaaagtaaccaaaacatctgccttatctgcaaaaaaagatcagcctgacttcatttctcacaggatggatgatgtaccttcacattcaaaagctctgagtgatggcaatggaagttctggcattgaatggtcaaatgtaacttcatcacagtatgactggagtcagccaatagtaaaagttgatgaggaacctcttaatcttgattggggtgaagatcacgacagtgccttagatgaagaggaagacgatgctgttggtttagtgatgaaaagtacagatgccagggaaaaagataaacaatcagatcagaaggcctcagaccctaacatgttattaacacctcaggaagaggatgatcctgaaggtgatactgaagttgatgtgattgctgaacaactaaaattcagagcttgtttaaagatccttatgactgaattaagaacattggctacaggttatgaagtagatggaggaaaactcagatttcaactctataactggcttgaaaaggaaattgctgccttgcatgagatatgtaatcatgaatcagttattaaagagtattccagtaagacatattccaaagtagagagtgatctgctggatcaggaagaaatggtagacaaaccagatattggttcctatgagcgccatcaaatagaaagaagaagattgcaggccaaacgagagcatgcagaaagacgaaagtcgtggttgcagaaaaaccaagatctcctgagagtatttctcagctactgtagccttcatggggcccaaggtggtggtttggcttcagtaaggatggaactcaaatttttgctacaagaatcacaacaggaaactacagtaaagcagctccagtctccactaccactgcctaccaccctacctctgctttcagcaagtattgcgtcaacaaaaacagtcatagctaatcctgtattgtacttaaataatcacatccatgatatactttatactattgttcagatgaaaacaccacctcatcccagtattgaagatgtgaaggtgcacacacttcattcactagcagcatcactttctgcatcaatttaccaagcattatgtgacagtcatagctacagtcaaacagaaggaaatcagtttacaggaatggcttatcaaggacttcttttaagtgatcgtagaagactaaggacagaaagcattgaagaacacgcaacaccaaattcatctcctgctcaatggcctggtgtgagctcacttattaatcttttgagttcagcccaagatgaagaccagccaaaactgaacattttgctatgtgaagctgttgttgctgtttacttaagtttattgatacatgctcttgccacaaattcctccagtgaattatttcggcttgcagcccacccattaaataatcgaatgtgggctgctgtttttggaggcggtgtaaaacttgttgtgaaacctcgaagacaatcagaaaatatttcagcacctcctgtcctttctgaagacatagataaacaccgtaggagatttaacatgagaatgctcgtccctggaaggcctgtaaaagatgctaccccaccaccggtgcctgcagaaagaccatcttacaaagaaaaatttattcctcccgaacttagtatgtgggattattttgttgcaaagccatttcttcctttgtctgatagtggtgttatatatgattctgatgaaagcattcatagtgatgaagaagatgatgcctttttttcagatacacaaatacaggagcaccaagatccaaattcctatagctgggctcttctacatttgacaatggttaaactagcacttcacaatgtcaagaatttctttcctattgctggactggaattctctgagctgcctgtaacatcaccattaggtattgctgtgattaaaaacttggagaactgggaacagatcttgcaagagaaaatggatcagtttgaaggtccaccccctaactatatcaacacatatccaactgacctttcagtgggagctggaccagctattcttcgaaataaagcaatgctagaacctgaaaataccccattcaagtcccgggattcttctgcatttccagtcaaacgactttggcatttccttgttaaacaagaggtccttcaagagacatttattagatatattttcactaagaaaagaaagcagagtgaggttgaagctgatctgggctatccaggtggaaaggcgaaagtcatccataaggaatctgatatgatcatggcattttctgttaataaggcaaattgtaatgaaattgttttggcttcaacacatgatgttcaagaacttgatgttacttctctactggcctgtcagtcatacatatggatcggagaagaatatgacagagaatccaaaagttcagatgatgttgattatcgtggttccactacaactctttatcaacccagtgcaacatcctattcagcaagtcaggtgcatccaccttcatctctgccatggctgggcactggacagactagcactggagctagtgtgcttatgaaaaggaatctacataatgttaagagaatgacttcacacccagtccatcaatactatcttacaggtgctcaggacggcagtgtacgaatgtttgaatggacgcggcctcagcaacttgtctgctttcgtcaagctggcaatgcaagagttactagattatattttaattcacaaggcaacaagtgtggtgttgcggatggagagggttttctgagtatctggcaagttaaccaaactgcatcaaatcctaaaccttatatgagttggcagtgccacagtaaagccacaagtgactttgcatttattacctcttcaagtctagttgccacatctggacactccaatgacaatagaaatgtttgcctctgggacacattaatatcacccggaaacagcctcattcatggtttcacgtgccacgatcatggtgccacggtactgcagtatgcacccaaacagcaactcctaatctcggggggtaggaaaggacacgtctgcatttttgacatcaggcaaaggcagctcattcacacgttccaggcccatgactcagctattaaggctctggccttggatccctatgaggaatattttaccacaggttcagcagaaggtaacataaaggtttggagattgacaggccatggcctaattcattcatttaaaagtgaacatgctaagcagtccatatttcgaaacattggggctggagtcatgcagattgacatcatccagggcaatcggctcttctcctgtggtgcagatggcacgctgaaaaccagggttttgcccaatgcttttaacatccctaacagaattcttgacattctataaagattggggttttatttttatatacatttcagttaaaaggcacactacagtcatcactaggcaattctgctttctaagcagttgtattgaaaacagagaatctctgtgtagaatttgaatatgacccaagctgagtattatctaaacaggttggtggaatgaatgcgcatgtaccttattatgctgacatactaaaaaaaataaaacctagtattgtatgaaggatagctattctttacagcatttagcaaacctgattcagaaaacatttgagattagcaaattagtaacttgaaataatgaaaaggacgtttataccaaattaaggaagaaaatgttgctgatttgggtttttcttcctgttcttaccactgactgaagcatgcctgcagtctcctcctctgttgaatgaaggataatcataaggtgtttgttaggagcgctagaccacctggaaaactttcttagctgtggagcagtgcgcagtgaccagttctctgctgtgagaggccgtttccattctttcctgctgaatatttttcctgttagtgtttatactgagctagtactgtaacttgcaaatgagtgcaaatttaaatgcaatgttttactcacaatttgcacattcacattttttggactgctagtttttctatttaaatatttgccttcatgttaggaatgtactatgtgaacatgacatatttgtagttaaccaaacacaccttcttagtccagtttagtactttttcttttcgtgtattcaaggttaaacacccaaacatttaaggatatgttgaaactacaccaatagagcatttcatatcataattaaaatgaatgttaggcttcttgtggccagttaatagttgatgagattggtgacattatttattgccacagcctattgtataaactatgcagagttaaatatttgcttgtaaaatattagccaatgttgtcattattttgatgtatttccttggttatgaccaaaaatatgttgagatactgaaactaatgtctgtgtgtttaaatgtttaccagcaaattgtcttatcatgttaatgagaatgttcaatgcctgtgtggtaaatagtaaatacaatggcataaaagtaactttctctgaagatgtgatgttcaggctgtgaaatatatatgtaaaagaaaaataaatgttatttgttagagtttttagtttgatactgtttttgaccattgagatttttaatttgataaaatgtttaactgttagagaatttgcaagcta

SEQ ID NO: 8597 - DNA, 10659 bp, Homo sapiens
  source 1..10659: mol_type = unassigned DNA
tttccgcagctgagcggcgacccgggcggcggcggcggtcgaggagctcccatggcagggacgaggcggagggaaggcgaaaggggggcgaggagttaagccagagcctccgcggggcgggtttccgagggaggcacagagggaaacggctctcgcagcccgaggagggtcaggcgcggagcttgtcgcacctcccgcgcattctgtccagcccgggctccggagatgcatctgcatcaggtcctcaccggagctgtcaaccctggagacaactgctactccgtgggcagcgtcggggatgtccccttcacggcatatggatcaggctgtgatattgttattttggcaaatgactttgaatgtgtacagatcattcctggtgctaagcatggaaacatccaagtcagctgtgtggagtgttctaaccaacaaggaagaattgcagcttcatatggtaatgctgtttgtatatttgagcccttgggcataaattctcataaaagaaattgtcaactcaagtgccagtggcttaaaactgggcagttttttttgagttctgtgacatacaacttagcatgggatcctcaagataatagattgttgacagcaactgattctattcagttgtgggctcctccaggagatgatattctggaagaggaggaagaaattgataatacagttcctcctgttttaaatgattggaagtgtgtctggcagtgcaaaacctcagtatctgtacatttgatggaatggtctcctgatggtgaatattttgctactgctggaaaggatgattgtcttttgaaagtgtggtatcctatgactggttggaagtcttcaattatacctcaggatcatcatgaagtaaaaaggagacagtcctctactcaattttcttttgtttacttggcacatccccgagctgtgacaggtttttcgtggcgcaaaactagcaagtatatgcccaggggttctgtctgtaatgtgttgttaacttcatgtcatgatggtgtgtgccggctctgggcagaaactttattaccagaagactgtcttttgggtgagcagatttgtgagactaccacttccagcattgccagcagcctttctcatgctggaagacacaaagacagaatacagcatgctcttgagacaatacaccatttgaaaaatttaaggaaaggacagaggaggtcatctgttcttgtaactcatgctgaattaatgcccgaccagacagcaatgcatgaagttcaaagacacatttcccaccatgcaaatgcactctgtcattttcatattgcagcaagcatcaaccctgccacagatattccaaatgtcttggttggcactgcatttaatgttgatgatggaaatgggggctttgtagttcattggttaaacaacaaggaatttcattttacatcatctacagaagtatttatgcatcaattacgaaaactttctgataagcaggtagatcatgaaaatgatgatgcagatagagaagatgaggaacattcacaggaggatagagaacggggtttacatatgaaattagaccatgatttatccctggatagagaatctgaggcaggtacaggatcatcagaacatgaagatggagaaagagaaggaagtcctagaacttactcacgacttagtgtaccaatgccactgcctacggttctgcttgatcggaagattgaaacgctgctaactgaatggaataagaatcctgatatgctttttacaatacaccctgtagatggtacctttctagtgtggcatgtgaagtatttggatgaatataatcctggaatatttagacaagttcaggtttctttttcttctcggattcctgttgcatttccctctggtgatgcaagctctcttagtaaaaatatcatgatgtatgcctgtataaatgcgacaaaagattctcaccacacgctgttacaccaggaggggatgtctgtaggcagtcctcacggatcacagccacactctagatcccacagtacacatatgaacatcttagctcccacagtaatgatgatctctaaacacatagatggttctttaaatcagtgggcagtcacttttgctgataagtctgcctttaccactgttctaactgtatctcacaaatttagatattgcggtcatcgatttcacctcaatgacctggcatgtcattcagttttaccactgttattgacatcctctcatcataatgctctattgactcctgaattagattgtcagtgggactcagacaataaattaagtagattaatggaccctgtaaaacatataaaaggttcctcgaaacaacctcttagaaatgcagcaactcgtacatttcatgacccaaatgcaatctacagtgaacttattctgtggcgtgtagacccaataggacctttgtcatacactggaggagtatcagaattggctcgaattaactctttacatacctcagcgttctctaatgtggcttggcttccaactctcattcccagttactgtctaggcacatactgcaattctgcaagtgcttgctttgttgcttctgatggcaaaaatctgagactctatcaagctgtagtggatgcaaggaaattattagatgaattgtcagacccagaatcttcaaaacttattggagaagtgtttaatattgtgagccaacagtctactgctcgacctggctgcattattgaactcgacgcaataaccaaccaatgtggctcaaatacacagttgcttcatgtgtttcaagaagacttcattataggatataaaccacataaggaagatatggagaaaaaggaaacagaaatattttttcagccatcacaaggataccgcccaccaccattttcagaaaagttctttctagtagtaattgagaaggacagcaataataactctattctgcatatgtggcaccttcatcttaaatctgtacaagcatgtttagctaaagcttcagaaggggcttcctctgagagtctactttcagtccctggacagaagaacgtagattcttctccagaaacctctcctagtgtgagccccatgccacattcttcatcaattgccaatcttcaaactgccagtaaacttattctgagttctagactggtgtatagccaaccccttgatctcccagaatcagttgaagtaataagagcaacgccttcagcaggccatctgagttcttcttcaatttatccagtgtgccttgcaccttatttagtggttacaacttgttctgacaataaagtacgcttctggaaatgttgtatggaagccaacccagagtgtaataaaagtgatgagaaagaaatttatcattggaagagatggcctttgatgaatgatgaaggagaagataatagcagtacagtgagcattgtgggaagaccagttgctgttagctgttcatacacaggtcgccttgcagtggcttataagcagcctatccaccataatggttttgtttctaaagaattttccatgcatgtttgtatatttgaatgtgaatctacaggaggatcagagtgggttttagaacaaacaattcatcttgatgatttggttaaggttgggagtgtacttgattcaagggtcagcgtcgacagtaatctgtttgtgtatagcaagtcagatgcactcttgagcaaggatagatatcttattccgaatatcaaacatttagtacatttggactgggtatcaaaagaagatggctcccacattcttacagtgggagtcggtgcgaatatcttcatgtatggaaggctttcaggaattgtgactgagcaaaccaacagtaaggatggagtagctgtcatcactttaccactaggtggtagtatcaagcaaggagttaagtcaagatgggttcttcttagatctatagacttggtatcttctgttgatggtactccttcactgcctgtttctctctcttgggtaagagatgggatattggtggtaggaatggattgtgaaatgcatgtatatgcacagtggaagcatgctgtcaaatttggagacactgaagctgatagttctaatgcagaagaggcagcaatgcaagatcattcgacctttaaatctaatatgctggcaagaaaaagtgttgttgaaggaacagctatttctgatgatgttttttgttcaccaactgtaattcaagatggtggcttatttgaggctgcacatgtactttcccctactcttccacaatatcatccaactcagctgttagaattgatggatttagggaaagtgcgaagggctaaagccattctctctcatttagtaaaatgtattgcaggtgaagtagcaatagttagagatcctgatgctggagaaggaactaagcgacatctctctcgaactattagtgtaagtggcagtacagcaaaggaaacagtcaccgtaggaaaagatggtactcgagattatactgagatagattctatccctccactaccactatatgcattacttgctgcagatcaagatacatcctacagaatttcagaagaaagtacaaagataccacagagctatgaagatcagacagtaagtcaaccagaggatcagtattcagagctgtttcaaatccaggatataccaacggatgatattgatttagagcctgaaaagagagaaaacaaatcaaaagtaataaatctttctcaatatggaccagcttactttggccaagaacatgcaagggtactttcaagtcatcttatgcactcaagtctaccaggccttacccgtttggagcagatgttccttgtagctttggctgatacagtggctactactagtactgagcttgatgaaagcagagataagagttgctcaggaagagatacattagatgagtgtggtttgagatacttgttagctatgcgcctacacacatgccttttgacatcgctgcctcctttataccgagtgcagctacttcatcaaggtgtctctacatgccattttgcctgggcttttcattctgaggctgaagaagaactgattaatatgattccagcaattcagagaggggacccccagtggtctgaattaagagctatgggcataggatggtgggtgaggaacattaacacgcttcgaagatgcattgaaaaggttgccaaagcttcttttcaaaggaacaatgatgccttagatgctgcactattctacctttcaatgaagaagaaagcagtagtgtggggtctgtttaggtcacagcatgatgaaaaaatgacaacatttttcagccacaactttaatgaagatagatggcgaaaagctgctttgaaaaatgctttttccttacttggaaaacaacgctttgaacaatcggctgcttttttcttgctagctggttcattgaaagatgccatagaggtatgtcttgaaaaaatggaagatattcagctagccatggttattgcccgtttatatgaatctgaatttgagacttcatccacttatatatccatcctaaatcagaagattttgggttgccaaaaggatggctcaggattcagttgcaaaagattacatcctgatcctttcctgcgtagtcttgcctattgggtaatgaaagattacacccgagccttggacacattactggaacaaacaccaaaggaggatgatgaacatcaagttatcatcaagtcttgtaacccggtggcatttagtttttataactaccttcgaactcatcctttgctcattcgaagaaatcttgcctcccctgaaggaactttggcaaccttaggtctcaaaactgagaagaactttgttgataaaattaacctcatagaaagaaaattattctttaccactgcaaatgctcattttaaagttggatgccctgttttagccttggaggtactctccaaaattccaaaagtaaccaaaacatctgccttatctgcaaaaaaagatcagcctgacttcatttctcacaggatggatgatgtaccttcacattcaaaagctctgagtgatggcaatggaagttctggcattgaatggtcaaatgtaacttcatcacagtatgactggagtcagccaatagtaaaagttgatgaggaacctcttaatcttgattggggtgaagatcacgacagtgccttagatgaagaggaagacgatgctgttggtttagtgatgaaaagtacagatgccagggaaaaagataaacaatcagatcagaaggcctcagaccctaacatgttattaacacctcaggaagaggatgatcctgaaggtgatactgaagttgatgtgattgctgaacaactaaaattcagagcttgtttaaagatccttatgactgaattaagaacattggctacaggttatgaagtagatggaggaaaactcagatttcaactctataactggcttgaaaaggaaattgctgccttgcatgagatatgtaatcatgaatcagttattaaagagtattccagtaagacatattccaaagtagagagtgatctgctggatcaggaagaaatggtagacaaaccagatattggttcctatgagcgccatcaaatagaaagaagaagattgcaggccaaacgagagcatgcagaaagacgaaagtcgtggttgcagaaaaaccaagatctcctgagagtatttctcagctactgtagccttcatggggcccaaggtggtggtttggcttcagtaaggatggaactcaaatttttgctacaagaatcacaacaggaaactacagtaaagcagctccagtctccactaccactgcctaccaccctacctctgctttcagcaagtattgcgtcaacaaaaacagtcatagctaatcctgtattgtacttaaataatcacatccatgatatactttatactattgttcagatgaaaacaccacctcatcccagtattgaagatgtgaaggtgcacacacttcattcactagcagcatcactttctgcatcaatttaccaagcattatgtgacagtcatagctacagtcaaacagaaggaaatcagtttacaggaatggcttatcaaggacttcttttaagtgatcgtagaagactaaggacagaaagcattgaagaacacgcaacaccaaattcatctcctgctcaatggcctggtgtgagctcacttattaatcttttgagttcagcccaagatgaagaccagccaaaactgaacattttgctatgtgaagctgttgttgctgtttacttaagtttattgatacatgctcttgccacaaattcctccagtgaattatttcggcttgcagcccacccattaaataatcgaatgtgggctgctgtttttggaggcggtgtaaaacttgttgtgaaacctcgaagacaatcagaaaatatttcagcacctcctgtcctttctgaagacatagataaacaccgtaggagatttaacatgagaatgctcgtccctggaaggcctgtaaaagatgctaccccaccaccggtgcctgcagaaagaccatcttacaaagaaaaatttattcctcccgaacttagtatgtgggattattttgttgcaaagccatttcttcctttgtctgatagtggtgttatatatgattctgatgaaagcattcatagtgatgaagaagatgatgcctttttttcagatacacaaatacaggagcaccaagatccaaattcctatagctgggctcttctacatttgacaatggttaaactagcacttcacaatgtcaagaatttctttcctattgctggactggaattctctgagctgcctgtaacatcaccattaggtattgctgtgattaaaaacttggagaactgggaacagatcttgcaagagaaaatggatcagtttgaaggtccaccccctaactatatcaacacatatccaactgacctttcagtgggagctggaccagctattcttcgaaataaagcaatgctagaacctgaaaataccccattcaagtcccgggattcttctgcatttccagtcaaacgactttggcatttccttgttaaacaagaggtccttcaagagacatttattagatatattttcactaagaaaagaaagcagagtgagtctatagaagaacatgtggagcaggtcaaccaaaactgcatagcagaagattgccacatcaaggttgaagctgatctgggctatccaggtggaaaggcgaaagtcatccataaggaatctgatatgatcatggcattttctgttaataaggcaaattgtaatgaaattgttttggcttcaacacatgatgttcaagaacttgatgttacttctctactggcctgtcagtcatacatatggatcggagaagaatatgacagagaatccaaaagttcagatgatgttgattatcgtggttccactacaactctttatcaacccagtgcaacatcctattcagcaagtcaggtgcatccaccttcatctctgccatggctgggcactggacagactagcactggagctagtgtgcttatgaaaaggaatctacataatgttaagagaatgacttcacacccagtccatcaatactatcttacaggtgctcaggacggcagtgtacgaatgtttgaatggacgcggcctcagcaacttgtctgctttcgtcaagctggcaatgcaagagttactagattatattttaattcacaaggcaacaagtgtggtgttgcggatggagagggttttctgagtatctggcaagttaaccaaactgcatcaaatcctaaaccttatatgagttggcagtgccacagtaaagccacaagtgactttgcatttattacctcttcaagtctagttgccacatctggacactccaatgacaatagaaatgtttgcctctgggacacattaatatcacccggaaacagcctcattcatggtttcacgtgccacgatcatggtgccacggtactgcagtatgcacccaaacagcaactcctaatctcggggggtaggaaaggacacgtctgcatttttgacatcaggcaaaggcagctcattcacacgttccaggcccatgactcagctattaaggctctggccttggatccctatgaggaatattttaccacaggttcagcagaaggtaacataaaggtttggagattgacaggccatggcctaattcattcatttaaaagtgaacatgctaagcagtccatatttcgaaacattggggctggagtcatgcagattgacatcatccagggcaatcggctcttctcctgtggtgcagatggcacgctgaaaaccagggttttgcccaatgcttttaacatccctaacagaattcttgacattctataaagattggggttttatttttatatacatttcagttaaaaggcacactacagtcatcactaggcaattctgctttctaagcagttgtattgaaaacagagaatctctgtgtagaatttgaatatgacccaagctgagtattatctaaacaggttggtggaatgaatgcgcatgtaccttattatgctgacatactaaaaaaaataaaacctagtattgtatgaaggatagctattctttacagcatttagcaaacctgattcagaaaacatttgagattagcaaattagtaacttgaaataatgaaaaggacgtttataccaaattaaggaagaaaatgttgctgatttgggtttttcttcctgttcttaccactgactgaagcatgcctgcagtctcctcctctgttgaatgaaggataatcataaggtgtttgttaggagcgctagaccacctggaaaactttcttagctgtggagcagtgcgcagtgaccagttctctgctgtgagaggccgtttccattctttcctgctgaatatttttcctgttagtgtttatactgagctagtactgtaacttgcaaatgagtgcaaatttaaatgcaatgttttactcacaatttgcacattcacattttttggactgctagtttttctatttaaatatttgccttcatgttaggaatgtactatgtgaacatgacatatttgtagttaaccaaacacaccttcttagtccagtttagtactttttcttttcgtgtattcaaggttaaacacccaaacatttaaggatatgttgaaactacaccaatagagcatttcatatcataattaaaatgaatgttaggcttcttgtggccagttaatagttgatgagattggtgacattatttattgccacagcctattgtataaactatgcagagttaaatatttgcttgtaaaatattagccaatgttgtcattattttgatgtatttccttggttatgaccaaaaatatgttgagatactgaaactaatgtctgtgtgtttaaatgtttaccagcaaattgtcttatcatgttaatgagaatgttcaatgcctgtgtggtaaatagtaaatacaatggcataaaagtaactttctctgaagatgtgatgttcaggctgtgaaatatatatgtaaaagaaaaataaatgttatttgttagagtttttagtttgatactgtttttgaccattgagatttttaatttgataaaatgtttaactgttagag

SEQ ID NO: 8598 - DNA, 7465 bp, Homo sapiens
  source 1..7465: mol_type = unassigned DNA
acagagggaaacggctctcgcagcccgaggagggtcaggcgcggagcttgtcgcacctcccgcgcattctgtccagcccgggctccggagatgcatctgcatcaggtcctcaccggagctgtcaaccctggagacaactgctactccgtgggcagcgtcggggatgtccccttcacggcatatggatcaggctgtgatattgttattttggcaaatgactttgaatgtgtacagatcattcctggtgctaagcatggaaacatccaagtcagctgtgtggagtgttctaaccaacaaggaagaattgcagcttcatatggtaatgctgtttgtatatttgagcccttgggcataaattctcataaaagaaattgtcaactcaagtgccagtggcttaaaactgggcagttttttttgagttctgtgacatacaacttagcatgggatcctcaagataatagattgttgacagcaactgattctattcagttgtgggctcctccaggagatgatattctggaagaggaggaagaaattgataatacagttcctcctgttttaaatgattggaagtgtgtctggcagtgcaaaacctcagtatctgtacatttgatggaatggtctcctgatggtgaatattttgctactgctggaaaggatgattgtcttttgaaagtgtggtatcctatgactggttggaagtcttcaattatacctcaggatcatcatgaagtaaaaaggagacagtcctctactcaattttcttttgtttacttggcacatccccgagctgtgacaggtttttcgtggcgcaaaactagcaagtatatgcccaggggttctgtctgtaatgtgttgttaacttcatgtcatgatggtgtgtgccggctctgggcagaaactttattaccagaagactgtcttttgggtgagcagatttgtgagactaccacttccagcattgccagcagcctttctcatgctggaagacacaaagacagaatacagcatgctcttgagacaatacaccatttgaaaaatttaaggaaaggacagaggaggtcatctgttcttgtaactcatgctgaattaatgcccgaccagacagcaatgcatgaagttcaaagacacatttcccaccatgcaaatgcactctgtcattttcatattgcagcaagcatcaaccctgccacagatattccaaatgtcttggttggcactgcatttaatgttgatgatggaaatgggggctttgtagttcattggttaaacaacaaggaatttcattttacatcatctacagaagtatttatgcatcaattacgaaaactttctgataagcaggtagatcatgaaaatgatgatgcagatagagaagatgaggaacattcacaggaggatagagaacggggtttacatatgaaattagaccatgatttatccctggatagagaatctgaggcaggtacaggatcatcagaacatgaagatggagaaagagaaggaagtcctagaacttactcacgacttagtgtaccaatgccactgcctacggttctgcttgatcggaagattgaaacgctgctaactgaatggaataagaatcctgatatgctttttacaatacaccctgtagatggtacctttctagtgtggcatgtgaagtatttggatgaatataatcctggaatatttagacaagttcaggtttctttttcttctcggattcctgttgcatttccctctggtgatgcaagctctcttagtaaaaatatcatgatgtatgcctgtataaatgcgacaaaagattctcaccacacgctgttacaccaggaggggatgtctgtaggcagtcctcacggatcacagccacactctagatcccacagtacacatatgaacatcttagctcccacagtaatgatgatctctaaacacatagatggttctttaaatcagtgggcagtcacttttgctgataagtctgcctttaccactgttctaactgtatctcacaaatttagatattgcggtcatcgatttcacctcaatgacctggcatgtcattcagttttaccactgttattgacatcctctcatcataatgctctattgactcctgaattagattgtcagtgggactcagacaataaattaagtagattaatggaccctgtaaaacatataaaaggttcctcgaaacaacctcttagaaatgcagcaactcgtacatttcatgacccaaatgcaatctacagtgaacttattctgtggcgtgtagacccaataggacctttgtcatacactggaggagtatcagaattggctcgaattaactctttacatacctcagcgttctctaatgtggcttggcttccaactctcattcccagttactgtctaggcacatactgcaattctgcaagtgcttgctttgttgcttctgatggcaaaaatctgagactctatcaagctgtagtggatgcaaggaaattattagatgaattgtcagacccagaatcttcaaaacttattggagaagtgtttaatattgtgagccaacagtctactgctcgacctggctgcattattgaactcgacgcaataaccaaccaatgtggctcaaatacacagttgcttcatgtgtttcaagaagacttcattataggatataaaccacataaggaagatatggagaaaaaggaaacagaaatattttttcagccatcacaaggataccgcccaccaccattttcagaaaagttctttctagtagtaattgagaaggacagcaataataactctattctgcatatgtggcaccttcatcttaaatctgtacaagcatgtttaggaagagatacattagatgagtgtggtttgagatacttgttagctatgcgcctacacacatgccttttgacatcgctgcctcctttataccgagtgcagctacttcatcaaggtgtctctacatgccattttgcctgggcttttcattctgaggctgaagaagaactgattaatatgattccagcaattcagagaggggacccccagtggtctgaattaagagctatgggcataggatggtgggtgaggaacattaacacgcttcgaagatgcattgaaaaggttgccaaagcttcttttcaaaggaacaatgatgccttagatgctgcactattctacctttcaatgaagaagaaagcagtagtgtggggtctgtttaggtcacagcatgatgaaaaaatgacaacatttttcagccacaactttaatgaagatagatggcgaaaagctgctttgaaaaatgctttttccttacttggaaaacaacgctttgaacaatcggctgcttttttcttgctagctggttcattgaaagatgccatagaggtatgtcttgaaaaaatggaagatattcagctagccatggttattgcccgtttatatgaatctgaatttgagacttcatccacttatatatccatcctaaatcagaagattttgggttgccaaaaggatggctcaggattcagttgcaaaagattacatcctgatcctttcctgcgtagtcttgcctattgggtaatgaaagattacacccgagccttggacacattactggaacaaacaccaaaggaggatgatgaacatcaagttatcatcaagtcttgtaacccggtggcatttagtttttataactaccttcgaactcatcctttgctcattcgaagaaatcttgcctcccctgaaggaactttggcaaccttaggtctcaaaactgagaagaactttgttgataaaattaacctcatagaaagaaaattattctttaccactgcaaatgctcattttaaagttggatgccctgttttagccttggaggtactctccaaaattccaaaagtaaccaaaacatctgccttatctgcaaaaaaagatcagcctgacttcatttctcacaggatggatgatgtaccttcacattcaaaagctctgagtgatggcaatggaagttctggcattgaatggtcaaatgtaacttcatcacagtatgactggagtcagccaatagtaaaagttgatgaggaacctcttaatcttgattggggtgaagatcacgacagtgccttagatgaagaggaagacgatgctgttggtttagtgatgaaaagtacagatgccagggaaaaagataaacaatcagatcagaaggcctcagaccctaacatgttattaacacctcaggaagaggatgatcctgaaggtgatactgaagttgatgtgattgctgaacaactaaaattcagagcttgtttaaagatccttatgactgaattaagaacattggctacaggttatgaagtagatggaggaaaactcagatttcaactctataactggcttgaaaaggaaattgctgccttgcatgagatatgtaatcatgaatcagttattaaagagtattccagtaagacatattccaaagtagagagtgatctgctggatcaggaagaaatggtagacaaaccagatattggttcctatgagcgccatcaaatagaaagaagaagattgcaggccaaacgagagcatgcagaaagacgaaagtcgtggttgcagaaaaaccaagatctcctgagagtatttctcagctactgtagccttcatggggcccaaggtggtggtttggcttcagtaaggatggaactcaaatttttgctacaagaatcacaacaggaaactacagtaaagcagctccagtctccactaccactgcctaccaccctacctctgctttcagcaagtattgcgtcaacaaaaacagtcatagctaatcctgtattgtacttaaataatcacatccatgatatactttatactattgttcagatgaaaacaccacctcatcccagtattgaagatgtgaaggtgcacacacttcattcactagcagcatcactttctgcatcaatttaccaagcattatgtgacagtcatagctacagtcaaacagaaggaaatcagtttacaggaatggcttatcaaggacttcttttaagtgatcgtagaagactaaggacagaaagcattgaagaacacgcaacaccaaattcatctcctgctcaatggcctggtgtgagctcacttattaatcttttgagttcagcccaagatgaagaccagccaaaactgaacattttgctatgtgaagctgttgttgctgtttacttaagtttattgatacatgctcttgccacaaattcctccagtgaattatttcggcttgcagcccacccattaaataatcgaatgtgggctgctgtttttggaggcggtgtaaaacttgttgtgaaacctcgaagacaatcagaaaatatttcagcacctcctgtcctttctgaagacatagataaacaccgtaggagatttaacatgagaatgctcgtccctggaaggcctgtaaaagatgctaccccaccaccggtgcctgcagaaagaccatcttacaaagaaaaatttattcctcccgaacttagtatgtgggattattttgttgcaaagccatttcttcctttgtctgatagtggtgttatatatgattctgatgaaagcattcatagtgatgaagaagatgatgcctttttttcagatacacaaatacaggagcaccaagatccaaattcctatagctgggctcttctacatttgacaatggttaaactagcacttcacaatgtcaagaatttctttcctattgctggactggaattctctgagctgcctgtaacatcaccattaggtattgctgtgattaaaaacttggagaactgggaacagatcttgcaagagaaaatggatcagtttgaaggtccaccccctaactatatcaacacatatccaactgacctttcagtgggagctggaccagctattcttcgaaataaagcaatgctagaacctgaaaataccccattcaagtcccgggattcttctgcatttccagtcaaacgactttggcatttccttgttaaacaagaggtccttcaagagacatttattagatatattttcactaagaaaagaaagcagagtgaggttgaagctgatctgggctatccaggtggaaaggcgaaagtcatccataaggaatctgatatgatcatggcattttctgttaataaggcaaattgtaatgaaattgttttggcttcaacacatgatgttcaagaacttgatgttacttctctactggcctgtcagtcatacatatggatcggagaagaatatgacagagaatccaaaagttcagatgatgttgattatcgtggttccactacaactctttatcaacccagtgcaacatcctattcagcaagtcaggtgcatccaccttcatctctgccatggctgggcactggacagactagcactggagctagtgtgcttatgaaaaggaatctacataatgttaagagaatgacttcacacccagtccatcaatactatcttacaggtgctcaggacggcagtgtacgaatgtttgaatggacgcggcctcagcaacttgtctgctttcgtcaagctggcaatgcaagagttactagattatattttaattcacaaggcaacaagtgtggtgttgcggatggagagggttttctgagtatctggcaagttaaccaaactgcatcaaatcctaaaccttatatgagttggcagtgccacagtaaagccacaagtgactttgcatttattacctcttcaagtctagttgccacatctggacactccaatgacaatagaaatgtttgcctctgggacacattaatatcacccggaaacagcctcattcatggtttcacgtgccacgatcatggtgccacggtactgcagtatgcacccaaacagcaactcctaatctcggggggtaggaaaggacacgtctgcatttttgacatcaggcaaaggcagctcattcacacgttccaggcccatgactcagctattaaggctctggccttggatccctatgaggaatattttaccacaggttcagcagaaggtaacataaaggtttggagattgacaggccatggcctaattcattcatttaaaagtgaacatgctaagcagtccatatttcgaaacattggggctggagtcatgcagattgacatcatccagggcaatcggctcttctcctgtggtgcagatggcacgctgaaaaccagggttttgcccaatgcttttaacatccctaacagaattcttgacattctataaagattggggttttatttttatatacatttcagttaaaaggcacactacagtcatcactaggcaattctgctttctaagcagttgtattgaaaacagagaatctctgtgtagaatttgaatatgacccaagctgagtattatctaaacaggttggtggaatgaatgcgcatgt

SEQ ID NO: 8599 - DNA, 10400 bp, Homo sapiens
  source 1..10400: mol_type = unassigned DNA
acagagggaaacggctctcgcagcccgaggagggtcaggcgcggagcttgtcgcacctcccgcgcattctgtccagcccgggctccggagatgcatctgcatcaggtcctcaccggagctgtcaaccctggagacaactgctactccgtgggcagcgtcggggatgtccccttcacggcatatggatcaggctgtgatattgttattttggcaaatgactttgaatgtgtacagatcattcctggtgctaagcatggaaacatccaagtcagctgtgtggagtgttctaaccaacaaggaagaattgcagcttcatatggtaatgctgtttgtatatttgagcccttgggcataaattctcataaaagaaattgtcaactcaagtgccagtggcttaaaactgggcagttttttttgagttctgtgacatacaacttagcatgggatcctcaagataatagattgttgacagcaactgattctattcagttgtgggctcctccaggagatgatattctggaagaggaggaagaaattgataatacagttcctcctgttttaaatgattggaagtgtgtctggcagtgcaaaacctcagtatctgtacatttgatggaatggtctcctgatggtgaatattttgctactgctggaaaggatgattgtcttttgaaagtgtggtatcctatgactggttggaagtcttcaattatacctcaggatcatcatgaagtaaaaaggagacagtcctctactcaattttcttttgtttacttggcacatccccgagctgtgacaggtttttcgtggcgcaaaactagcaagtatatgcccaggggttctgtctgtaatgtgttgttaacttcatgtcatgatggtgtgtgccggctctgggcagaaactttattaccagaagactgtcttttgggtgagcagatttgtgagactaccacttccagcattgccagcagcctttctcatgctggaagacacaaagacagaatacagcatgctcttgagacaatacaccatttgaaaaatttaaggaaaggacagaggaggtcatctgttcttgtaactcatgctgaattaatgcccgaccagacagcaatgcatgaagttcaaagacacatttcccaccatgcaaatgcactctgtcattttcatattgcagcaagcatcaaccctgccacagatattccaaatgtcttggttggcactgcatttaatgttgatgatggaaatgggggctttgtagttcattggttaaacaacaaggaatttcattttacatcatctacagaagtatttatgcatcaattacgaaaactttctgataagcaggtagatcatgaaaatgatgatgcagatagagaagatgaggaacattcacaggaggatagagaacggggtttacatatgaaattagaccatgatttatccctggatagagaatctgaggcaggtacaggatcatcagaacatgaagatggagaaagagaaggaagtcctagaacttactcacgacttagtgtaccaatgccactgcctacggttctgcttgatcggaagattgaaacgctgctaactgaatggaataagaatcctgatatgctttttacaatacaccctgtagatggtacctttctagtgtggcatgtgaagtatttggatgaatataatcctggaatatttagacaagttcaggtttctttttcttctcggattcctgttgcatttccctctggtgatgcaagctctcttagtaaaaatatcatgatgtatgcctgtataaatgcgacaaaagattctcaccacacgctgttacaccaggaggggatgtctgtaggcagtcctcacggatcacagccacactctagatcccacagtacacatatgaacatcttagctcccacagtaatgatgatctctaaacacatagatggttctttaaatcagtgggcagtcacttttgctgataagtctgcctttaccactgttctaactgtatctcacaaatttagatattgcggtcatcgatttcacctcaatgacctggcatgtcattcagttttaccactgttattgacatcctctcatcataatgctctattgactcctgaattagattgtcagtgggactcagacaataaattaagtagattaatggaccctgtaaaacatataaaaggttcctcgaaacaacctcttagaaatgcagcaactcgtacatttcatgacccaaatgcaatctacagtgaacttattctgtggcgtgtagacccaataggacctttgtcatacactggaggagtatcagaattggctcgaattaactctttacatacctcagcgttctctaatgtggcttggcttccaactctcattcccagttactgtctaggcacatactgcaattctgcaagtgcttgctttgttgcttctgatggcaaaaatctgagactctatcaagctgtagtggatgcaaggaaattattagatgaattgtcagacccagaatcttcaaaacttattggagaagtgtttaatattgtgagccaacagtctactgctcgacctggctgcattattgaactcgacgcaataaccaaccaatgtggctcaaatacacagttgcttcatgtgtttcaagaagacttcattataggatataaaccacataaggaagatatggagaaaaaggaaacagaaatattttttcagccatcacaaggataccgcccaccaccattttcagaaaagttctttctagtagtaattgagaaggacagcaataataactctattctgcatatgtggcaccttcatcttaaatctgtacaagcatgtttagctaaagcttcagaaggggcttcctctgagagtctactttcagtccctggacagaagaacgtagattcttctccagaaacctctcctagtgtgagccccatgccacattcttcatcaattgccaatcttcaaactgccagtaaacttattctgagttctagactggtgtatagccaaccccttgatctcccagaatcagttgaagtaataagagcaacgccttcagcaggccatctgagttcttcttcaatttatccagtgtgccttgcaccttatttagtggttacaacttgttctgacaataaagtacgcttctggaaatgttgtatggaagccaacccagagtgtaataaaagtgatgagaaagaaatttatcattggaagagatggcctttgatgaatgatgaaggagaagataatagcagtacagtgagcattgtgggaagaccagttgctgttagctgttcatacacaggtcgccttgcagtggcttataagcagcctatccaccataatggttttgtttctaaagaattttccatgcatgtttgtatatttgaatgtgaatctacaggaggatcagagtgggttttagaacaaacaattcatcttgatgatttggttaaggttgggagtgtacttgattcaagggtcagcgtcgacagtaatctgtttgtgtatagcaagtcagatgcactcttgagcaaggatagatatcttattccgaatatcaaacatttagtacatttggactgggtatcaaaagaagatggctcccacattcttacagtgggagtcggtgcgaatatcttcatgtatggaaggctttcaggaattgtgactgagcaaaccaacagtaaggatggagtagctgtcatcactttaccactaggtggtagtatcaagcaaggagttaagtcaagatgggttcttcttagatctatagacttggtatcttctgttgatggtactccttcactgcctgtttctctctcttgggtaagagatgggatattggtggtaggaatggattgtgaaatgcatgtatatgcacagtggaagcatgctgtcaaatttggagacactgaagctgatagttctaatgcagaagaggcagcaatgcaagatcattcgacctttaaatctaatatgctggcaagaaaaagtgttgttgaaggaacagctatttctgatgatgttttttgttcaccaactgtaattcaagatggtggcttatttgaggctgcacatgtactttcccctactcttccacaatatcatccaactcagctgttagaattgatggatttagggaaagtgcgaagggctaaagccattctctctcatttagtaaaatgtattgcaggtgaagtagcaatagttagagatcctgatgctggagaaggaactaagcgacatctctctcgaactattagtgtaagtggcagtacagcaaaggaaacagtcaccgtaggaaaagatggtactcgagattatactgagatagattctatccctccactaccactatatgcattacttgctgcagatcaagatacatcctacagaatttcagaagaaagtacaaagataccacagagctatgaagatcagacagtaagtcaaccagaggatcagtattcagagctgtttcaaatccaggatataccaacggatgatattgatttagagcctgaaaagagagaaaacaaatcaaaagtaataaatctttctcaatatggaccagcttactttggccaagaacatgcaagggtactttcaagtcatcttatgcactcaagtctaccaggccttacccgtttggagcagatgttccttgtagctttggctgatacagtggctactactagtactgagcttgatgaaagcagagataagagttgctcaggaagagatacattagatgagtgtggtttgagatacttgttagctatgcgcctacacacatgccttttgacatcgctgcctcctttataccgagtgcagctacttcatcaaggtgtctctacatgccattttgcctgggcttttcattctgaggctgaagaagaactgattaatatgattccagcaattcagagaggggacccccagtggtctgaattaagagctatgggcataggatggtgggtgaggaacattaacacgcttcgaagatgcattgaaaaggttgccaaagcttcttttcaaaggaacaatgatgccttagatgctgcactattctacctttcaatgaagaagaaagcagtagtgtggggtctgtttaggtcacagcatgatgaaaaaatgacaacatttttcagccacaactttaatgaagatagatggcgaaaagctgctttgaaaaatgctttttccttacttggaaaacaacgctttgaacaatcggctgcttttttcttgctagctggttcattgaaagatgccatagaggtatgtcttgaaaaaatggaagatattcagctagccatggttattgcccgtttatatgaatctgaatttgagacttcatccacttatatatccatcctaaatcagaagattttgggttgccaaaaggatggctcaggattcagttgcaaaagattacatcctgatcctttcctgcgtagtcttgcctattgggtaatgaaagattacacccgagccttggacacattactggaacaaacaccaaaggaggatgatgaacatcaagttatcatcaagtcttgtaacccggtggcatttagtttttataactaccttcgaactcatcctttgctcattcgaagaaatcttgcctcccctgaaggaactttggcaaccttaggtctcaaaactgagaagaactttgttgataaaattaacctcatagaaagaaaattattctttaccactgcaaatgctcattttaaagttggatgccctgttttagccttggaggtactctccaaaattccaaaagtaaccaaaacatctgccttatctgcaaaaaaagatcagcctgacttcatttctcacaggatggatgatgtaccttcacattcaaaagctctgagtgatggcaatggaagttctggcattgaatggtcaaatgtaacttcatcacagtatgactggagtcagccaatagtaaaagttgatgaggaacctcttaatcttgattggggtgaagatcacgacagtgccttagatgaagaggaagacgatgctgttggtttagtgatgaaaagtacagatgccagggaaaaagataaacaatcagatcagaaggcctcagaccctaacatgttattaacacctcaggaagaggatgatcctgaaggtgatactgaagttgatgtgattgctgaacaactaaaattcagagcttgtttaaagatccttatgactgaattaagaacattggctacaggttatgaagtagatggaggaaaactcagatttcaactctataactggcttgaaaaggaaattgctgccttgcatgagatatgtaatcatgaatcagttattaaagagtattccagtaagacatattccaaagtagagagtgatctgctggatcaggaagaaatggtagacaaaccagatattggttcctatgagcgccatcaaatagaaagaagaagattgcaggccaaacgagagcatgcagaaagacgaaagtcgtggttgcagaaaaaccaagatctcctgagagtatttctcagctactgtagccttcatggggcccaaggtggtggtttggcttcagtaaggatggaactcaaatttttgctacaagaatcacaacaggaaactacagtaaagcagctccagtctccactaccactgcctaccaccctacctctgctttcagcaagtattgcgtcaacaaaaacagtcatagctaatcctgtattgtacttaaataatcacatccatgatatactttatactattgttcagatgaaaacaccacctcatcccagtattgaagatgtgaaggtgcacacacttcattcactagcagcatcactttctgcatcaatttaccaagcattatgtgacagtcatagctacagcagtcaaacagaaggaaatcagtttacaggaatggcttatcaaggacttcttttaagtgatcgtagaagactaaggacagaaagcattgaagaacacgcaacaccaaattcatctcctgctcaatggcctggtgtgagctcacttattaatcttttgagttcagcccaagatgaagaccagccaaaactgaacattttgctatgtgaagctgttgttgctgtttacttaagtttattgatacatgctcttgccacaaattcctccagtgaattatttcggcttgcagcccacccattaaataatcgaatgtgggctgctgtttttggaggcggtgtaaaacttgttgtgaaacctcgaagacaatcagaaaatatttcagcacctcctgtcctttctgaagacatagataaacaccgtaggagatttaacatgagaatgctcgtccctggaaggcctgtaaaagatgctaccccaccaccggtgcctgcagaaagaccatcttacaaagaaaaatttattcctcccgaacttagtatgtgggattattttgttgcaaagccatttcttcctttgtctgatagtggtgttatatatgattctgatgaaagcattcatagtgatgaagaagatgatgcctttttttcagatacacaaatacaggagcaccaagatccaaattcctatagctgggctcttctacatttgacaatggttaaactagcacttcacaatgtcaagaatttctttcctattgctggactggaattctctgagctgcctgtaacatcaccattaggtattgctgtgattaaaaacttggagaactgggaacagatcttgcaagagaaaatggatcagtttgaaggtccaccccctaactatatcaacacatatccaactgacctttcagtgggagctggaccagctattcttcgaaataaagcaatgctagaacctgaaaataccccattcaagtcccgggattcttctgcatttccagtcaaacgactttggcatttccttgttaaacaagaggtccttcaagagacatttattagatatattttcactaagaaaagaaagcagagtgaggttgaagctgatctgggctatccaggtggaaaggcgaaagtcatccataaggaatctgatatgatcatggcattttctgttaataaggcaaattgtaatgaaattgttttggcttcaacacatgatgttcaagaacttgatgttacttctctactggcctgtcagtcatacatatggatcggagaagaatatgacagagaatccaaaagttcagatgatgttgattatcgtggttccactacaactctttatcaacccagtgcaacatcctattcagcaagtcaggtgcatccaccttcatctctgccatggctgggcactggacagactagcactggagctagtgtgcttatgaaaaggaatctacataatgttaagagaatgacttcacacccagtccatcaatactatcttacaggtgctcaggacggcagtgtacgaatgtttgaatggacgcggcctcagcaacttgtctgctttcgtcaagctggcaatgcaagagttactagattatattttaattcacaaggcaacaagtgtggtgttgcggatggagagggttttctgagtatctggcaagttaaccaaactgcatcaaatcctaaaccttatatgagttggcagtgccacagtaaagccacaagtgactttgcatttattacctcttcaagtctagttgccacatctggacactccaatgacaatagaaatgtttgcctctgggacacattaatatcacccggaaacagcctcattcatggtttcacgtgccacgatcatggtgccacggtactgcagtatgcacccaaacagcaactcctaatctcggggggtaggaaaggacacgtctgcatttttgacatcaggcaaaggcagctcattcacacgttccaggcccatgactcagctattaaggctctggccttggatccctatgaggaatattttaccacaggttcagcagaaggtaacataaaggtttggagattgacaggccatggcctaattcattcatttaaaagtgaacatgctaagcagtccatatttcgaaacattggggctggagtcatgcagattgacatcatccagggcaatcggctcttctcctgtggtgcagatggcacgctgaaaaccagggttttgcccaatgcttttaacatccctaacagaattcttgacattctataaagattggggttttatttttatatacatttcagttaaaaggcacactacagtcatcactaggcaattctgctttctaagcagttgtattgaaaacagagaatctctgtgtagaatttgaatatgacccaagctgagtattatctaaacaggttggtggaatgaatgcgcatgtaccttattatgctgacatactaaaaaaaataaaacctagtattgtatgaaggatagctattctttacagcatttagcaaacctgattcagaaaacatttgagattagcaaattagtaacttgaaataatgaaaaggacgtttataccaaattaaggaagaaaatgttgctgatttgggtttttcttcctgttcttaccactgactgaagcatgcctgcagtctcctcctctgttgaatgaaggataatcataaggtgtttgttaggagcgctagaccacctggaaaactttcttagctgtggagcagtgcgcagtgaccagttctctgctgtgagaggccgtttccattctttcctgctgaatatttttcctgttagtgtttatactgagctagtactgtaacttgcaaatgagtgcaaatttaaatgcaatgttttactcacaatttgcacattcacattttttggactgctagtttttctatttaaatatttgccttcatgttaggaatgtactatgtgaacatgacatatttgtagttaaccaaacacaccttcttagtccagtttagtactttttcttttcgtgtattcaaggttaaacacccaaacatttaaggatatgttgaaactacaccaatagagcatttcatatcataattaaaatgaatgttaggcttcttgtggccagttaatagttgatgagattggtgacattatttattgccacagcctattgtataaactatgcagagttaaatatttgcttgtaaaatattagccaatgttgtcattattttgatgtatttccttggttatgaccaaaaatatgttgagatactgaaactaatgtctgtgtgtttaaatgtttaccagcaaattgtcttatcatgttaatgagaatgttcaatgcctgtgtggtaaatagtaaatacaatggcataaaagtaactttctctgaagatgtgatgttcaggctgtgaaatatatatgtaaaagaaaaataaatgttatttgttagagtt

SEQ ID NO: 8600 - DNA, 5351 bp, Homo sapiens
  source 1..5351: mol_type = unassigned DNA
ggctccgttccatccttctgcacagggtatcgcctctctccgtttggtacatcccctcctcccccacgcccggactggggtggtagacgccgcctccgctcatcgcccctccccatcggtttccgcgcgaaaagccggggcgcctgcgctgccgccgccgcgtctgctgaagcctccgagatgccggcgcgtaccgccccagcccgggtgcccacactggccgtcccggccatctcgctgcccgacgatgtccgcaggcggctcaaagatttggaaagagacagcttaacagaaaaggaatgtgtgaaggagaaattgaatctcttgcacgaatttctgcaaacagaaataaagaatcagttatgtgacttggaaaccaaattacgtaaagaagaattatccgaggagggctacctggctaaagtcaaatcccttttaaataaagatttgtccttggagaacggtgctcatgcttacaaccgggaagtgaatggacgtctagaaaacgggaaccaagcaagaagtgaagcccgtagagtgggaatggcagatgccaacagcccccccaaacccctttccaaacctcgcacgcccaggaggagcaagtccgatggagaggctaagcctgaaccttcacctagccccaggattacaaggaaaagcaccaggcaaaccaccatcacatctcattttgcaaagggccctgccaaacggaaacctcaggaagagtctgaaagagccaaatcggatgagtccatcaaggaagaagacaaagaccaggatgagaagagacgtagagttacatccagagaacgagttgctagaccgcttcctgcagaagaacctgaaagagcaaaatcaggaacgcgcactgaaaaggaagaagaaagagatgaaaaagaagaaaagagactccgaagtcaaaccaaagaaccaacacccaaacagaaactgaaggaggagccggacagagaagccagggcaggcgtgcaggctgacgaggacgaagatggagacgagaaagatgagaagaagcacagaagtcaacccaaagatctagctgccaaacggaggcccgaagaaaaagaacctgaaaaagtaaatccacagatttctgatgaaaaagacgaggatgaaaaggaggagaagagacgcaaaacgacccccaaagaaccaacggagaaaaaaatggctcgcgccaaaacagtcatgaactccaagacccaccctcccaagtgcattcagtgcgggcagtacctggacgaccctgacctcaaatatgggcagcacccaccagacgcggtggatgagccacagatgctgacaaatgagaagctgtccatctttgatgccaacgagtctggctttgagagttatgaggcgcttccccagcacaaactgacctgcttcagtgtgtactgtaagcacggtcacctgtgtcccatcgacaccggcctcatcgagaagaatatcgaactcttcttttctggttcagcaaaaccaatctatgatgatgacccatctcttgaaggtggtgttaatggcaaaaatcttggccccataaatgaatggtggatcactggctttgatggaggtgaaaaggccctcatcggcttcagcacctcatttgccgaatacattctgatggatcccagtcccgagtatgcgcccatatttgggctgatgcaggagaagatctacatcagcaagattgtggtggagttcctgcagagcaattccgactcgacctatgaggacctgatcaacaagatcgagaccacggttcctccttctggcctcaacttgaaccgcttcacagaggactccctcctgcgacacgcgcagtttgtggtggagcaggtggagagttatgacgaggccggggacagtgatgagcagcccatcttcctgacaccctgcatgcgggacctgatcaagctggctggggtcacgctgggacagaggcgagcccaggcgaggcggcagaccatcaggcattctaccagggagaaggacaggggacccacgaaagccaccaccaccaagctggtctaccagatcttcgatactttcttcgcagagcaaattgaaaaggatgacagagaagacaaggagaacgcctttaagcgccggcgatgtggcgtctgtgaggtgtgtcagcagcctgagtgtgggaaatgtaaagcctgcaaggacatggttaaatttggtggcagtggacggagcaagcaggcttgccaagagcggaggtgtcccaatatggccatgaaggaggcagatgacgatgaggaagtcgatgataacatcccagagatgccgtcacccaaaaaaatgcaccaggggaagaagaagaaacagaacaagaatcgcatctcttgggtcggagaagccgtcaagactgatgggaagaagagttactataagaaggtgtgcattgatgcggaaaccctggaagtgggggactgtgtctctgttattccagatgattcctcaaaaccgctgtatctagcaagggtcacggcgctgtgggaggacagcagcaacgggcagatgtttcacgcccactggttctgcgctgggacagacacagtcctcggggccacgtcggaccctctggagctgttcttggtggatgaatgtgaggacatgcagctttcatatatccacagcaaagtgaaagtcatctacaaagccccctccgaaaactgggccatggagggaggcatggatcccgagtccctgctggagggggacgacgggaagacctacttctaccagctgtggtatgatcaagactacgcgagattcgagtcccctccaaaaacccagccaacagaggacaacaagttcaaattctgtgtgagctgtgcccgtctggctgagatgaggcaaaaagaaatccccagggtcctggagcagctcgaggacctggatagccgggtcctctactactcagccaccaagaacggcatcctgtaccgagttggtgatggtgtgtacctgccccctgaggccttcacgttcaacatcaagctgtccagtcccgtgaaacgcccacggaaggagcccgtggatgaggacctgtacccagagcactaccggaaatactccgactacatcaaaggcagcaacctggatgcccctgagccctaccgaattggccggatcaaagagatcttctgtcccaagaagagcaacggcaggcccaatgagactgacatcaaaatccgggtcaacaagttctacaggcctgagaacacccacaagtccactccagcgagctaccacgcagacatcaacctgctctactggagcgacgaggaggccgtggtggacttcaaggctgtgcagggccgctgcaccgtggagtatggggaggacctgcccgagtgcgtccaggtgtactccatgggcggccccaaccgcttctacttcctcgaggcctataatgcaaagagcaaaagctttgaagatcctcccaaccatgcccgtagccctggaaacaaagggaagggcaagggaaaagggaagggcaagcccaagtcccaagcctgtgagccgagcgagccagagatagagatcaagctgcccaagctgcggaccctggatgtgttttctggctgcggggggttgtcggagggattccaccaagcaggcatctctgacacgctgtgggccatcgagatgtgggaccctgcggcccaggcgttccggctgaacaaccccggctccacagtgttcacagaggactgcaacatcctgctgaagctggtcatggctggggagaccaccaactcccgcggccagcggctgccccagaagggagacgtggagatgctgtgcggcgggccgccctgccagggcttcagcggcatgaaccgcttcaattcgcgcacctactccaagttcaaaaactctctggtggtttccttcctcagctactgcgactactaccggccccggttcttcctcctggagaatgtcaggaactttgtctccttcaagcgctccatggtcctgaagctcaccctccgctgcctggtccgcatgggctatcagtgcaccttcggcgtgctgcaggccggtcagtacggcgtggcccagactaggaggcgggccatcatcctggccgcggcccctggagagaagctccctctgttcccggagccactgcacgtgtttgctccccgggcctgccagctgagcgtggtggtggatgacaagaagtttgtgagcaacataaccaggttgagctcgggtcctttccggaccatcacggtgcgagacacgatgtccgacctgccggaggtgcggaatggagcctcggcactggagatctcctacaacggggagcctcagtcctggttccagaggcagctccggggcgcacagtaccagcccatcctcagggaccacatctgtaaggacatgagtgcattggtggctgcccgcatgcggcacatccccttggccccagggtcagactggcgcgatctgcccaacatcgaggtgcggctctcagacggcaccatggccaggaagctgcggtatacccaccatgacaggaagaacggccgcagcagctctggggccctccgtggggtctgctcctgcgtggaagccggcaaagcctgcgaccccgcagccaggcagttcaacaccctcatcccctggtgcctgccccacaccgggaaccggcacaaccactgggctggcctctatggaaggctcgagtgggacggcttcttcagcacaaccgtcaccaaccccgagcccatgggcaagcagggccgcgtgctccacccagagcagcaccgtgtggtgagcgtgcgggagtgtgcccgctcccagggcttccctgacacctaccggctcttcggcaacatcctggacaagcaccggcaggtgggcaatgccgtgccaccgcccctggccaaagccattggcttggagatcaagctttgtatgttggccaaagcccgagagagtgcctcagctaaaataaaggaggaggaagctgctaaggactagttctgccctcccgtcacccctgtttctggcaccaggaatccccaacatgcactgatgttgtgtttttaacatgtcaatctgtccgttcacatgtgtggtacatggtgtttgtggccttggctgacatgaagctgttgtgtgaggttcgcttatcaactaatgatttagtgatcaaattgtgcagtactttgtgcattctggattttaaaagttttttattatgcattatatcaaatctaccactgtatgagtggaaattaagactttatgtagtttttatatgttgtaatatttcttcaaataaatctctcctataaacc

SEQ ID NO: 8601 - DNA, 5399 bp, Homo sapiens
  source 1..5399: mol_type = unassigned DNA
ggctccgttccatccttctgcacagggtatcgcctctctccgtttggtacatcccctcctcccccacgcccggactggggtggtagacgccgcctccgctcatcgcccctccccatcggtttccgcgcgaaaagccggggcgcctgcgctgccgccgccgcgtctgctgaagcctccgagatgccggcgcgtaccgccccagcccgggtgcccacactggccgtcccggccatctcgctgcccgacgatgtccgcaggcggctcaaagatttggaaagagacagcttaacagaaaaggaatgtgtgaaggagaaattgaatctcttgcacgaatttctgcaaacagaaataaagaatcagttatgtgacttggaaaccaaattacgtaaagaagaattatccgaggagggctacctggctaaagtcaaatcccttttaaataaagatttgtccttggagaacggtgctcatgcttacaaccgggaagtgaatggacgtctagaaaacgggaaccaagcaagaagtgaagcccgtagagtgggaatggcagatgccaacagcccccccaaacccctttccaaacctcgcacgcccaggaggagcaagtccgatggagaggctaagcgttcaagagaccctcctgcctcagcctcccaagtaactgggattagagctgaaccttcacctagccccaggattacaaggaaaagcaccaggcaaaccaccatcacatctcattttgcaaagggccctgccaaacggaaacctcaggaagagtctgaaagagccaaatcggatgagtccatcaaggaagaagacaaagaccaggatgagaagagacgtagagttacatccagagaacgagttgctagaccgcttcctgcagaagaacctgaaagagcaaaatcaggaacgcgcactgaaaaggaagaagaaagagatgaaaaagaagaaaagagactccgaagtcaaaccaaagaaccaacacccaaacagaaactgaaggaggagccggacagagaagccagggcaggcgtgcaggctgacgaggacgaagatggagacgagaaagatgagaagaagcacagaagtcaacccaaagatctagctgccaaacggaggcccgaagaaaaagaacctgaaaaagtaaatccacagatttctgatgaaaaagacgaggatgaaaaggaggagaagagacgcaaaacgacccccaaagaaccaacggagaaaaaaatggctcgcgccaaaacagtcatgaactccaagacccaccctcccaagtgcattcagtgcgggcagtacctggacgaccctgacctcaaatatgggcagcacccaccagacgcggtggatgagccacagatgctgacaaatgagaagctgtccatctttgatgccaacgagtctggctttgagagttatgaggcgcttccccagcacaaactgacctgcttcagtgtgtactgtaagcacggtcacctgtgtcccatcgacaccggcctcatcgagaagaatatcgaactcttcttttctggttcagcaaaaccaatctatgatgatgacccatctcttgaaggtggtgttaatggcaaaaatcttggccccataaatgaatggtggatcactggctttgatggaggtgaaaaggccctcatcggcttcagcacctcatttgccgaatacattctgatggatcccagtcccgagtatgcgcccatatttgggctgatgcaggagaagatctacatcagcaagattgtggtggagttcctgcagagcaattccgactcgacctatgaggacctgatcaacaagatcgagaccacggttcctccttctggcctcaacttgaaccgcttcacagaggactccctcctgcgacacgcgcagtttgtggtggagcaggtggagagttatgacgaggccggggacagtgatgagcagcccatcttcctgacaccctgcatgcgggacctgatcaagctggctggggtcacgctgggacagaggcgagcccaggcgaggcggcagaccatcaggcattctaccagggagaaggacaggggacccacgaaagccaccaccaccaagctggtctaccagatcttcgatactttcttcgcagagcaaattgaaaaggatgacagagaagacaaggagaacgcctttaagcgccggcgatgtggcgtctgtgaggtgtgtcagcagcctgagtgtgggaaatgtaaagcctgcaaggacatggttaaatttggtggcagtggacggagcaagcaggcttgccaagagcggaggtgtcccaatatggccatgaaggaggcagatgacgatgaggaagtcgatgataacatcccagagatgccgtcacccaaaaaaatgcaccaggggaagaagaagaaacagaacaagaatcgcatctcttgggtcggagaagccgtcaagactgatgggaagaagagttactataagaaggtgtgcattgatgcggaaaccctggaagtgggggactgtgtctctgttattccagatgattcctcaaaaccgctgtatctagcaagggtcacggcgctgtgggaggacagcagcaacgggcagatgtttcacgcccactggttctgcgctgggacagacacagtcctcggggccacgtcggaccctctggagctgttcttggtggatgaatgtgaggacatgcagctttcatatatccacagcaaagtgaaagtcatctacaaagccccctccgaaaactgggccatggagggaggcatggatcccgagtccctgctggagggggacgacgggaagacctacttctaccagctgtggtatgatcaagactacgcgagattcgagtcccctccaaaaacccagccaacagaggacaacaagttcaaattctgtgtgagctgtgcccgtctggctgagatgaggcaaaaagaaatccccagggtcctggagcagctcgaggacctggatagccgggtcctctactactcagccaccaagaacggcatcctgtaccgagttggtgatggtgtgtacctgccccctgaggccttcacgttcaacatcaagctgtccagtcccgtgaaacgcccacggaaggagcccgtggatgaggacctgtacccagagcactaccggaaatactccgactacatcaaaggcagcaacctggatgcccctgagccctaccgaattggccggatcaaagagatcttctgtcccaagaagagcaacggcaggcccaatgagactgacatcaaaatccgggtcaacaagttctacaggcctgagaacacccacaagtccactccagcgagctaccacgcagacatcaacctgctctactggagcgacgaggaggccgtggtggacttcaaggctgtgcagggccgctgcaccgtggagtatggggaggacctgcccgagtgcgtccaggtgtactccatgggcggccccaaccgcttctacttcctcgaggcctataatgcaaagagcaaaagctttgaagatcctcccaaccatgcccgtagccctggaaacaaagggaagggcaagggaaaagggaagggcaagcccaagtcccaagcctgtgagccgagcgagccagagatagagatcaagctgcccaagctgcggaccctggatgtgttttctggctgcggggggttgtcggagggattccaccaagcaggcatctctgacacgctgtgggccatcgagatgtgggaccctgcggcccaggcgttccggctgaacaaccccggctccacagtgttcacagaggactgcaacatcctgctgaagctggtcatggctggggagaccaccaactcccgcggccagcggctgccccagaagggagacgtggagatgctgtgcggcgggccgccctgccagggcttcagcggcatgaaccgcttcaattcgcgcacctactccaagttcaaaaactctctggtggtttccttcctcagctactgcgactactaccggccccggttcttcctcctggagaatgtcaggaactttgtctccttcaagcgctccatggtcctgaagctcaccctccgctgcctggtccgcatgggctatcagtgcaccttcggcgtgctgcaggccggtcagtacggcgtggcccagactaggaggcgggccatcatcctggccgcggcccctggagagaagctccctctgttcccggagccactgcacgtgtttgctccccgggcctgccagctgagcgtggtggtggatgacaagaagtttgtgagcaacataaccaggttgagctcgggtcctttccggaccatcacggtgcgagacacgatgtccgacctgccggaggtgcggaatggagcctcggcactggagatctcctacaacggggagcctcagtcctggttccagaggcagctccggggcgcacagtaccagcccatcctcagggaccacatctgtaaggacatgagtgcattggtggctgcccgcatgcggcacatccccttggccccagggtcagactggcgcgatctgcccaacatcgaggtgcggctctcagacggcaccatggccaggaagctgcggtatacccaccatgacaggaagaacggccgcagcagctctggggccctccgtggggtctgctcctgcgtggaagccggcaaagcctgcgaccccgcagccaggcagttcaacaccctcatcccctggtgcctgccccacaccgggaaccggcacaaccactgggctggcctctatggaaggctcgagtgggacggcttcttcagcacaaccgtcaccaaccccgagcccatgggcaagcagggccgcgtgctccacccagagcagcaccgtgtggtgagcgtgcgggagtgtgcccgctcccagggcttccctgacacctaccggctcttcggcaacatcctggacaagcaccggcaggtgggcaatgccgtgccaccgcccctggccaaagccattggcttggagatcaagctttgtatgttggccaaagcccgagagagtgcctcagctaaaataaaggaggaggaagctgctaaggactagttctgccctcccgtcacccctgtttctggcaccaggaatccccaacatgcactgatgttgtgtttttaacatgtcaatctgtccgttcacatgtgtggtacatggtgtttgtggccttggctgacatgaagctgttgtgtgaggttcgcttatcaactaatgatttagtgatcaaattgtgcagtactttgtgcattctggattttaaaagttttttattatgcattatatcaaatctaccactgtatgagtggaaattaagactttatgtagtttttatatgttgtaatatttcttcaaataaatctctcctataaacc

SEQ ID NO: 8602 - DNA, 5360 bp, Homo sapiens
  source 1..5360: mol_type = unassigned DNA
ggctccgttccatccttctgcacagggtatcgcctctctccgtttggtacatcccctcctcccccacgcccggactggggtggtagacgccgcctccgctcatcgcccctccccatcggtttccgcgcgaaaagccggggcgcctgcgctgccgccgccgcgtctgctgaagcctccgagatgccggcgcgtaccgccccagcccgggtgcccacactggccgtcccggccatctcgctgcccgacgatgtccgcaggcggctcaaagatttggaaagagacagcttaacagaaaaggaatgtgtgaaggagaaattgaatctcttgcacgaatttctgcaaacagaaataaagaatcagttatgtgacttggaaaccaaattacgtaaagaagaattatccgaggagggctacctggctaaagtcaaatcccttttaaataaagatttgtccttggagaacggtgctcatgcttacaaccgggaagtgaatggacgtctagaaaacgggaaccaagcaagaagtgaagcccgtagagtgggaatggcagatgccaacagcccccccaaacccctttccaaacctcgcacgcccaggaggagcaagtccgatggagaggctaagcctgaaccttcacctagccccaggattacaaggaaaagcaccaggcaaaccaccatcacatctcattttgcaaagggccctgccaaacggaaacctcaggaagagtctgaaagagccaaatcggatgagtccatcaaggaagaagacaaagaccaggatgagaagagacgtagagttacatccagagaacgagttgctagaccgcttcctgcagaagaacctgaaagagcaaaatcaggaacgcgcactgaaaaggaagaagaaagagatgaaaaagaagaaaagagactccgaagtcaaaccaaagaaccaacacccaaacagaaactgaaggaggagccggacagagaagccagggcaggcgtgcaggctgacgaggacgaagatggagacgagaaagatgagaagaagcacagaagtcaacccaaagatctagctgccaaacggaggcccgaagaaaaagaacctgaaaaagtaaatccacagatttctgatgaaaaagacgaggatgaaaaggaggagaagagacgcaaaacgacccccaaagaaccaacggagaaaaaaatggctcgcgccaaaacagtcatgaactccaagacccaccctcccaagtgcattcagtgcgggcagtacctggacgaccctgacctcaaatatgggcagcacccaccagacgcggtggatgagccacagatgctgacaaatgagaagctgtccatctttgatgccaacgagtctggctttgagagttatgaggcgcttccccagcacaaactgacctgcttcagtgtgtactgtaagcacggtcacctgtgtcccatcgacaccggcctcatcgagaagaatatcgaactcttcttttctggttcagcaaaaccaatctatgatgatgacccatctcttgaaggtggtgttaatggcaaaaatcttggccccataaatgaatggtggatcactggctttgatggaggtgaaaaggccctcatcggcttcagcacctcatttgccgaatacattctgatggatcccagtcccgagtatgcgcccatatttgggctgatgcaggagaagatctacatcagcaagattgtggtggagttcctgcagagcaattccgactcgacctatgaggacctgatcaacaagatcgagaccacggttcctccttctggcctcaacttgaaccgcttcacagaggactccctcctgcgacacgcgcagtttgtggtggagcaggtggagagttatgacgaggccggggacagtgatgagcagcccatcttcctgacaccctgcatgcgggacctgatcaagctggctggggtcacgctgggacagaggcgagcccaggcgaggcggcagaccatcaggcattctaccagggagaaggacaggggacccacgaaagccaccaccaccaagctggtctaccagatcttcgatactttcttcgcagagcaaattgaaaaggatgacagagaagacaaggagaacgcctttaagcgccggcgatgtggcgtctgtgaggtgtgtcagcagcctgagtgtgggaaatgtaaagcctgcaaggacatggttaaatttggtggcagtggacggagcaagcaggcttgccaagagcggaggtgtcccaatatggccatgaaggaggcagatgacgatgaggaagtcgatgataacatcccagagatgccgtcacccaaaaaaatgcaccaggggaagaagaagaaacagaacaagaatcgcatctcttgggtcggagaagccgtcaagactgatgggaagaagagttactataagaaggtgtgcattgatgcggaaaccctggaagtgggggactgtgtctctgttattccagatgattcctcaaaaccgctgtatctagcaagggtcacggcgctgtgggaggacagcagcaacgggcagatgtttcacgcccactggttctgcgctgggacagacacagtcctcggggccacgtcggaccctctggagctgttcttggtggatgaatgtgaggacatgcagctttcatatatccacagcaaagtgaaagtcatctacaaagccccctccgaaaactgggccatggagggaggcatggatcccgagtccctgctggagggggacgacgggaagacctacttctaccagctgtggtatgatcaagactacgcgagattcgagtcccctccaaaaacccagccaacagaggacaacaagttcaaattctgtgtgagctgtgcccgtctggctgagatgaggcaaaaagaaatccccagggtcctggagcagctcgaggacctggatagccgggtcctctactactcagccaccaagaacggcatcctgtaccgagttggtgatggtgtgtacctgccccctgaggccttcacgttcaacatcaagctgtccagtcccgtgaaacgcccacggaaggagcccgtggatgaggacctgtacccagagcactaccggaaatactccgactacatcaaaggcagcaacctggatgcccctgagccctaccgaattggccggatcaaagagatcttctgtcccaagaagagcaacggcaggcccaatgagactgacatcaaaatccgggtcaacaagttctacaggcctgagaacacccacaagtccactccagcgagctaccacgcagacatcaacctgctctactggagcgacgaggaggccgtggtggacttcaaggctgtgcagggccgctgcaccgtggagtatggggaggacctgcccgagtgcgtccaggtgtactccatgggcggccccaaccgcttctacttcctcgaggcctataatgcaaagagcaaaagctttgaagatcctcccaaccatgcccgtagccctggaaacaaagggaagggcaagggaaaagggaagggcaagcccaagtcccaagcctgtgagccgagcgagccagagatagagatcaagctgcccaagctgcggaccctggatgtgttttctggctgcggggggttgtcggagggattccaccaagcaggcatctctgacacgctgtgggccatcgagatgtgggaccctgcggcccaggcgttccggctgaacaaccccggctccacagtgttcacagaggactgcaacatcctgctgaagctggtcatggctggggagaccaccaactcccgcggccagcggctgccccagaagggagacgtggagatgctgtgcggcgggccgccctgccagggcttcagcggcatgaaccgcttcaattcgcgcacctactccaagttcaaaaactctctggtggtttccttcctcagctactgcgactactaccggccccggttcttcctcctggagaatgtcaggaactttgtctccttcaagcgctccatggtcctgaagctcaccctccgctgcctggtccgcatgggctatcagtgcaccttcggcgtgctgcaggccggtcagtacggcgtggcccagactaggaggcgggccatcatcctggccgcggcccctggagagaagctccctctgttcccggagccactgcacgtgtttgctccccgggcctgccagctgagcgtggtggtggatgacaagaagtttgtgagcaacataaccaggttgagctcgggtcctttccggaccatcacggtgcgagacacgatgtccgacctgccggaggtgcggaatggagcctcggcactggagatctcctacaacggggagcctcagtcctggttccagaggcagctccggggcgcacagtaccagcccatcctcagggaccacatctgtaaggacatgagtgcattggtggctgcccgcatgcggcacatccccttggccccagggtcagactggcgcgatctgcccaacatcgaggtgcggctctcagacggcaccatggccaggaagctgcggtatacccaccatgacaggaagaacggccgcagcagctctggggccctccgtggggtctgctcctgcgtggaaggtgggtcctccggcaaagcctgcgaccccgcagccaggcagttcaacaccctcatcccctggtgcctgccccacaccgggaaccggcacaaccactgggctggcctctatggaaggctcgagtgggacggcttcttcagcacaaccgtcaccaaccccgagcccatgggcaagcagggccgcgtgctccacccagagcagcaccgtgtggtgagcgtgcgggagtgtgcccgctcccagggcttccctgacacctaccggctcttcggcaacatcctggacaagcaccggcaggtgggcaatgccgtgccaccgcccctggccaaagccattggcttggagatcaagctttgtatgttggccaaagcccgagagagtgcctcagctaaaataaaggaggaggaagctgctaaggactagttctgccctcccgtcacccctgtttctggcaccaggaatccccaacatgcactgatgttgtgtttttaacatgtcaatctgtccgttcacatgtgtggtacatggtgtttgtggccttggctgacatgaagctgttgtgtgaggttcgcttatcaactaatgatttagtgatcaaattgtgcagtactttgtgcattctggattttaaaagttttttattatgcattatatcaaatctaccactgtatgagtggaaattaagactttatgtagtttttatatgttgtaatatttcttcaaataaatctctcctataaacc

SEQ ID NO: 8603 - DNA, 4775 bp, Homo sapiens
  source 1..4775: mol_type = unassigned DNA
ggttcatgccattctcctgcctcagcctcccaagtagctgggactacagctgaaccttcacctagccccaggattacaaggaaaagcaccaggcaaaccaccatcacatctcattttgcaaagggccctgccaaacggaaacctcaggaagagtctgaaagagccaaatcggatgagtccatcaaggaagaagacaaagaccaggatgagaagagacgtagagttacatccagagaacgagttgctagaccgcttcctgcagaagaacctgaaagagcaaaatcaggaacgcgcactgaaaaggaagaagaaagagatgaaaaagaagaaaagagactccgaagtcaaaccaaagaaccaacacccaaacagaaactgaaggaggagccggacagagaagccagggcaggcgtgcaggctgacgaggacgaagatggagacgagaaagatgagaagaagcacagaagtcaacccaaagatctagctgccaaacggaggcccgaagaaaaagaacctgaaaaagtaaatccacagatttctgatgaaaaagacgaggatgaaaaggaggagaagagacgcaaaacgacccccaaagaaccaacggagaaaaaaatggctcgcgccaaaacagtcatgaactccaagacccaccctcccaagtgcattcagtgcgggcagtacctggacgaccctgacctcaaatatgggcagcacccaccagacgcggtggatgagccacagatgctgacaaatgagaagctgtccatctttgatgccaacgagtctggctttgagagttatgaggcgcttccccagcacaaactgacctgcttcagtgtgtactgtaagcacggtcacctgtgtcccatcgacaccggcctcatcgagaagaatatcgaactcttcttttctggttcagcaaaaccaatctatgatgatgacccatctcttgaaggtggtgttaatggcaaaaatcttggccccataaatgaatggtggatcactggctttgatggaggtgaaaaggccctcatcggcttcagcacctcatttgccgaatacattctgatggatcccagtcccgagtatgcgcccatatttgggctgatgcaggagaagatctacatcagcaagattgtggtggagttcctgcagagcaattccgactcgacctatgaggacctgatcaacaagatcgagaccacggttcctccttctggcctcaacttgaaccgcttcacagaggactccctcctgcgacacgcgcagtttgtggtggagcaggtggagagttatgacgaggccggggacagtgatgagcagcccatcttcctgacaccctgcatgcgggacctgatcaagctggctggggtcacgctgggacagaggcgagcccaggcgaggcggcagaccatcaggcattctaccagggagaaggacaggggacccacgaaagccaccaccaccaagctggtctaccagatcttcgatactttcttcgcagagcaaattgaaaaggatgacagagaagacaaggagaacgcctttaagcgccggcgatgtggcgtctgtgaggtgtgtcagcagcctgagtgtgggaaatgtaaagcctgcaaggacatggttaaatttggtggcagtggacggagcaagcaggcttgccaagagcggaggtgtcccaatatggccatgaaggaggcagatgacgatgaggaagtcgatgataacatcccagagatgccgtcacccaaaaaaatgcaccaggggaagaagaagaaacagaacaagaatcgcatctcttgggtcggagaagccgtcaagactgatgggaagaagagttactataagaaggtgtgcattgatgcggaaaccctggaagtgggggactgtgtctctgttattccagatgattcctcaaaaccgctgtatctagcaagggtcacggcgctgtgggaggacagcagcaacgggcagatgtttcacgcccactggttctgcgctgggacagacacagtcctcggggccacgtcggaccctctggagctgttcttggtggatgaatgtgaggacatgcagctttcatatatccacagcaaagtgaaagtcatctacaaagccccctccgaaaactgggccatggagggaggcatggatcccgagtccctgctggagggggacgacgggaagacctacttctaccagctgtggtatgatcaagactacgcgagattcgagtcccctccaaaaacccagccaacagaggacaacaagttcaaattctgtgtgagctgtgcccgtctggctgagatgaggcaaaaagaaatccccagggtcctggagcagctcgaggacctggatagccgggtcctctactactcagccaccaagaacggcatcctgtaccgagttggtgatggtgtgtacctgccccctgaggccttcacgttcaacatcaagctgtccagtcccgtgaaacgcccacggaaggagcccgtggatgaggacctgtacccagagcactaccggaaatactccgactacatcaaaggcagcaacctggatgcccctgagccctaccgaattggccggatcaaagagatcttctgtcccaagaagagcaacggcaggcccaatgagactgacatcaaaatccgggtcaacaagttctacaggcctgagaacacccacaagtccactccagcgagctaccacgcagacatcaacctgctctactggagcgacgaggaggccgtggtggacttcaaggctgtgcagggccgctgcaccgtggagtatggggaggacctgcccgagtgcgtccaggtgtactccatgggcggccccaaccgcttctacttcctcgaggcctataatgcaaagagcaaaagctttgaagatcctcccaaccatgcccgtagccctggaaacaaagggaagggcaagggaaaagggaagggcaagcccaagtcccaagcctgtgagccgagcgagccagagatagagatcaagctgcccaagctgcggaccctggatgtgttttctggctgcggggggttgtcggagggattccaccaagcaggcatctctgacacgctgtgggccatcgagatgtgggaccctgcggcccaggcgttccggctgaacaaccccggctccacagtgttcacagaggactgcaacatcctgctgaagctggtcatggctggggagaccaccaactcccgcggccagcggctgccccagaagggagacgtggagatgctgtgcggcgggccgccctgccagggcttcagcggcatgaaccgcttcaattcgcgcacctactccaagttcaaaaactctctggtggtttccttcctcagctactgcgactactaccggccccggttcttcctcctggagaatgtcaggaactttgtctccttcaagcgctccatggtcctgaagctcaccctccgctgcctggtccgcatgggctatcagtgcaccttcggcgtgctgcaggccggtcagtacggcgtggcccagactaggaggcgggccatcatcctggccgcggcccctggagagaagctccctctgttcccggagccactgcacgtgtttgctccccgggcctgccagctgagcgtggtggtggatgacaagaagtttgtgagcaacataaccaggttgagctcgggtcctttccggaccatcacggtgcgagacacgatgtccgacctgccggaggtgcggaatggagcctcggcactggagatctcctacaacggggagcctcagtcctggttccagaggcagctccggggcgcacagtaccagcccatcctcagggaccacatctgtaaggacatgagtgcattggtggctgcccgcatgcggcacatccccttggccccagggtcagactggcgcgatctgcccaacatcgaggtgcggctctcagacggcaccatggccaggaagctgcggtatacccaccatgacaggaagaacggccgcagcagctctggggccctccgtggggtctgctcctgcgtggaagccggcaaagcctgcgaccccgcagccaggcagttcaacaccctcatcccctggtgcctgccccacaccgggaaccggcacaaccactgggctggcctctatggaaggctcgagtgggacggcttcttcagcacaaccgtcaccaaccccgagcccatgggcaagcagggccgcgtgctccacccagagcagcaccgtgtggtgagcgtgcgggagtgtgcccgctcccagggcttccctgacacctaccggctcttcggcaacatcctggacaagcaccggcaggtgggcaatgccgtgccaccgcccctggccaaagccattggcttggagatcaagctttgtatgttggccaaagcccgagagagtgcctcagctaaaataaaggaggaggaagctgctaaggactagttctgccctcccgtcacccctgtttctggcaccaggaatccccaacatgcactgatgttgtgtttttaacatgtcaatctgtccgttcacatgtgtggtacatggtgtttgtggccttggctgacatgaagctgttgtgtgaggttcgcttatcaactaatgatttagtgatcaaattgtgcagtactttgtgcattctggattttaaaagttttttattatgcattatatcaaatctaccactgtatgagtggaaattaagactttatgtagtttttatatgttgtaatatttcttcaaataaatctctcctataaacc

SEQ ID NO: 8604 - DNA, 4380 bp, Homo sapiens
  source 1..4380: mol_type = unassigned DNA
gcagtgggctctggcggaggtcgggagaactgcagggcgaaggccgccgggggctccgcgggctgcggggggaggcacttgacaccggcccggggagaggaggggccgctgtccctgcggccagtgctggatgcggggacccagcgcagaagcagcgccaggtggagccatcgaagcccccacccacaggctgacagaggcaccgttcaccagagggctcaacaccgggatctatgtttaagttttaactctcgcctccaaagaccacgataattccttccccaaagcccagcagccccccagccccgcgcagccccagcctgcctcccggcgcccagatgcccgccatgccctccagcggccccggggacaccagcagctctgctgcggagcgggaggaggaccgaaaggacggagaggagcaggaggagccgcgtggcaaggaggagcgccaagagcccagcaccacggcacggaaggtggggcggcctgggaggaagcgcaagcaccccccggtggaaagcggtgacacgccaaaggaccctgcggtgatctccaagtccccatccatggcccaggactcaggcgcctcagagctattacccaatggggacttggagaagcggagtgagccccagccagaggaggggagccctgctggggggcagaagggcggggccccagcagagggagagggtgcagctgagaccctgcctgaagcctcaagagcagtggaaaatggctgctgcacccccaaggagggccgaggagcccctgcagaagcgggcaaagaacagaaggagaccaacatcgaatccatgaaaatggagggctcccggggccggctgcggggtggcttgggctgggagtccagcctccgtcagcggcccatgccgaggctcaccttccaggcgggggacccctactacatcagcaagcgcaagcgggacgagtggctggcacgctggaaaagggaggctgagaagaaagccaaggtcattgcaggaatgaatgctgtggaagaaaaccaggggcccggggagtctcagaaggtggaggaggccagccctcctgctgtgcagcagcccactgaccccgcatcccccactgtggctaccacgcctgagcccgtggggtccgatgctggggacaagaatgccaccaaagcaggcgatgacgagccagagtacgaggacggccggggctttggcattggggagctggtgtgggggaaactgcggggcttctcctggtggccaggccgcattgtgtcttggtggatgacgggccggagccgagcagctgaaggcacccgctgggtcatgtggttcggagacggcaaattctcagtggtgtgtgttgagaagctgatgccgctgagctcgttttgcagtgcgttccaccaggccacgtacaacaagcagcccatgtaccgcaaagccatctacgaggtcctgcaggtggccagcagccgcgcggggaagctgttcccggtgtgccacgacagcgatgagagtgacactgccaaggccgtggaggtgcagaacaagcccatgattgaatgggccctggggggcttccagccttctggccctaagggcctggagccaccagaagaagagaagaatccctacaaagaagtgtacacggacatgtgggtggaacctgaggcagctgcctacgcaccacctccaccagccaaaaagccccggaagagcacagcggagaagcccaaggtcaaggagattattgatgagcgcacaagagagcggctggtgtacgaggtgcggcagaagtgccggaacattgaggacatctgcatctcctgtgggagcctcaatgttaccctggaacaccccctcttcgttggaggaatgtgccaaaactgcaagaactgctttctggagtgtgcgtaccagtacgacgacgacggctaccagtcctactgcaccatctgctgtgggggccgtgaggtgctcatgtgcggaaacaacaactgctgcaggtgcttttgcgtggagtgtgtggacctcttggtggggccgggggctgcccaggcagccattaaggaagacccctggaactgctacatgtgcgggcacaagggtacctacgggctgctgcggcggcgagaggactggccctcccggctccagatgttcttcgctaataaccacgaccaggaatttgaccctccaaaggtttacccacctgtcccagctgagaagaggaagcccatccgggtgctgtctctctttgatggaatcgctacagggctcctggtgctgaaggacttgggcattcaggtggaccgctacattgcctcggaggtgtgtgaggactccatcacggtgggcatggtgcggcaccaggggaagatcatgtacgtcggggacgtccgcagcgtcacacagaagcatatccaggagtggggcccattcgatctggtgattgggggcagtccctgcaatgacctctccatcgtcaaccctgctcgcaagggcctctacgagggcactggccggctcttctttgagttctaccgcctcctgcatgatgcgcggcccaaggagggagatgatcgccccttcttctggctctttgagaatgtggtggccatgggcgttagtgacaagagggacatctcgcgatttctcgagtccaaccctgtgatgattgatgccaaagaagtgtcagctgcacacagggcccgctacttctggggtaaccttcccggtatgaacaggccgttggcatccactgtgaatgataagctggagctgcaggagtgtctggagcatggcaggatagccaagttcagcaaagtgaggaccattactacgaggtcaaactccataaagcagggcaaagaccagcattttcctgtcttcatgaatgagaaagaggacatcttatggtgcactgaaatggaaagggtatttggtttcccagtccactatactgacgtctccaacatgagccgcttggcgaggcagagactgctgggccggtcatggagcgtgccagtcatccgccacctcttcgctccgctgaaggagtattttgcgtgtgtgtaagggacatgggggcaaactgaggtagcgacacaaagttaaacaaacaaacaaaaaacacaaaacataataaaacaccaagaacatgaggatggagagaagtatcagcacccagaagagaaaaaggaatttaaaacaaaaaccacagaggcggaaataccggagggctttgccttgcgaaaagggttggacatcatctcctgatttttcaatgttattcttcagtcctatttaaaaacaaaaccaagctcccttcccttcctcccccttcccttttttttcggtcagaccttttattttctactcttttcagaggggttttctgtttgtttgggttttgtttcttgctgtgactgaaacaagaaggttattgcagcaaaaatcagtaacaaaaaatagtaacaataccttgcagaggaaaggtgggagagaggaaaaaaggaaattctatagaaatctatatattgggttgtttttttttttgttttttgttttttttttttgggtttttttttttactatatatcttttttttgttgtctctagcctgatcagataggagcacaagcaggggacggaaagagagagacactcaggcggcagcattccctcccagccactgagctgtcgtgccagcaccattcctggtcacgcaaaacagaacccagttagcagcagggagacgagaacaccacacaagacatttttctacagtatttcaggtgcctaccacacaggaaaccttgaagaaaatcagtttctagaagccgctgttacctcttgtttacagtttatatatatatgatagatatgagatatatatataaaaggtactgttaactactgtacaacccgacttcataatggtgctttcaaacagcgagatgagtaaaaacatcagcttccacgttgccttctgcgcaaagggtttcaccaaggatggagaaagggagacagcttgcagatggcgcgttctcacggtgggctcttccccttggtttgtaacgaagtgaaggaggagaacttgggagccaggttctccctgccaaaaagggggctagatgaggtggtcgggcccgtggacagctgagagtgggattcatccagactcatgcaataaccctttgattgttttctaaaaggagactccctcggcaagatggcagagggtacggagtcttcaggcccagtttctcactttagccaattcgagggctccttgtggtgggatcagaactaatccagagtgtgggaaagtgacagtcaaaaccccacctggagcaaataaaaaaacatacaaaacgta

SEQ ID NO: 8605 - DNA, 4279 bp, Homo sapiens
  source 1..4279: mol_type = unassigned DNA
gacgcggcgccgcggcaccagggcgcgcagccgggccggcccgaccccaccggccatacggtggagccatcgaagcccccacccacaggctgacagaggcaccgttcaccagagggctcaacaccgggatctatgtttaagttttaactctcgcctccaaagaccacgataattccttccccaaagcccagcagccccccagccccgcgcagccccagcctgcctcccggcgcccagatgcccgccatgccctccagcggccccggggacaccagcagctctgctgcggagcgggaggaggaccgaaaggacggagaggagcaggaggagccgcgtggcaaggaggagcgccaagagcccagcaccacggcacggaaggtggggcggcctgggaggaagcgcaagcaccccccggtggaaagcggtgacacgccaaaggaccctgcggtgatctccaagtccccatccatggcccaggactcaggcgcctcagagctattacccaatggggacttggagaagcggagtgagccccagccagaggaggggagccctgctggggggcagaagggcggggccccagcagagggagagggtgcagctgagaccctgcctgaagcctcaagagcagtggaaaatggctgctgcacccccaaggagggccgaggagcccctgcagaagcgggcaaagaacagaaggagaccaacatcgaatccatgaaaatggagggctcccggggccggctgcggggtggcttgggctgggagtccagcctccgtcagcggcccatgccgaggctcaccttccaggcgggggacccctactacatcagcaagcgcaagcgggacgagtggctggcacgctggaaaagggaggctgagaagaaagccaaggtcattgcaggaatgaatgctgtggaagaaaaccaggggcccggggagtctcagaaggtggaggaggccagccctcctgctgtgcagcagcccactgaccccgcatcccccactgtggctaccacgcctgagcccgtggggtccgatgctggggacaagaatgccaccaaagcaggcgatgacgagccagagtacgaggacggccggggctttggcattggggagctggtgtgggggaaactgcggggcttctcctggtggccaggccgcattgtgtcttggtggatgacgggccggagccgagcagctgaaggcacccgctgggtcatgtggttcggagacggcaaattctcagtggtgtgtgttgagaagctgatgccgctgagctcgttttgcagtgcgttccaccaggccacgtacaacaagcagcccatgtaccgcaaagccatctacgaggtcctgcaggtggccagcagccgcgcggggaagctgttcccggtgtgccacgacagcgatgagagtgacactgccaaggccgtggaggtgcagaacaagcccatgattgaatgggccctggggggcttccagccttctggccctaagggcctggagccaccagaagaagagaagaatccctacaaagaagtgtacacggacatgtgggtggaacctgaggcagctgcctacgcaccacctccaccagccaaaaagccccggaagagcacagcggagaagcccaaggtcaaggagattattgatgagcgcacaagagagcggctggtgtacgaggtgcggcagaagtgccggaacattgaggacatctgcatctcctgtgggagcctcaatgttaccctggaacaccccctcttcgttggaggaatgtgccaaaactgcaagaactgctttctggagtgtgcgtaccagtacgacgacgacggctaccagtcctactgcaccatctgctgtgggggccgtgaggtgctcatgtgcggaaacaacaactgctgcaggtgcttttgcgtggagtgtgtggacctcttggtggggccgggggctgcccaggcagccattaaggaagacccctggaactgctacatgtgcgggcacaagggtacctacgggctgctgcggcggcgagaggactggccctcccggctccagatgttcttcgctaataaccacgaccaggaatttgaccctccaaaggtttacccacctgtcccagctgagaagaggaagcccatccgggtgctgtctctctttgatggaatcgctacagggctcctggtgctgaaggacttgggcattcaggtggaccgctacattgcctcggaggtgtgtgaggactccatcacggtgggcatggtgcggcaccaggggaagatcatgtacgtcggggacgtccgcagcgtcacacagaagcatatccaggagtggggcccattcgatctggtgattgggggcagtccctgcaatgacctctccatcgtcaaccctgctcgcaagggcctctacgagggcactggccggctcttctttgagttctaccgcctcctgcatgatgcgcggcccaaggagggagatgatcgccccttcttctggctctttgagaatgtggtggccatgggcgttagtgacaagagggacatctcgcgatttctcgagtccaaccctgtgatgattgatgccaaagaagtgtcagctgcacacagggcccgctacttctggggtaaccttcccggtatgaacaggccgttggcatccactgtgaatgataagctggagctgcaggagtgtctggagcatggcaggatagccaagttcagcaaagtgaggaccattactacgaggtcaaactccataaagcagggcaaagaccagcattttcctgtcttcatgaatgagaaagaggacatcttatggtgcactgaaatggaaagggtatttggtttcccagtccactatactgacgtctccaacatgagccgcttggcgaggcagagactgctgggccggtcatggagcgtgccagtcatccgccacctcttcgctccgctgaaggagtattttgcgtgtgtgtaagggacatgggggcaaactgaggtagcgacacaaagttaaacaaacaaacaaaaaacacaaaacataataaaacaccaagaacatgaggatggagagaagtatcagcacccagaagagaaaaaggaatttaaaacaaaaaccacagaggcggaaataccggagggctttgccttgcgaaaagggttggacatcatctcctgatttttcaatgttattcttcagtcctatttaaaaacaaaaccaagctcccttcccttcctcccccttcccttttttttcggtcagaccttttattttctactcttttcagaggggttttctgtttgtttgggttttgtttcttgctgtgactgaaacaagaaggttattgcagcaaaaatcagtaacaaaaaatagtaacaataccttgcagaggaaaggtgggagagaggaaaaaaggaaattctatagaaatctatatattgggttgtttttttttttgttttttgttttttttttttgggtttttttttttactatatatcttttttttgttgtctctagcctgatcagataggagcacaagcaggggacggaaagagagagacactcaggcggcagcattccctcccagccactgagctgtcgtgccagcaccattcctggtcacgcaaaacagaacccagttagcagcagggagacgagaacaccacacaagacatttttctacagtatttcaggtgcctaccacacaggaaaccttgaagaaaatcagtttctagaagccgctgttacctcttgtttacagtttatatatatatgatagatatgagatatatatataaaaggtactgttaactactgtacaacccgacttcataatggtgctttcaaacagcgagatgagtaaaaacatcagcttccacgttgccttctgcgcaaagggtttcaccaaggatggagaaagggagacagcttgcagatggcgcgttctcacggtgggctcttccccttggtttgtaacgaagtgaaggaggagaacttgggagccaggttctccctgccaaaaagggggctagatgaggtggtcgggcccgtggacagctgagagtgggattcatccagactcatgcaataaccctttgattgttttctaaaaggagactccctcggcaagatggcagagggtacggagtcttcaggcccagtttctcactttagccaattcgagggctccttgtggtgggatcagaactaatccagagtgtgggaaagtgacagtcaaaaccccacctggagcaaataaaaaaacatacaaaacgta

SEQ ID NO: 8606 - DNA, 3589 bp, Homo sapiens
  source 1..3589: mol_type = unassigned DNA
ccgcccccagccccatcgcccccttcccctcccccaagacgggcagctacttccagagcttcagggccgcggctcacacctgagcgcgactgcagaggggctgcacctggccttatggggatcctggagcgggttgtgagaaggaatgggcgcgtggatcgtagcctgaaagacgagtgtgatacggctgagaagaaagccaaggtcattgcaggaatgaatgctgtggaagaaaaccaggggcccggggagtctcagaaggtggaggaggccagccctcctgctgtgcagcagcccactgaccccgcatcccccactgtggctaccacgcctgagcccgtggggtccgatgctggggacaagaatgccaccaaagcaggcgatgacgagccagagtacgaggacggccggggctttggcattggggagctggtgtgggggaaactgcggggcttctcctggtggccaggccgcattgtgtcttggtggatgacgggccggagccgagcagctgaaggcacccgctgggtcatgtggttcggagacggcaaattctcagtggtgtgtgttgagaagctgatgccgctgagctcgttttgcagtgcgttccaccaggccacgtacaacaagcagcccatgtaccgcaaagccatctacgaggtcctgcaggtggccagcagccgcgcggggaagctgttcccggtgtgccacgacagcgatgagagtgacactgccaaggccgtggaggtgcagaacaagcccatgattgaatgggccctggggggcttccagccttctggccctaagggcctggagccaccagaagaagagaagaatccctacaaagaagtgtacacggacatgtgggtggaacctgaggcagctgcctacgcaccacctccaccagccaaaaagccccggaagagcacagcggagaagcccaaggtcaaggagattattgatgagcgcacaagagagcggctggtgtacgaggtgcggcagaagtgccggaacattgaggacatctgcatctcctgtgggagcctcaatgttaccctggaacaccccctcttcgttggaggaatgtgccaaaactgcaagaactgctttctggagtgtgcgtaccagtacgacgacgacggctaccagtcctactgcaccatctgctgtgggggccgtgaggtgctcatgtgcggaaacaacaactgctgcaggtgcttttgcgtggagtgtgtggacctcttggtggggccgggggctgcccaggcagccattaaggaagacccctggaactgctacatgtgcgggcacaagggtacctacgggctgctgcggcggcgagaggactggccctcccggctccagatgttcttcgctaataaccacgaccaggaatttgaccctccaaaggtttacccacctgtcccagctgagaagaggaagcccatccgggtgctgtctctctttgatggaatcgctacagggctcctggtgctgaaggacttgggcattcaggtggaccgctacattgcctcggaggtgtgtgaggactccatcacggtgggcatggtgcggcaccaggggaagatcatgtacgtcggggacgtccgcagcgtcacacagaagcatatccaggagtggggcccattcgatctggtgattgggggcagtccctgcaatgacctctccatcgtcaaccctgctcgcaagggcctctacgagggcactggccggctcttctttgagttctaccgcctcctgcatgatgcgcggcccaaggagggagatgatcgccccttcttctggctctttgagaatgtggtggccatgggcgttagtgacaagagggacatctcgcgatttctcgagtccaaccctgtgatgattgatgccaaagaagtgtcagctgcacacagggcccgctacttctggggtaaccttcccggtatgaacaggccgttggcatccactgtgaatgataagctggagctgcaggagtgtctggagcatggcaggatagccaagttcagcaaagtgaggaccattactacgaggtcaaactccataaagcagggcaaagaccagcattttcctgtcttcatgaatgagaaagaggacatcttatggtgcactgaaatggaaagggtatttggtttcccagtccactatactgacgtctccaacatgagccgcttggcgaggcagagactgctgggccggtcatggagcgtgccagtcatccgccacctcttcgctccgctgaaggagtattttgcgtgtgtgtaagggacatgggggcaaactgaggtagcgacacaaagttaaacaaacaaacaaaaaacacaaaacataataaaacaccaagaacatgaggatggagagaagtatcagcacccagaagagaaaaaggaatttaaaacaaaaaccacagaggcggaaataccggagggctttgccttgcgaaaagggttggacatcatctcctgatttttcaatgttattcttcagtcctatttaaaaacaaaaccaagctcccttcccttcctcccccttcccttttttttcggtcagaccttttattttctactcttttcagaggggttttctgtttgtttgggttttgtttcttgctgtgactgaaacaagaaggttattgcagcaaaaatcagtaacaaaaaatagtaacaataccttgcagaggaaaggtgggagagaggaaaaaaggaaattctatagaaatctatatattgggttgtttttttttttgttttttgttttttttttttgggtttttttttttactatatatcttttttttgttgtctctagcctgatcagataggagcacaagcaggggacggaaagagagagacactcaggcggcagcattccctcccagccactgagctgtcgtgccagcaccattcctggtcacgcaaaacagaacccagttagcagcagggagacgagaacaccacacaagacatttttctacagtatttcaggtgcctaccacacaggaaaccttgaagaaaatcagtttctagaagccgctgttacctcttgtttacagtttatatatatatgatagatatgagatatatatataaaaggtactgttaactactgtacaacccgacttcataatggtgctttcaaacagcgagatgagtaaaaacatcagcttccacgttgccttctgcgcaaagggtttcaccaaggatggagaaagggagacagcttgcagatggcgcgttctcacggtgggctcttccccttggtttgtaacgaagtgaaggaggagaacttgggagccaggttctccctgccaaaaagggggctagatgaggtggtcgggcccgtggacagctgagagtgggattcatccagactcatgcaataaccctttgattgttttctaaaaggagactccctcggcaagatggcagagggtacggagtcttcaggcccagtttctcactttagccaattcgagggctccttgtggtgggatcagaactaatccagagtgtgggaaagtgacagtcaaaaccccacctggagcaaataaaaaaacatacaaaacgta

SEQ ID NO: 8607 - DNA, 2300 bp, Homo sapiens
  source 1..2300: mol_type = unassigned DNA
ccgcccccagccccatcgcccccttcccctcccccaagacgggcagctacttccagagcttcagggccgcggctcacacctgagcgcgactgcagaggggctgcacctggccttatgggctgagaagaaagccaaggtcattgcaggaatgaatgctgtggaagaaaaccaggggcccggggagtctcagaaggtggaggaggccagccctcctgctgtgcagcagcccactgaccccgcatcccccactgtggctaccacgcctgagcccgtggggtccgatgctggggacaagaatgccaccaaagcaggcgatgacgagccagagtacgaggacggccggggctttggcattggggagctggtgtgggggaaactgcggggcttctcctggtggccaggccgcattgtgtcttggtggatgacgggccggagccgagcagctgaaggcacccgctgggtcatgtggttcggagacggcaaattctcagtggtgtgtgttgagaagctgatgccgctgagctcgttttgcagtgcgttccaccaggccacgtacaacaagcagcccatgtaccgcaaagccatctacgaggtcctgcaggtggccagcagccgcgcggggaagctgttcccggtgtgccacgacagcgatgagagtgacactgccaaggccgtggaggtgcagaacaagcccatgattgaatgggccctggggggcttccagccttctggccctaagggcctggagccaccagaagaagagaagaatccctacaaagaagtgtacacggacatgtgggtggaacctgaggcagctgcctacgcaccacctccaccagccaaaaagccccggaagagcacagcggagaagcccaaggtcaaggagattattgatgagcgcacaagagagcggctggtgtacgaggtgcggcagaagtgccggaacattgaggacatctgcatctcctgtgggagcctcaatgttaccctggaacaccccctcttcgttggaggaatgtgccaaaactgcaagaactgctttctggagtgtgcgtaccagtacgacgacgacggctaccagtcctactgcaccatctgctgtgggggccgtgaggtgctcatgtgcggaaacaacaactgctgcaggtgcttttgcgtggagtgtgtggacctcttggtggggccgggggctgcccaggcagccattaaggaagacccctggaactgctacatgtgcgggcacaagggtacctacgggctgctgcggcggcgagaggactggccctcccggctccagatgttcttcgctaataaccacgaccaggaatttgaccctccaaaggtttacccacctgtcccagctgagaagaggaagcccatccgggtgctgtctctctttgatggaatcgctacagggctcctggtgctgaaggacttgggcattcaggtggaccgctacattgcctcggaggtgtgtgaggactccatcacggtgggcatggtgcggcaccaggggaagatcatgtacgtcggggacgtccgcagcgtcacacagaagcatatccaggagtggggcccattcgatctggtgattgggggcagtccctgcaatgacctctccatcgtcaaccctgctcgcaagggcctctacgagggcactggccggctcttctttgagttctaccgcctcctgcatgatgcgcggcccaaggagggagatgatcgccccttcttctggctctttgagaatgtggtggccatgggcgttagtgacaagagggacatctcgcgatttctcgagtccaaccctgtgatgattgatgccaaagaagtgtcagctgcacacagggcccgctacttctggggtaaccttcccggtatgaacaggccgttggcatccactgtgaatgataagctggagctgcaggagtgtctggagcatggcaggatagccaagttcagcaaagtgaggaccattactacgaggtcaaactccataaagcagggcaaagaccagcattttcctgtcttcatgaatgagaaagaggacatcttatggtgcactgaaatggaaagggtatttggtttcccagtccactatactgacgtctccaacatgagccgcttggcgaggcagagactgctgggccggtcatggagcgtgccagtcatccgccacctcttcgctccgctgaaggagtattttgcgtgtgtgtaagggacatgggggcaaactgaggtagcgacacaaagttaaacaaacaaacaaaaaacacaaaacataataaaacaccaagaac

SEQ ID NO: 8608 - DNA, 1775 bp, Homo sapiens
  source 1..1775: mol_type = unassigned DNA
gcagtgggctctggcggaggtcgggagaactgcagggcgaaggccgccgggggctccgcgggctgcggggggaggcacttgacaccggcccggggagaggaggggccgctgtccctgcggccagtgctggatgcggggacccagcgcagaagcagcgccaggtggagccatcgaagcccccacccacaggctgacagaggcaccgttcaccagagggctcaacaccgggatctatgtttaagttttaactctcgcctccaaagaccacgataattccttccccaaagcccagcagccccccagccccgcgcagccccagcctgcctcccggcgcccagatgcccgccatgccctccagcggccccggggacaccagcagctctgctgcggagcgggaggaggaccgaaaggacggagaggagcaggaggagccgcgtggcaaggaggagcgccaagagcccagcaccacggcacggaaggtggggcggcctgggaggaagcgcaagcaccccccggtggaaagcggtgacacgccaaaggaccctgcggtgatctccaagtccccatccatggcccaggactcaggcgcctcagagctattacccaatggggacttggagaagcggagtgagccccagccagaggaggggagccctgctggggggcagaagggcggggccccagcagagggagagggtgcagctgagaccctgcctgaagcctcaagagcagtggaaaatggctgctgcacccccaaggagggccgaggagcccctgcagaagcgggtgagtcctcagcaccaggggcagcctcttctgggcccaccagcataccctgagagtcagggacttggctctccagcaggtcccaggaaggatggtctgggtcgtggctaaaggtctgcttgccaaggctatggcctggaggctactggctggatgcagcctgcgcatatgttttatttggcccatagagtgttttaaacatttaaaaaattagttgccagtatttaaaaatcaaaaaatttcacataaaaatctggagttttggcttctcatgaaaaaaaaaaaagctagatctggcaacagcgggctttcataacgccaacgattgctagactgggataatggcggtccctccatcgccttctgtggctggttgtgggccttagttttctgcagctctacctggcctgcttactctcccacgtgccatgcagttcctgggggttgctgtatttgtagcccctggcctgggcactcaagggcagcagataccctgtttgcctccctgagtgcagaggtcctgagcccaccctagttgggctgactcaactggaaatttggttgtgacagtggcgtggggagagggctgggtgattgtattctgtgtactgcccagcccaggcctcttcatctggggactttttggcctaaccctggaagcctggaaagttgcccacttttctctttcaggttaagccagcaatttcagggccaaccgagctgtaaacatgttagtaatgaggacaactagcatttgtacagggcttcacagtttacaaagcgctttctcatacattatcacatttgatcctcccagggccctgccaggttgttttgcatatgtgcattttaatttcaaaaagtcttccttccaagcgtgtatgatgaaatgagtaaattgattaattggcgtaacttattttgcatggatccaacctaatgttcatgcaggatagagaacatttccagaatacaaatttccaaactta

SEQ ID NO: 8609 - DNA, 4255 bp, Homo sapiens
  source 1..4255: mol_type = unassigned DNA
gaagggagagagcaaacaaaggggtcaggagggaaaataatgcactggcttcctgagcccctgcagaggctgagcagggagagggggccagggccagaggggacagaggctggcggcagacgggccgggacaggcaggtcctaaatggcattgtttgaaggggccggctaattgcacagagcagtctgagcctgagaccccagccctggcctccccactctgtcctgggtgctggcgtctgagccttcgggacagcctgtccacatggaaccaagtcctgagcctccaagcttggaaagcatgaagggagacaccaggcatctcaatggagaggaggacgccggcgggagggaagactcgatcctcgtcaacggggcctgcagcgaccagtcctccgactcgcccccaatcctggaggctatccgcaccccggagatcagaggccgaagatcaagctcgcgactctccaagagggaggtgtccagtctgctaagctacacacaggacttgacaggcgatggcgacggggaagatggggatggctctgacaccccagtcatgccaaagctcttccgggaaaccaggactcgttcagaaagcccagctgtccgaactcgaaataacaacagtgtctccagccgggagaggcacaggccttccccacgttccacccgaggccggcagggccgcaaccatgtggacgagtcccccgtggagttcccggctaccaggtccctgagacggcgggcaacagcatcggcaggaacgccatggccgtcccctcccagctcttaccttaccatcgacctcacagacgacacagaggacacacatgggacgccccagagcagcagtaccccctacgcccgcctagcccaggacagccagcaggggggcatggagtccccgcaggtggaggcagacagtggagatggagacagttcagagtatcaggatgggaaggagtttggaataggggacctcgtgtggggaaagatcaagggcttctcctggtggcccgccatggtggtgtcttggaaggccacctccaagcgacaggctatgtctggcatgcggtgggtccagtggtttggcgatggcaagttctccgaggtctctgcagacaaactggtggcactggggctgttcagccagcactttaatttggccaccttcaataagctcgtctcctatcgaaaagccatgtaccatgctctggagaaagctagggtgcgagctggcaagaccttccccagcagccctggagactcattggaggaccagctgaagcccatgttggagtgggcccacgggggcttcaagcccactgggatcgagggcctcaaacccaacaacacgcaaccagagaacaagactcgaagacgcacagctgacgactcagccacctctgactactgccccgcacccaagcgcctcaagacaaattgctataacaacggcaaagaccgaggggatgaagatcagagccgagaacaaatggcttcagatgttgccaacaacaagagcagcctggaagatggctgtttgtcttgtggcaggaaaaaccccgtgtccttccaccctctctttgagggggggctctgtcagacatgccgggatcgcttccttgagctgttttacatgtatgatgacgatggctatcagtcttactgcactgtgtgctgcgagggccgagagctgctgctttgcagcaacacgagctgctgccggtgtttctgtgtggagtgcctggaggtgctggtgggcacaggcacagcggccgaggccaagcttcaggagccctggagctgttacatgtgtctcccgcagcgctgtcatggcgtcctgcggcgccggaaggactggaacgtgcgcctgcaggccttcttcaccagtgacacggggcttgaatatgaagcccccaagctgtaccctgccattcccgcagcccgaaggcggcccattcgagtcctgtcattgtttgatggcatcgcgacaggctacctagtcctcaaagagttgggcataaaggtaggaaagtacgtcgcttctgaagtgtgtgaggagtccattgctgttggaaccgtgaagcacgaggggaatatcaaatacgtgaacgacgtgaggaacatcacaaagaaaaatattgaagaatggggcccatttgacttggtgattggcggaagcccatgcaacgatctctcaaatgtgaatccagccaggaaaggcctgtatgagggtacaggccggctcttcttcgaattttaccacctgctgaattactcacgccccaaggagggtgatgaccggccgttcttctggatgtttgagaatgttgtagccatgaaggttggcgacaagagggacatctcacggttcctggagtgtaatccagtgatgattgatgccatcaaagtttctgctgctcacagggcccgatacttctggggcaacctacccgggatgaacaggcccgtgatagcatcaaagaatgataaactcgagctgcaggactgcttggaatacaataggatagccaagttaaagaaagtacagacaataaccaccaagtcgaactcgatcaaacaggggaaaaaccaacttttccctgttgtcatgaatggcaaagaagatgttttgtggtgcactgagctcgaaaggatctttggctttcctgtgcactacacagacgtgtccaacatgggccgtggtgcccgccagaagctgctgggaaggtcctggagcgtgcctgtcatccgacacctcttcgcccctctgaaggactactttgcatgtgaatagttccagccaggccccaagcccactggggtgtgtggcagagccaggacccaggaggtgtgattcctgaaggcatccccaggccctgctcttcctcagctgtgtgggtcataccgtgtacctcagttccctcttgctcagtgggggcagagccacctgactcttgcaggggtagcctgaggtgccgcctccttgtgcacaaatcagacctggctgcttggagcagcctaacacggtgctcattttttcttctcctaaaactttaaaacttgaagtaggtagcaacgtggctttttttttttcccttcctgggtctaccactcagagaaacaatggctaagataccaaaaccacagtgccgacagctctccaatactcaggttaatgctgaaaaatcatccaagacagttattgcaagagtttaatttttgaaaactggctactgctctgtgtttacagacgtgtgcagttgtaggcatgtagctacaggacatttttaagggcccaggatcgttttttcccagggcaagcagaagagaaaatgttgtatatgtcttttacccggcacattccccttgcctaaatacaagggctggagtctgcacgggacctattagagtattttccacaatgatgatgatttcagcagggatgacgtcatcatcacattcagggctattttttcccccacaaacccaagggcaggggccactcttagctaaatccctccccgtgactgcaatagaaccctctggggagctcaggaaggggtgtgctgagttctataatataagctgccatatattttgtagacaagtatggctcctccatatctccctcttccctaggagaggagtgtgaagcaaggagcttagataagacaccccctcaaacccattccctctccaggagacctaccctccacaggcacaggtccccagatgagaagtctgctaccctcatttctcatctttttactaaactcagaggcagtgacagcagtcagggacagacatacatttctcataccttccccacatctgagagatgacagggaaaactgcaaagctcggtgctccctttggagattttttaatccttttttattccataagaagtcgtttttagggagaacgggaattcagacaagctgcatttcagaaatgctgtcataatggtttttaacaccttttactcttcttactggtgctattttgtagaataaggaacaacgttgacaagttttgtggggctttttatacactttttaaaatctcaaacttctatttttatgtttaacgttttcattaaaattttttttgtaactggagccacgacgtaacaaatatggggaaaaaactgtgccttgtttcaacagtttttgctaatttttaggctgaaagatgacggatgcctagagtttaccttatgtttaattaaaatcagtatttgtcta

SEQ ID NO: 8610 - DNA, 4336 bp, Homo sapiens
  source 1..4336: mol_type = unassigned DNA
acccactcccgctgccccgtccggcccgcgccgcttcctcgcagcagctgctcccggctccgcggccgcagcccgcgtggacgctccgagcgccccccgacggacgggaccggctccctggcggtcgggcgagcgggcggcaacgctgcccggccggcagcgctggggttaagtggcccaagtaaacctagctcggcgatcggcgccggagattcgcgagcccagcgccctgcacggccgccagccggcctcccgccagccagccccgacccgcggctccgccgcccagccgcgccccagccagccctgcggcaggaaagcatgaagggagacaccaggcatctcaatggagaggaggacgccggcgggagggaagactcgatcctcgtcaacggggcctgcagcgaccagtcctccgactcgcccccaatcctggaggctatccgcaccccggagatcagaggccgaagatcaagctcgcgactctccaagagggaggtgtccagtctgctaagctacacacaggacttgacaggcgatggcgacggggaagatggggatggctctgacaccccagtcatgccaaagctcttccgggaaaccaggactcgttcagaaagcccagctgtccgaactcgaaataacaacagtgtctccagccgggagaggcacaggccttccccacgttccacccgaggccggcagggccgcaaccatgtggacgagtcccccgtggagttcccggctaccaggtccctgagacggcgggcaacagcatcggcaggaacgccatggccgtcccctcccagctcttaccttaccatcgacctcacagacgacacagaggacacacatgggacgccccagagcagcagtaccccctacgcccgcctagcccaggacagccagcaggggggcatggagtccccgcaggtggaggcagacagtggagatggagacagttcagagtatcaggatgggaaggagtttggaataggggacctcgtgtggggaaagatcaagggcttctcctggtggcccgccatggtggtgtcttggaaggccacctccaagcgacaggctatgtctggcatgcggtgggtccagtggtttggcgatggcaagttctccgaggtctctgcagacaaactggtggcactggggctgttcagccagcactttaatttggccaccttcaataagctcgtctcctatcgaaaagccatgtaccatgctctggagaaagctagggtgcgagctggcaagaccttccccagcagccctggagactcattggaggaccagctgaagcccatgttggagtgggcccacgggggcttcaagcccactgggatcgagggcctcaaacccaacaacacgcaaccagtggttaataagtcgaaggtgcgtcgtgcaggcagtaggaaattagaatcaaggaaatacgagaacaagactcgaagacgcacagctgacgactcagccacctctgactactgccccgcacccaagcgcctcaagacaaattgctataacaacggcaaagaccgaggggatgaagatcagagccgagaacaaatggcttcagatgttgccaacaacaagagcagcctggaagatggctgtttgtcttgtggcaggaaaaaccccgtgtccttccaccctctctttgagggggggctctgtcagacatgccgggatcgcttccttgagctgttttacatgtatgatgacgatggctatcagtcttactgcactgtgtgctgcgagggccgagagctgctgctttgcagcaacacgagctgctgccggtgtttctgtgtggagtgcctggaggtgctggtgggcacaggcacagcggccgaggccaagcttcaggagccctggagctgttacatgtgtctcccgcagcgctgtcatggcgtcctgcggcgccggaaggactggaacgtgcgcctgcaggccttcttcaccagtgacacggggcttgaatatgaagcccccaagctgtaccctgccattcccgcagcccgaaggcggcccattcgagtcctgtcattgtttgatggcatcgcgacaggctacctagtcctcaaagagttgggcataaaggtaggaaagtacgtcgcttctgaagtgtgtgaggagtccattgctgttggaaccgtgaagcacgaggggaatatcaaatacgtgaacgacgtgaggaacatcacaaagaaaaatattgaagaatggggcccatttgacttggtgattggcggaagcccatgcaacgatctctcaaatgtgaatccagccaggaaaggcctgtatgagggtacaggccggctcttcttcgaattttaccacctgctgaattactcacgccccaaggagggtgatgaccggccgttcttctggatgtttgagaatgttgtagccatgaaggttggcgacaagagggacatctcacggttcctggagtgtaatccagtgatgattgatgccatcaaagtttctgctgctcacagggcccgatacttctggggcaacctacccgggatgaacaggcccgtgatagcatcaaagaatgataaactcgagctgcaggactgcttggaatacaataggatagccaagttaaagaaagtacagacaataaccaccaagtcgaactcgatcaaacaggggaaaaaccaacttttccctgttgtcatgaatggcaaagaagatgttttgtggtgcactgagctcgaaaggatctttggctttcctgtgcactacacagacgtgtccaacatgggccgtggtgcccgccagaagctgctgggaaggtcctggagcgtgcctgtcatccgacacctcttcgcccctctgaaggactactttgcatgtgaatagttccagccaggccccaagcccactggggtgtgtggcagagccaggacccaggaggtgtgattcctgaaggcatccccaggccctgctcttcctcagctgtgtgggtcataccgtgtacctcagttccctcttgctcagtgggggcagagccacctgactcttgcaggggtagcctgaggtgccgcctccttgtgcacaaatcagacctggctgcttggagcagcctaacacggtgctcattttttcttctcctaaaactttaaaacttgaagtaggtagcaacgtggctttttttttttcccttcctgggtctaccactcagagaaacaatggctaagataccaaaaccacagtgccgacagctctccaatactcaggttaatgctgaaaaatcatccaagacagttattgcaagagtttaatttttgaaaactggctactgctctgtgtttacagacgtgtgcagttgtaggcatgtagctacaggacatttttaagggcccaggatcgttttttcccagggcaagcagaagagaaaatgttgtatatgtcttttacccggcacattccccttgcctaaatacaagggctggagtctgcacgggacctattagagtattttccacaatgatgatgatttcagcagggatgacgtcatcatcacattcagggctattttttcccccacaaacccaagggcaggggccactcttagctaaatccctccccgtgactgcaatagaaccctctggggagctcaggaaggggtgtgctgagttctataatataagctgccatatattttgtagacaagtatggctcctccatatctccctcttccctaggagaggagtgtgaagcaaggagcttagataagacaccccctcaaacccattccctctccaggagacctaccctccacaggcacaggtccccagatgagaagtctgctaccctcatttctcatctttttactaaactcagaggcagtgacagcagtcagggacagacatacatttctcataccttccccacatctgagagatgacagggaaaactgcaaagctcggtgctccctttggagattttttaatccttttttattccataagaagtcgtttttagggagaacgggaattcagacaagctgcatttcagaaatgctgtcataatggtttttaacaccttttactcttcttactggtgctattttgtagaataaggaacaacgttgacaagttttgtggggctttttatacactttttaaaatctcaaacttctatttttatgtttaacgttttcattaaaattttttttgtaactggagccacgacgtaacaaatatggggaaaaaactgtgccttgtttcaacagtttttgctaatttttaggctgaaagatgacggatgcctagagtttaccttatgtttaattaaaatcagtatttgtcta

SEQ ID NO: 8611 - DNA, 3932 bp, Homo sapiens
  source 1..3932: mol_type = unassigned DNA
gcgccctgcacggccgccagccggcctcccgccagccagccccgacccgcggctccgccgcccagccgcgccccagccagccctgcggcaggaaagcatgaagggagacaccaggcatctcaatggagaggaggacgccggcgggagggaagactcgatcctcgtcaacggggcctgcagcgaccagtcctccgactcgcccccaatcctggaggctatccgcaccccggagatcagaggccgaagatcaagctcgcgactctccaagagggaggtgtccagtctgctaagctacacacaggacttgacaggcgatggcgacggggaagatggggatggctctgacaccccagtcatgccaaagctcttccgggaaaccaggactcgttcagaaagcccagctgtccgaactcgaaataacaacagtgtctccagccgggagaggcacaggccttccccacgttccacccgaggccggcagggccgcaaccatgtggacgagtcccccgtggagttcccggctaccaggtccctgagacggcgggcaacagcatcggcaggaacgccatggccgtcccctcccagctcttaccttaccatcgacctcacagacgacacagaggacacacatgggacgccccagagcagcagtaccccctacgcccgcctagcccaggacagccagcaggggggcatggagtccccgcaggtggaggcagacagtggagatggagacagttcagagtatcaggatgggaaggagtttggaataggggacctcgtgtggggaaagatcaagggcttctcctggtggcccgccatggtggtgtcttggaaggccacctccaagcgacaggctatgtctggcatgcggtgggtccagtggtttggcgatggcaagttctccgaggtctctgcagacaaactggtggcactggggctgttcagccagcactttaatttggccaccttcaataagctcgtctcctatcgaaaagccatgtaccatgctctggagaaagctagggtgcgagctggcaagaccttccccagcagccctggagactcattggaggaccagctgaagcccatgttggagtgggcccacgggggcttcaagcccactgggatcgagggcctcaaacccaacaacacgcaaccagagaacaagactcgaagacgcacagctgacgactcagccacctctgactactgccccgcacccaagcgcctcaagacaaattgctataacaacggcaaagaccgaggggatgaagatcagagccgagaacaaatggcttcagatgttgccaacaacaagagcagcctggaagatggctgtttgtcttgtggcaggaaaaaccccgtgtccttccaccctctctttgagggggggctctgtcagacatgccgggatcgcttccttgagctgttttacatgtatgatgacgatggctatcagtcttactgcactgtgtgctgcgagggccgagagctgctgctttgcagcaacacgagctgctgccggtgtttctgtgtggagtgcctggaggtgctggtgggcacaggcacagcggccgaggccaagcttcaggagccctggagctgttacatgtgtctcccgcagcgctgtcatggcgtcctgcggcgccggaaggactggaacgtgcgcctgcaggccttcttcaccagtgacacggggcttgaatatgaagcccccaagctgtaccctgccattcccgcagcccgaaggcggcccattcgagtcctgtcattgtttgatggcatcgcgacaggctacctagtcctcaaagagttgggcataaaggtaggaaagtacgtcgcttctgaagtgtgtgaggagtccattgctgttggaaccgtgaagcacgaggggaatatcaaatacgtgaacgacgtgaggaacatcacaaagaaaaatattgaagaatggggcccatttgacttggtgattggcggaagcccatgcaacgatctctcaaatgtgaatccagccaggaaaggcctgtatgagggtacaggccggctcttcttcgaattttaccacctgctgaattactcacgccccaaggagggtgatgaccggccgttcttctggatgtttgagaatgttgtagccatgaaggttggcgacaagagggacatctcacggttcctggagtgtaatccagtgatgattgatgccatcaaagtttctgctgctcacagggcccgatacttctggggcaacctacccgggatgaacaggcccgtgatagcatcaaagaatgataaactcgagctgcaggactgcttggaatacaataggatagccaaggatctttggctttcctgtgcactacacagacgtgtccaacatgggccgtggtgcccgccagaagctgctgggaaggtcctggagcgtgcctgtcatccgacacctcttcgcccctctgaaggactactttgcatgtgaatagttccagccaggccccaagcccactggggtgtgtggcagagccaggacccaggaggtgtgattcctgaaggcatccccaggccctgctcttcctcagctgtgtgggtcataccgtgtacctcagttccctcttgctcagtgggggcagagccacctgactcttgcaggggtagcctgaggtgccgcctccttgtgcacaaatcagacctggctgcttggagcagcctaacacggtgctcattttttcttctcctaaaactttaaaacttgaagtaggtagcaacgtggctttttttttttcccttcctgggtctaccactcagagaaacaatggctaagataccaaaaccacagtgccgacagctctccaatactcaggttaatgctgaaaaatcatccaagacagttattgcaagagtttaatttttgaaaactggctactgctctgtgtttacagacgtgtgcagttgtaggcatgtagctacaggacatttttaagggcccaggatcgttttttcccagggcaagcagaagagaaaatgttgtatatgtcttttacccggcacattccccttgcctaaatacaagggctggagtctgcacgggacctattagagtattttccacaatgatgatgatttcagcagggatgacgtcatcatcacattcagggctattttttcccccacaaacccaagggcaggggccactcttagctaaatccctccccgtgactgcaatagaaccctctggggagctcaggaaggggtgtgctgagttctataatataagctgccatatattttgtagacaagtatggctcctccatatctccctcttccctaggagaggagtgtgaagcaaggagcttagataagacaccccctcaaacccattccctctccaggagacctaccctccacaggcacaggtccccagatgagaagtctgctaccctcatttctcatctttttactaaactcagaggcagtgacagcagtcagggacagacatacatttctcataccttccccacatctgagagatgacagggaaaactgcaaagctcggtgctccctttggagattttttaatccttttttattccataagaagtcgtttttagggagaacgggaattcagacaagctgcatttcagaaatgctgtcataatggtttttaacaccttttactcttcttactggtgctattttgtagaataaggaacaacgttgacaagttttgtggggctttttatacactttttaaaatctcaaacttctatttttatgtttaacgttttcattaaaattttttttgtaactggagccacgacgtaacaaatatggggaaaaaactgtgccttgtttcaacagtttttgctaatttttaggctgaaagatgacggatgcctagagtttaccttatgtttaattaaaatcagtatttgtct

SEQ ID NO: 8612 - DNA, 4048 bp, Homo sapiens
  source 1..4048: mol_type = unassigned DNA
cgcagcagctgctcccggctccgcggccgcagcccgcgtggacgctccgagcgccccccgacggacgggaccggctccctggcggtcgggcgagcgggcggcaacgctgcccggccggcagcgctggggttaagtggcccaagtaaacctagctcggcgatcggcgccggagattcgcgagcccagcgccctgcacggccgccagccggcctcccgccagccagccccgacccgcggctccgccgcccagccgcgccccagccagccctgcggcaggaaagcatgaagggagacaccaggcatctcaatggagaggaggacgccggcgggagggaagactcgatcctcgtcaacggggcctgcagcgaccagtcctccgactcgcccccaatcctggaggctatccgcaccccggagatcagaggccgaagatcaagctcgcgactctccaagagggaggtgtccagtctgctaagctacacacaggacttgacaggcgatggcgacggggaagatggggatggctctgacaccccagtcatgccaaagctcttccgggaaaccaggactcgttcagaaagcccagctgtccgaactcgaaataacaacagtgtctccagccgggagaggcacaggccttccccacgttccacccgaggccggcagggccgcaaccatgtggacgagtcccccgtggagttcccggctaccaggtccctgagacggcgggcaacagcatcggcaggaacgccatggccgtcccctcccagctcttaccttaccatcgacctcacagacgacacagaggacacacatgggacgccccagagcagcagtaccccctacgcccgcctagcccaggacagccagcaggggggcatggagtccccgcaggtggaggcagacagtggagatggagacagttcagagtatcaggatgggaaggagtttggaataggggacctcgtgtggggaaagatcaagggcttctcctggtggcccgccatggtggtgtcttggaaggccacctccaagcgacaggctatgtctggcatgcggtgggtccagtggtttggcgatggcaagttctccgaggtctctgcagacaaactggtggcactggggctgttcagccagcactttaatttggccaccttcaataagctcgtctcctatcgaaaagccatgtaccatgctctggagaaagctagggtgcgagctggcaagaccttccccagcagccctggagactcattggaggaccagctgaagcccatgttggagtgggcccacgggggcttcaagcccactgggatcgagggcctcaaacccaacaacacgcaaccagagaacaagactcgaagacgcacagctgacgactcagccacctctgactactgccccgcacccaagcgcctcaagacaaattgctataacaacggcaaagaccgaggggatgaagatcagagccgagaacaaatggcttcagatgttgccaacaacaagagcagcctggaagatggctgtttgtcttgtggcaggaaaaaccccgtgtccttccaccctctctttgagggggggctctgtcagacatgccgggatcgcttccttgagctgttttacatgtatgatgacgatggctatcagtcttactgcactgtgtgctgcgagggccgagagctgctgctttgcagcaacacgagctgctgccggtgtttctgtgtggagtgcctggaggtgctggtgggcacaggcacagcggccgaggccaagcttcaggagccctggagctgttacatgtgtctcccgcagcgctgtcatggcgtcctgcggcgccggaaggactggaacgtgcgcctgcaggccttcttcaccagtgacacggggcttgaatatgaagcccccaagctgtaccctgccattcccgcagcccgaaggcggcccattcgagtcctgtcattgtttgatggcatcgcgacaggctacctagtcctcaaagagttgggcataaaggtaggaaagtacgtcgcttctgaagtgtgtgaggagtccattgctgttggaaccgtgaagcacgaggggaatatcaaatacgtgaacgacgtgaggaacatcacaaagaaaaatattgaagaatggggcccatttgacttggtgattggcggaagcccatgcaacgatctctcaaatgtgaatccagccaggaaaggcctgtatgagggtacaggccggctcttcttcgaattttaccacctgctgaattactcacgccccaaggagggtgatgaccggccgttcttctggatgtttgagaatgttgtagccatgaaggttggcgacaagagggacatctcacggttcctggagtgtaatccagtgatgattgatgccatcaaagtttctgctgctcacagggcccgatacttctggggcaacctacccgggatgaacaggatctttggctttcctgtgcactacacagacgtgtccaacatgggccgtggtgcccgccagaagctgctgggaaggtcctggagcgtgcctgtcatccgacacctcttcgcccctctgaaggactactttgcatgtgaatagttccagccaggccccaagcccactggggtgtgtggcagagccaggacccaggaggtgtgattcctgaaggcatccccaggccctgctcttcctcagctgtgtgggtcataccgtgtacctcagttccctcttgctcagtgggggcagagccacctgactcttgcaggggtagcctgaggtgccgcctccttgtgcacaaatcagacctggctgcttggagcagcctaacacggtgctcattttttcttctcctaaaactttaaaacttgaagtaggtagcaacgtggctttttttttttcccttcctgggtctaccactcagagaaacaatggctaagataccaaaaccacagtgccgacagctctccaatactcaggttaatgctgaaaaatcatccaagacagttattgcaagagtttaatttttgaaaactggctactgctctgtgtttacagacgtgtgcagttgtaggcatgtagctacaggacatttttaagggcccaggatcgttttttcccagggcaagcagaagagaaaatgttgtatatgtcttttacccggcacattccccttgcctaaatacaagggctggagtctgcacgggacctattagagtattttccacaatgatgatgatttcagcagggatgacgtcatcatcacattcagggctattttttcccccacaaacccaagggcaggggccactcttagctaaatccctccccgtgactgcaatagaaccctctggggagctcaggaaggggtgtgctgagttctataatataagctgccatatattttgtagacaagtatggctcctccatatctccctcttccctaggagaggagtgtgaagcaaggagcttagataagacaccccctcaaacccattccctctccaggagacctaccctccacaggcacaggtccccagatgagaagtctgctaccctcatttctcatctttttactaaactcagaggcagtgacagcagtcagggacagacatacatttctcataccttccccacatctgagagatgacagggaaaactgcaaagctcggtgctccctttggagattttttaatccttttttattccataagaagtcgtttttagggagaacgggaattcagacaagctgcatttcagaaatgctgtcataatggtttttaacaccttttactcttcttactggtgctattttgtagaataaggaacaacgttgacaagttttgtggggctttttatacactttttaaaatctcaaacttctatttttatgtttaacgttttcattaaaattttttttgtaactggagccacgacgtaacaaatatggggaaaaaactgtgccttgtttcaacagtttttgctaatttttaggctgaaagatgacggatgcctagagtttaccttatgtttaattaaaatcagtatttgtcta

SEQ ID NO: 8613 - DNA, 4237 bp, Homo sapiens
  source 1..4237: mol_type = unassigned DNA
cgcagcagctgctcccggctccgcggccgcagcccgcgtggacgctccgagcgccccccgacggacgggaccggctccctggcggtcgggcgagcgggcggcaacgctgcccggccggcagcgctggggttaagtggcccaagtaaacctagctcggcgatcggcgccggagattcgcgagcccagcgccctgcacggccgccagccggcctcccgccagccagccccgacccgcggctccgccgcccagccgcgccccagccagccctgcggcaggaaagcatgaagggagacaccaggcatctcaatggagaggaggacgccggcgggagggaagactcgatcctcgtcaacggggcctgcagcgaccagtcctccgactcgcccccaatcctggaggctatccgcaccccggagatcagaggccgaagatcaagctcgcgactctccaagagggaggtgtccagtctgctaagctacacacaggacttgacaggcgatggcgacggggaagatggggatggctctgacaccccagtcatgccaaagctcttccgggaaaccaggactcgttcagaaagcccagctgtccgaactcgaaataacaacagtgtctccagccgggagaggcacaggccttccccacgttccacccgaggccggcagggccgcaaccatgtggacgagtcccccgtggagttcccggctaccaggtccctgagacggcgggcaacagcatcggcaggaacgccatggccgtcccctcccagctcttaccttaccatcgacctcacagacgacacagaggacacacatgggacgccccagagcagcagtaccccctacgcccgcctagcccaggacagccagcaggggggcatggagtccccgcaggtggaggcagacagtggagatggagacagttcagagtatcaggatgggaaggagtttggaataggggacctcgtgtggggaaagatcaagggcttctcctggtggcccgccatggtggtgtcttggaaggccacctccaagcgacaggctatgtctggcatgcggtgggtccagtggtttggcgatggcaagttctccgaggtctctgcagacaaactggtggcactggggctgttcagccagcactttaatttggccaccttcaataagctcgtctcctatcgaaaagccatgtaccatgctctggagaaagctagggtgcgagctggcaagaccttccccagcagccctggagactcattggaggaccagctgaagcccatgttggagtgggcccacgggggcttcaagcccactgggatcgagggcctcaaacccaacaacacgcaaccagagaacaagactcgaagacgcacagctgacgactcagccacctctgactactgccccgcacccaagcgcctcaagacaaattgctataacaacggcaaagaccgaggggatgaagatcagagccgagaacaaatggcttcagatgttgccaacaacaagagcagcctggaagatggctgtttgtcttgtggcaggaaaaaccccgtgtccttccaccctctctttgagggggggctctgtcagacatgccgggatcgcttccttgagctgttttacatgtatgatgacgatggctatcagtcttactgcactgtgtgctgcgagggccgagagctgctgctttgcagcaacacgagctgctgccggtgtttctgtgtggagtgcctggaggtgctggtgggcacaggcacagcggccgaggccaagcttcaggagccctggagctgttacatgtgtctcccgcagcgctgtcatggcgtcctgcggcgccggaaggactggaacgtgcgcctgcaggccttcttcaccagtgacacggggcttgaatatgaagcccccaagctgtaccctgccattcccgcagcccgaaggcggcccattcgagtcctgtcattgtttgatggcatcgcgacaggctacctagtcctcaaagagttgggcataaaggtaggaaagtacgtcgcttctgaagtgtgtgaggagtccattgctgttggaaccgtgaagcacgaggggaatatcaaatacgtgaacgacgtgaggaacatcacaaagaaaaatattgaagaatggggcccatttgacttggtgattggcggaagcccatgcaacgatctctcaaatgtgaatccagccaggaaaggcctgtatgagggtacaggccggctcttcttcgaattttaccacctgctgaattactcacgccccaaggagggtgatgaccggccgttcttctggatgtttgagaatgttgtagccatgaaggttggcgacaagagggacatctcacggttcctggagtgtaatccagtgatgattgatgccatcaaagtttctgctgctcacagggcccgatacttctggggcaacctacccgggatgaacaggcccgtgatagcatcaaagaatgataaactcgagctgcaggactgcttggaatacaataggatagccaagttaaagaaagtacagacaataaccaccaagtcgaactcgatcaaacaggggaaaaaccaacttttccctgttgtcatgaatggcaaagaagatgttttgtggtgcactgagctcgaaaggatctttggctttcctgtgcactacacagacgtgtccaacatgggccgtggtgcccgccagaagctgctgggaaggtcctggagcgtgcctgtcatccgacacctcttcgcccctctgaaggactactttgcatgtgaatagttccagccaggccccaagcccactggggtgtgtggcagagccaggacccaggaggtgtgattcctgaaggcatccccaggccctgctcttcctcagctgtgtgggtcataccgtgtacctcagttccctcttgctcagtgggggcagagccacctgactcttgcaggggtagcctgaggtgccgcctccttgtgcacaaatcagacctggctgcttggagcagcctaacacggtgctcattttttcttctcctaaaactttaaaacttgaagtaggtagcaacgtggctttttttttttcccttcctgggtctaccactcagagaaacaatggctaagataccaaaaccacagtgccgacagctctccaatactcaggttaatgctgaaaaatcatccaagacagttattgcaagagtttaatttttgaaaactggctactgctctgtgtttacagacgtgtgcagttgtaggcatgtagctacaggacatttttaagggcccaggatcgttttttcccagggcaagcagaagagaaaatgttgtatatgtcttttacccggcacattccccttgcctaaatacaagggctggagtctgcacgggacctattagagtattttccacaatgatgatgatttcagcagggatgacgtcatcatcacattcagggctattttttcccccacaaacccaagggcaggggccactcttagctaaatccctccccgtgactgcaatagaaccctctggggagctcaggaaggggtgtgctgagttctataatataagctgccatatattttgtagacaagtatggctcctccatatctccctcttccctaggagaggagtgtgaagcaaggagcttagataagacaccccctcaaacccattccctctccaggagacctaccctccacaggcacaggtccccagatgagaagtctgctaccctcatttctcatctttttactaaactcagaggcagtgacagcagtcagggacagacatacatttctcataccttccccacatctgagagatgacagggaaaactgcaaagctcggtgctccctttggagattttttaatccttttttattccataagaagtcgtttttagggagaacgggaattcagacaagctgcatttcagaaatgctgtcataatggtttttaacaccttttactcttcttactggtgctattttgtagaataaggaacaacgttgacaagttttgtggggctttttatacactttttaaaatctcaaacttctatttttatgtttaacgttttcattaaaattttttttgtaactggagccacgacgtaacaaatatggggaaaaaactgtgccttgtttcaacagtttttgctaatttttaggctgaaagatgacggatgcctagagtttaccttatgtttaattaaaatcagtatttgtcta

SEQ ID NO: 8614 - DNA, 1709 bp, Homo sapiens
  source 1..1709: mol_type = unassigned DNA
acggccgccagccggcctcccgccagccagccccgacccgcggctccgccgcccagccgcgccccagccagccctgcggcaggaaagcatgaagggagacaccaggcatctcaatggagaggaggacgccggcgggagggaagactcgatcctcgtcaacggggcctgcagcgaccagtcctccgactcgcccccaatcctggaggctatccgcaccccggagatcagaggccgaagatcaagctcgcgactctccaagagggaggtgtccagtctgctaagctacacacaggacttgacaggcgatggcgacggggaagatggggatggctctgacaccccagtcatgccaaagctcttccgggaaaccaggactcgttcagaaagcccagcttccctgagacggcgggcaacagcatcggcaggaacgccatggccgtcccctcccagctcttaccttaccatcgacctcacagacgacacagaggacacacatgggacgccccagagcagcagtaccccctacgcccgcctagcccaggacagccagcaggggggcatggagtccccgcaggtggaggcagacagtggagatggagacagttcagagtatcaggatgggaaggagtttggaataggggacctcgtgtggggaaagatcaagggcttctcctggtggcccgccatggtggtgtcttggaaggccacctccaagcgacaggctatgtctggcatgcggtgggtccagtggtttggcgatggcaagttctccgaggtctctgcagacaaactggtggcactggggctgttcagccagcactttaatttggccaccttcaataagctcgtctcctatcgaaaagccatgtaccatgctctggagagaacaagactcgaagacgcacagctgacgactcagccacctctgactactgccccgcacccaagcgcctcaagacaaattgctataacaacggcaaagaccgaggggatgaagatcagagccgagaacaaatggcttcagatgttgccaacaacaagagcagcctggaaggaaaaaccccgtgtccttccaccctctctttgagggggggctctgtcagacatgccgggatcgcttccttgagctgttttacatgtatgatgacgatggctatcagtcttactgcactgtgtgctgcgagggccgagagctgctgctttgcagcaacacgagctgctgccggtgtttctgtgtggagtgcctggaggtgctggtgggcacaggcacagcggccgaggccaagcttcaggagccctggagctgttacatgtgtctcccgcagcgctgtcatggcgtcctgcggcgccggaaggactggaacgtgcgcctgcaggccttcttcaccagtgacacggggcttgaatatgaagcccccaagctgtaccctgccattcccgcagcccgaaggcggcccattcgagtcctgtcattgtttgatggcatcgcgacaggctacctagtcctcaaagagttgggcataaaggtaggaaagtacgtcgcttctgaagtgtgtgaggagtccattgctgttggaaccgtgaagcacgaggggaatatcaaatacgtgaacgacgtgaggaacatcacaaagaaaaatattgaagaatggggcccatttgacttggtgattggcggaagcccatgcaacgatctctcaaatgtgaat

SEQ ID NO: 8615 - DNA, 2662 bp, Homo sapiens
  source 1..2662: mol_type = unassigned DNA
agcgccctgcacggccgccagccggcctcccgccagccagccccgacccgcggctccgccgcccagccgcgccccagccagccctgcggcaggaaagcatgaagggagacaccaggcatctcaatggagaggaggacgccggcgggagggaagactcgatcctcgtcaacggggcctgcagcgaccagtcctccgactcgcccccaatcctggaggctatccgcaccccggagatcagaggccgaagatcaagctcgcgactctccaagagggaggtgtccagtctgctaagctacacacaggacttgacaggcgatggcgacggggaagatggggatggctctgacaccccagtcatgccaaagctcttccgggaaaccaggactcgttcagaaagcccagcttccctgagacggcgggcaacagcatcggcaggaacgccatggccgtcccctcccagctcttaccttaccatcgacctcacagacgacacagaggacacacatgggacgccccagagcagcagtaccccctacgcccgcctagcccaggacagccagcaggggggcatggagtccccgcaggtggaggcagacagtggagatggagacagttcagagtatcaggatgggaaggagtttggaataggggacctcgtgtggggaaagatcaagggcttctcctggtggcccgccatggtggtgtcttggaaggccacctccaagcgacaggctatgtctggcatgcggtgggtccagtggtttggcgatggcaagttctccgaggtctctgcagacaaactggtggcactggggctgttcagccagcactttaatttggccaccttcaataagctcgtctcctatcgaaaagccatgtaccatgctctggagaaagctagggtgcgagctggcaagaccttccccagcagccctggagactcattggaggaccagctgaagcccatgttggagtgggcccacgggggcttcaagcccactgggatcgagggcctcaaacccaacaacacgcaaccagagaacaagactcgaagacgcacagctgacgactcagccacctctgactactgccccgcacccaagcgcctcaagacaaattgctataacaacggcaaagaccgaggggatgaagatcagagccgagaacaaatggcttcagatgttgccaacaacaagagcagcctggaagatggctgtttgtcttgtggcaggaaaaaccccgtgtccttccaccctctctttgagggggggctctgtcagacatgccgggatcgcttccttgagctgttttacatgtatgatgacgatggctatcagtcttactgcactgtgtgctgcgagggccgagagctgctgctttgcagcaacacgagctgctgccggtgtttctgtgtggagtgcctggaggtgctggtgggcacaggcacagcggccgaggccaagcttcaggagccctggagctgttacatgtgtctcccgcagcgctgtcatggcgtcctgcggcgccggaaggactggaacgtgcgcctgcaggccttcttcaccagtgacacggggcttgaatatgaagcccccaagctgtaccctgccattcccgcagcccgaaggcggcccattcgagtcctgtcattgtttgatggcatcgcgacaggctacctagtcctcaaagagttgggcataaaggtaggaaagtacgtcgcttctgaagtgtgtgaggagtccattgctgttggaaccgtgaagcacgaggggaatatcaaatacgtgaacgacgtgaggaacatcacaaagaaaaatattgaagaatggggcccatttgacttggtgattggcggaagcccatgcaacgatctctcaaatgtgaatccagccaggaaaggcctgtatgagggtacaggccggctcttcttcgaattttaccacctgctgaattactcacgccccaaggagggtgatgaccggccgttcttctggatgtttgagaatgttgtagccatgaaggttggcgacaagagggacatctcacggttcctggagtgtaatccagtgatgattgatgccatcaaagtttctgctgctcacagggcccgatacttctggggcaacctacccgggatgaacaggatctttggctttcctgtgcactacacagacgtgtccaacatgggccgtggtgcccgccagaagctgctgggaaggtcctggagcgtgcctgtcatccgacacctcttcgcccctctgaaggactactttgcatgtgaatagttccagccaggccccaagcccactggggtgtgtggcagagccaggacccaggaggtgtgattcctgaaggcatccccaggccctgctcttcctcagctgtgtgggtcataccgtgtacctcagttccctcttgctcagtgggggcagagccacctgactcttgcaggggtagcctgaggtgccgcctccttgtgcacaaatcagacctggctgcttggagcagcctaacacggtgctcattttttcttctcctaaaactttaaaacttgaagtaggtagcaacgtggctttttttttttcccttcctgggtctaccactcagagaaacaatggctaagataccaaaaccacagtgccgacagctctccaatactcag

SEQ ID NO: 8616 - DNA, 3634 bp, Homo sapiens
  source 1..3634: mol_type = unassigned DNA
gcgccctgcacggccgccagccggcctcccgccagccagccccgacccgcggctccgccgcccagccgcgccccagccagccctgcggcaggaaagcatgaagggagacaccaggcatctcaatggagaggaggacgccggcgggagggaagactcgatcctcgtcaacggggcctgcagcgaccagtcctccgactcgcccccaatcctggaggctatccgcaccccggagatcagaggccgaagatcaagctcgcgactctccaagagggaggtgtccagtctgctaagctacacacagtccctgagacggcgggcaacagcatcggcaggaacgccatggccgtcccctcccagctcttaccttaccatcgacctcacagacgacacagaggacacacatgggacgccccagagcagcagtaccccctacgcccgcctagcccaggacagccagcaggggggcatggagtccccgcaggtggaggcagacagtggagatggagacagttcagagtatcaggatgggaaggagtttggaataggggacctcgtgtggggaaagatcaagggcttctcctggtggcccgccatggtggtgtcttggaaggccacctccaagcgacaggctatgtctggcatgcggtgggtccagtggtttggcgatggcaagttctccgaggtctctgcagacaaactggtggcactggggctgttcagccagcactttaatttggccaccttcaataagctcgtctcctatcgaaaagccatgtaccatgctctggagaaagctagggtgcgagctggcaagaccttccccagcagccctggagactcattggaggaccagctgaagcccatgttggagtgggcccacgggggcttcaagcccactgggatcgagggcctcaaacccaacaacacgcaaccagagaacaagactcgaagacgcacagctgacgactcagccacctctgactactgccccgcacccaagcgcctcaagacaaattgctataacaacggcaaagaccgaggggatgaagatcagagccgagaacaaatggcttcagatgttgccaacaacaagagcagcctggaagatggctgtttgtcttgtggcaggaaaaaccccgtgtccttccaccctctctttgagggggggctctgtcagacatgccgggatcgcttccttgagctgttttacatgtatgatgacgatggctatcagtcttactgcactgtgtgctgcgagggccgagagctgctgctttgcagcaacacgagctgctgccggtgtttctgtgtggagtgcctggaggtgctggtgggcacaggcacagcggccgaggccaagcttcaggagccctggagctgttacatgtgtctcccgcagcgctgtcatggcgtcctgcggcgccggaaggactggaacgtgcgcctgcaggccttcttcaccagtgacacggggcttgaatatgaagcccccaagctgtaccctgccattcccgcagcccgaaggcggcccattcgagtcctgtcattgtttgatggcatcgcgacaggctacctagtcctcaaagagttgggcataaaggtaggaaagtacgtcgcttctgaagtgtgtgaggagtccattgctgttggaaccgtgaagcacgaggggaatatcaaatacgtgaacgacgtgaggaacatcacaaagaaaaatattgaagaatggggcccatttgacttggtgattggcggaagcccatgcaacgatctctcaaatgtgaatccagccaggaaaggcctgtatgagggtacaggccggctcttcttcgaattttaccacctgctgaattactcacgccccaaggagggtgatgaccggccgttcttctggatgtttgagaatgttgtagccatgaaggttggcgacaagagggacatctcacggttcctggagtgtaatccagtgatgattgatgccatcaaagtttctgctgctcacagggcccgatacttctggggcaacctacccgggatgaacaggatctttggctttcctgtgcactacacagacgtgtccaacatgggccgtggtgcccgccagaagctgctgggaaggtcctggagcgtgcctgtcatccgacacctcttcgcccctctgaaggactactttgcatgtgaatagttccagccaggccccaagcccactggggtgtgtggcagagccaggacccaggaggtgtgattcctgaaggcatccccaggccctgctcttcctcagctgtgtgggtcataccgtgtacctcagttccctcttgctcagtgggggcagagccacctgactcttgcaggggtagcctgaggtgccgcctccttgtgcacaaatcagacctggctgcttggagcagcctaacacggtgctcattttttcttctcctaaaactttaaaacttgaagtaggtagcaacgtggctttttttttttcccttcctgggtctaccactcagagaaacaatggctaagataccaaaaccacagtgccgacagctctccaatactcaggttaatgctgaaaaatcatccaagacagttattgcaagagtttaatttttgaaaactggctactgctctgtgtttacagacgtgtgcagttgtaggcatgtagctacaggacatttttaagggcccaggatcgttttttcccagggcaagcagaagagaaaatgttgtatatgtcttttacccggcacattccccttgcctaaatacaagggctggagtctgcacgggacctattagagtattttccacaatgatgatgatttcagcagggatgacgtcatcatcacattcagggctattttttcccccacaaacccaagggcaggggccactcttagctaaatccctccccgtgactgcaatagaaccctctggggagctcaggaaggggtgtgctgagttctataatataagctgccatatattttgtagacaagtatggctcctccatatctccctcttccctaggagaggagtgtgaagcaaggagcttagataagacaccccctcaaacccattccctctccaggagacctaccctccacaggcacaggtccccagatgagaagtctgctaccctcatttctcatctttttactaaactcagaggcagtgacagcagtcagggacagacatacatttctcataccttccccacatctgagagatgacagggaaaactgcaaagctcggtgctccctttggagattttttaatccttttttattccataagaagtcgtttttagggagaacgggaattcagacaagctgcatttcagaaatgctgtcataatggtttttaacaccttttactcttcttactggtgctattttgtagaataaggaacaacgttgacaagttttgtggggctttttatacactttttaaaatctcaaacttctatttttatgtttaacgttttcattaaaattttttttgtaactggagccacgacgtaacaaatatggggaaaaaactgtgccttgtttcaacagtttttgctaatttttaggctgaaagatgacggatgcctagagtttaccttatgtttaattaaaatcagtatttgtct

SEQ ID NO: 8617 - DNA, 1764 bp, Homo sapiens
  source 1..1764: mol_type = unassigned DNA
acccactcccgctgccccgtccggcccgcgccgcttcctcgcagcagctgctcccggctccgcggccgcagcccgcgtggacgctccgagcgccccccgacggacgggaccggctccctggcggtcgggcgagcgggcggcaacgctgcccggccggcagcgctggggttaagtggcccaagtaaacctagctcggcgatcggcgccggagattcgcgagcccagcgccctgcacggccgccagccggcctcccgccagccagccccgacccgcggctccgccgcccagccgcgccccagccagccctgcggcaggaaagcatgaagggagacaccaggcatctcaatggagaggaggacgccggcgggagggaagactcgatcctcgtcaacggggcctgcagcgaccagtcctccgactcgcccccaatcctggaggctatccgcaccccggagatcagaggccgaagatcaagctcgcgactctccaagagggaggtgtccagtctgctaagctacacacaggacttgacaggcgatggcgacggggaagatggggatggctctgacaccccagtcatgccaaagctcttccgggaaaccaggactcgttcagaaagcccagctgtccgaactcgaaataacaacagtgtctccagccgggagaggcacaggccttccccacgttccacccgaggccggcagggccgcaaccatgtggacgagtcccccgtggagttcccggctaccaggtccctgagacggcgggcaacagcatcggcaggaacgccatggccgtcccctcccagctcttaccttaccatcgacctcacagacgacacagaggacacacatgggacgccccagagcagcagtaccccctacgcccgcctagcccaggacagccagcaggggggcatggagtccccgcaggtggaggcagacagtggagatggagacagttcagagtatcaggatgggaaggagtttggaataggggacctcgtgtggggaaagatcaagggcttctcctggtggcccgccatggtggtgtcttggaaggccacctccaagcgacaggctatgtctggcatgcggtgggtccagtggtttggcgatggcaagttctccgaggtctctgcagacaaactggtggcactggggctgttcagccagcactttaatttggccaccttcaataagctcgtctcctatcgaaaagccatgtaccatgctctggagaaagctagggtgcgagctggcaagaccttccccagcagccctggagactcattggaggaccagctgaagcccatgttggagtgggcccacgggggcttcaagcccactgggatcgagggcctcaaacccaacaacacgcaaccagagaacaagactcgaagacgcacagctgacgactcagccacctctgactactgccccgcacccaagcgcctcaagacaaattgctataacaacggcaaagaccgaggggatgaagatcagagccgagaacaaatggcttcagatgttgccaacaacaagagcagcctggaagatggctgtttgtcttgtggcaggaaaaaccccgtgtccttccaccctctctttgagggggggctctgtcagacatgccggcacctgtgtggagactcagtgaagcccactcatcccagctgccttgcactctgcctctggggcaggatgggggacagctgtcacagaggccaatggcacgcaggtcacagccagttgtccttttaa

SEQ ID NO: 8618 - DNA, 1706 bp, Homo sapiens
  source 1..1706: mol_type = unassigned DNA
cccatctccacccctcccctgaaccccactccccactgaggtccccaaaccccacccctcactccaccctgagggccccatcctctgaaccccaatcccccagccccactgagctcttaaccctccccacctgagggttccctttccctgcccgtcccccagcttcctagctccccaccccaagtgaccccccgcagctcctcgcccctcccactgcaaaccggcactgaagggctgccccgcccccgcccctccccgcccccgcgggacacgcccagattctttgcccccatagcctggtgacctctggccacccgctgtcccaggtgggcctggatccttccagctcattctttgcctgcgccgtccctcgttccatggcccagtcctccccggggaccctgagcctggaagccccggaccactggaaccttgaacccaccagctggctgtacccggagccgtggcagcagccctcatccccatggcggccatcccagccctggacccagaggccgagcccagcatggacgtgattttggtgggatccagtgagctctcaagctccgtttcacccgggacaggcagagatcttattgcatatgaagtcaaggctaaccagcgaaatatagaagacatctgcatctgctgcggaagtctccaggttcacacacagcaccctctgtttgagggagggatctgcgccccatgtaaggacaagttcctggatgccctcttcctgtacgacgatgacgggtaccaatcctactgctccatctgctgctccggagagacgctgctcatctgcggaaaccctgattgcacccgatgctactgcttcgagtgtgtggatagcctggtcggccccgggacctcggggaaggtgcacgccatgagcaactgggtgtgctacctgtgcctgccgtcctcccgaagcgggctgctgcagcgtcggaggaagtggcgcagccagctcaaggccttctacgaccgagagtcggagaatccccttgagatgttcgaaaccgtgcctgtgtggaggagacagccagtccgggtgctgtccctttttgaagacatcaagaaagagctgacgagtttgggctttttggaaagtggttctgacccgggacaactgaagcatgtggttgatgtcacagacacagtgaggaaggatgtggaggagtggggacccttcgatcttgtgtacggcgccacacctcccctgggccacacctgtgaccgtcctcccagctggtacctgttccagttccaccggctcctgcagtacgcacggcccaagccaggcagccccaggcccttcttctggatgttcgtggacaatctggtgctgaacaaggaagacctggacgtcgcatctcgcttcctggagatggagccagtcaccatcccagatgtccacggcggatccttgcagaatgctgtccgcgtgtggagcaacatcccagccataaggagcagcaggcactgggctctggtttcggaagaagaattgtccctgctggcccagaacaagcagagctcgaagctcgcggccaagtggcccaccaagctggtgaagaactgctttctccccctaagagaatatttcaagtatttttcaacagaactcacttcctctttataaatgagtcactatactgtgaagaaaaagacttttcctagaacaaaggcaactttcctca

SEQ ID NO: 8619 - DNA, 1702 bp, Homo sapiens
  source 1..1702: mol_type = unassigned DNA
cccatctccacccctcccctgaaccccactccccactgaggtccccaaaccccacccctcactccaccctgagggccccatcctctgaaccccaatcccccagccccactgagctcttaaccctccccacctgagggttccctttccctgcccgtcccccagcttcctagctccccaccccaagtgaccccccgcagctcctcgcccctcccactgcaaaccggcactgaagggctgccccgcccccgcccctccccgcccccgcgggacacgcccagattctttgcccccatagcctggtgacctctggccacccgctgtcccaggtgggcctggatccttccagctcattctttgcctgcgccgtccctcgttccatggcccagtcctccccggggaccctgagcctggaagccccggaccactggaaccttgaacccaccagctggctgtacccggagccgtggcagcagccctcatccccatggcggccatcccagccctggacccagaggccgagcccagcatggacgtgattttggtgggatccagtgagctctcaagctccgtttcacccgggacaggcagagatcttattgcatatgaagtcaaggctaaccagcgaaatatagaagacatctgcatctgctgcggaagtctccaggttcacacacagcaccctctgtttgagggagggatctgcgccccatgtaaggacaagttcctggatgccctcttcctgtacgacgatgacgggtaccaatcctactgctccatctgctgctccggagagacgctgctcatctgcggaaaccctgattgcacccgatgctactgcttcgagtgtgtggatagcctggtcggccccgggacctcggggaaggtgcacgccatgagcaactgggtgtgctacctgtgcctgccgtcctcccgaagcgggctgctgcagcgtcggaggaagtggcgcagccagctcaaggccttctacgaccgagagtcggagaatccccttgagatgttcgaaaccgtgcctgtgtggaggagacagccagtccgggtgctgtccctttttgaagacatcaagaaagagctgacgagtttgggctttttggaaagtggttctgacccgggacaactgaagcatgtggttgatgtcacagacacagtgaggaaggatgtggaggagtggggacccttcgatcttgtgtacggcgccacacctcccctgggccacacctgtgaccgtcctcccagctggtacctgttccagttccaccggctcctgcagtacgcacggcccaagccaggcagccccaggcccttcttctggatgttcgtggacaatctggtgctgaacaaggaagacctggacgtcgcatctcgcttcctggagatggagccagtcaccatcccagatgtccacggcggatccttgcagaatgctgtccgcgtgtggagcaacatcccagccataaggagcaggcactgggctctggtttcggaagaagaattgtccctgctggcccagaacaagcagagctcgaagctcgcggccaagtggcccaccaagctggtgaagaactgctttctccccctaagagaatatttcaagtatttttcaacagaactcacttcctctttataaatgagtcactatactgtgaagaaaaagacttttcctagaacaaaggcaactttcctc

SEQ ID NO: 8620 - DNA, 4464 bp, Homo sapiens
  source 1..4464: mol_type = unassigned DNA
ggactctgagggctttttggagctcgctatgcttaacctggagatgattaaggccccgcttcctggcctcccagcctctaatgccaaaagataagggagaggctggcgtgtgaccccgttttgagtcaggtggacagagggctggccaccttcggaaccatgggtgcaatacggagtcagacctcaatacaagcccactctttcacatatttgaacttttttcacatatcaactttttttgttcactgtgcagggattgttcattgctgctggaggaagatcatggactgtcgcgggaaactgaagtggttgagtatccactagtcgtggatgagggcagtgacttcgcagttttttgcgaattacacatctctttgattatgttgtgactagttttgttagatagtcatttagtgtttgggatacctgttaagccctttgtccagggactgtggttggatttatgaattatttggacggttgtccacttgaaagaactgacagtagcttcataacaatgttacaaatctcgttctaagattaagctgttgaacctatatttgccattagcgcttaatttttgaagtattatttttatgaatcaagccctggaaaaggacaagatatttgaatgaaatagcacccataatggagaacttcacagttgctactcctgtgataggtttatcttagtttcattgtggtataaatggaatagcaggtgttgtcaggtacaaggtttgtagcttgccaatatgttcattaccaacactgcagattcccattgagttggtgggggttttgttacctttgttttttttctcagcaaaataattctataactttttgtttgtgacaagaaatggactttcagtttacttaagattaatacttcttgaatgataaaatcattttgccatgttagaagacatttccgaagaagacatttgggaatacaaatctaaaagaaaaccaaaacgagttgatccaaataatggctctaaaaatattctaaaatctgttgaaaaagcaacagatggaaaataccagtcaaaacggagtagaaacagaaaaagagccgcagaagctaaagaggtgaaggaccatgaagtgccccttggaaatgcaggttgtcagacttctgttgcttctagtcagaattcaagttgtggagatggtattcagcagacccaagacaaggaaactactccaggaaaactctgtagaactcaaaaaagccaacacgtgtccccaaagatacgtccagtttatgatggatactgtccaaattgccagatgcctttttcctcattgatagggcagacacctcgatggcatgtttttgaatgtttggattctccaccacgctctgaaacagagtgtcctgatggtcttctgtgtacctcaaccattccttttcattacaagagatacactcacttcctgctagctcaaagcagggctggtgatcatccttttagcagcccatcacctgcgtcaggtggcagtttcagtgagactaagtcaggcgtcctttgtagccttgaggaaagatggtcttcgtatcagaaccaaactgataactcggtttcaaatgatcccttattgatgacacagtattttaaaaagtctccgtctctgactgaagccagtgaaaagatttctactcatatccaaacatcccaacaagctctacaatttacagattttgttgagaatgacaaactagtgggagttgctttgcgtcttgcaaacaactcagaacacataaatttgccattgccagaaaatgacttcagtgactgtgaaatctcctattctccacttcaaagtgatgaagacactcatgatatcgatgaaaaaccggatgattcacaagaacaactgttttttaccgaaagctcaaaagatggcagcctcgaagaagatgatgacagctgtggtttttttaaaaaacgacatggtcccttactgaaggaccaggatgagagctgccccaaagtgaacagcttcttaactcgggataagtatgatgaaggattgtatagattcaatagtctaaatgatttgtctcaacctatttctcaaaataatgagagtactttgccttatgatctggcatgtactggtggtgattttgtgttgtttccacctgcattggcagggaagcttgctgcttctgttcatcaggcaactaaagcaaaacctgatgagccagaatttcactcagctcaatcaaataaacagaaacaggtaattgaagaatcatctgtttacaatcaagtttctcttccgttagttaagagtttaatgttgaaaccttttgaaagtcaggtagaagggtatctttcttcccaaccaacccaaaatacaattagaaaattatcaagtgagaacttgaatgctaagaataatactaactcagcatgtttctgcagaaaggcattagagggtgtgccagttggtaaagctacaattttaaatacagaaaacttgtctagtacacctgctccgaagtatttgaaaatattgccttctggtcttaagtataatgcaagacatccttctaccaaggtaatgaagcaaatggatataggtgtgtattttggactacctcccaaaagaaaggaagagaaattgctaggggaaagtgcattagaagggataaacttaaatccagttccaagtcctaatcaaaagaggtcctcgcagtgcaagaggaaagcagaaaaatctttaagtgatttagaatttgatgcaagtactttacatgagagtcagctttctgtggaactttctagtgagaggtcacagcgtcaaaaaaagagatgtagaaagtcaaattcactgcaggaaggagcgtgtcagaagagatcagatcaccttattaatacagaatctgaagcagtcaatttaagtaaagtcaaagtcttcacaaaatcagctcatggtgggctgcaaaggggcaacaagaaaatcccagagtcatctaatgtaggaggatcaagaaaaaagacatgtccattctataagaaaatacctggaaccggctttacagttgatgcctttcagtatggcgtggttgaaggttgcacagcctattttctcacacattttcattctgatcattatgctggattgtctaaacacttcacatttccagtttattgtagtgagataactggcaatttgttgaagaacaagcttcatgtgcaagaacaatatattcacccattgccactggacactgaatgtattgtgaatggtgtcaaagttgttttgcttgatgccaatcactgtccaggtgctgtcatgatcctcttttatcttcctaatggtactgtcatattacacacgggagacttcagagcagatcccagcatggaacgttctcttcttgcggaccagaaagtccatatgctgtacttagataccacatattgtagcccagaatacacctttccatctcagcaagaggttatccggtttgccatcaacactgcctttgaggctgtaactctaaacccacatgctcttgttgtctgtggcacttactctattggaaaagagaaagtcttcctagccattgctgatgttttaggttcaaaagtgggcatgtcccaggaaaaatataaaactctacagtgcctcaatataccagaaattaattcactcatcactaccgacatgtgcagttcattggttcaccttctcccaatgatgcaaattaattttaagggcttacagagtcatttgaagaagtgtggtgggaaatacaatcagattttggcatttcgacctacaggatggacacactctaacaagttcactagaatagcagatgttattccccagaccaaaggaaacatttcaatatatggaattccttacagtgaacacagcagctacctagaaatgaagcgctttgtccagtggctgaagccccagaaaatcatacctactgtaaatgtgggcacctggaaatctaggagcacaatggagaaatattttagagagtggaaattggaagctggatattgatgatacctccgaggattcagtagtagttaagttccttggatgtagcttgttagtagttaaatctatagaaatgtgaaatacactttgtgtggaaaaacctcatgaagattgttcagatactttattttctcatttatgtttgaacaacatgttcgtggtgctgaatgcctctcagcatcatcaaggataactgaaactgggtctccctgggacccttaatttcttgtcccctgccctccatgggcagttatattctgcatcaagccttagaagaggaagcaaaggcagattcagggaccaaaaggattaatgataattaataaagtagtttgaagcattatatatataagtaattatgtgtctttaaaattatgagatgaaacttttatatgacgtgtatacttaaataaaattaatataaaa

SEQ ID NO: 8621 - DNA, 4241 bp, Homo sapiens
  source 1..4241: mol_type = unassigned DNA
cgggaacttgttcccgccaagaccctaaagggattgttcattgctgctggaggaagatcatggactgtcgcgggaaactgaagtggttgagtatccactagtcgtggatgagggcagtgacttcgcagttttttgcgaattacacatctctttgattatgttgtgactagttttgttagatagtcatttagtgtttgggatacctgttaagccctttgtccagggactgtggttggatttatgaattatttggacggttgtccacttgaaagaactgacagtagcttcataacaatgttacaaatctcgttctaagattaagctgttgaacctatatttgccattagcgcttaatttttgaagtattatttttatgaatcaagccctggaaaaggacaagatatttgaatgaaatagcacccataatggagaacttcacagttgctactcctgtgataggtttatcttagtttcattgtggtataaatggaatagcaggtgttgtcaggtacaaggtttgtagcttgccaatatgttcattaccaacactgcagattcccattgagttggtgggggttttgttacctttgttttttttctcagcaaaataattctataactttttgtttgtgacaagaaatggactttcagtttacttaagattaatacttcttgaatgataaaatcattttgccatgttagaagacatttccgaagaagacatttgggaatacaaatctaaaagaaaaccaaaacgagttgatccaaataatggctctaaaaatattctaaaatctgttgaaaaagcaacagatggaaaataccagtcaaaacggagtagaaacagaaaaagagccgcagaagctaaagaggtgaaggaccatgaagtgccccttggaaatgcaggttgtcagacttctgttgcttctagtcagaattcaagttgtggagatggtattcagcagacccaagacaaggaaactactccaggaaaactctgtagaactcaaaaaagccaacacgtgtccccaaagatacgtccagtttatgatggatactgtccaaattgccagatgcctttttcctcattgatagggcagacacctcgatggcatgtttttgaatgtttggattctccaccacgctctgaaacagagtgtcctgatggtcttctgtgtacctcaaccattccttttcattacaagagatacactcacttcctgctagctcaaagcagggctggtgatcatccttttagcagcccatcacctgcgtcaggtggcagtttcagtgagactaagtcaggcgtcctttgtagccttgaggaaagatggtcttcgtatcagaaccaaactgataactcggtttcaaatgatcccttattgatgacacagtattttaaaaagtctccgtctctgactgaagccagtgaaaagatttctactcatatccaaacatcccaacaagctctacaatttacagattttgttgagaatgacaaactagtgggagttgctttgcgtcttgcaaacaactcagaacacataaatttgccattgccagaaaatgacttcagtgactgtgaaatctcctattctccacttcaaagtgatgaagacactcatgatatcgatgaaaaaccggatgattcacaagaacaactgttttttaccgaaagctcaaaagatggcagcctcgaagaagatgatgacagctgtggtttttttaaaaaacgacatggtcccttactgaaggaccaggatgagagctgccccaaagtgaacagcttcttaactcgggataagtatgatgaaggattgtatagattcaatagtctaaatgatttgtctcaacctatttctcaaaataatgagagtactttgccttatgatctggcatgtactggtggtgattttgtgttgtttccacctgcattggcagggaagcttgctgcttctgttcatcaggcaactaaagcaaaacctgatgagccagaatttcactcagctcaatcaaataaacagaaacaggtaattgaagaatcatctgtttacaatcaagtttctcttccgttagttaagagtttaatgttgaaaccttttgaaagtcaggtagaagggtatctttcttcccaaccaacccaaaatacaattagaaaattatcaagtgagaacttgaatgctaagaataatactaactcagcatgtttctgcagaaaggcattagagggtgtgccagttggtaaagctacaattttaaatacagaaaacttgtctagtacacctgctccgaagtatttgaaaatattgccttctggtcttaagtataatgcaagacatccttctaccaaggtaatgaagcaaatggatataggtgtgtattttggactacctcccaaaagaaaggaagagaaattgctaggggaaagtgcattagaagggataaacttaaatccagttccaagtcctaatcaaaagaggtcctcgcagtgcaagaggaaagcagaaaaatctttaagtgatttagaatttgatgcaagtactttacatgagagtcagctttctgtggaactttctagtgagaggtcacagcgtcaaaaaaagagatgtagaaagtcaaattcactgcaggaaggagcgtgtcagaagagatcagatcaccttattaatacagaatctgaagcagtcaatttaagtaaagtcaaagtcttcacaaaatcagctcatggtgggctgcaaaggggcaacaagaaaatcccagagtcatctaatgtaggaggatcaagaaaaaagacatgtccattctataagaaaatacctggaaccggctttacagttgatgcctttcagtatggcgtggttgaaggttgcacagcctattttctcacacattttcattctgatcattatgctggattgtctaaacacttcacatttccagtttattgtagtgagataactggcaatttgttgaagaacaagcttcatgtgcaagaacaatatattcacccattgccactggacactgaatgtattgtgaatggtgtcaaagttgttttgcttgatgccaatcactgtccaggtgctgtcatgatcctcttttatcttcctaatggtactgtcatattacacacgggagacttcagagcagatcccagcatggaacgttctcttcttgcggaccagaaagtccatatgctgtacttagataccacatattgtagcccagaatacacctttccatctcagcaagaggttatccggtttgccatcaacactgcctttgaggctgtaactctaaacccacatgctcttgttgtctgtggcacttactctattggaaaagagaaagtcttcctagccattgctgatgttttaggttcaaaagtgggcatgtcccaggaaaaatataaaactctacagtgcctcaatataccagaaattaattcactcatcactaccgacatgtgcagttcattggttcaccttctcccaatgatgcaaattaattttaagggcttacagagtcatttgaagaagtgtggtgggaaatacaatcagattttggcatttcgacctacaggatggacacactctaacaagttcactagaatagcagatgttattccccagaccaaaggaaacatttcaatatatggaattccttacagtgaacacagcagctacctagaaatgaagcgctttgtccagtggctgaagccccagaaaatcatacctactgtaaatgtgggcacctggaaatctaggagcacaatggagaaatattttagagagtggaaattggaagctggatattgatgatacctccgaggattcagtagtagttaagttccttggatgtagcttgttagtagttaaatctatagaaatgtgaaatacactttgtgtggaaaaacctcatgaagattgttcagatactttattttctcatttatgtttgaacaacatgttcgtggtgctgaatgcctctcagcatcatcaaggataactgaaactgggtctccctgggacccttaatttcttgtcccctgccctccatgggcagttatattctgcatcaagccttagaagaggaagcaaaggcagattcagggaccaaaaggattaatgataattaataaagtagtttgaagcattatatatataagtaattatgtgtctttaaaattatgagatgaaacttttatatgacgtgtatacttaaataaaattaatataaaa

SEQ ID NO: 8622 - DNA, 1136 bp, Homo sapiens
  source 1..1136: mol_type = unassigned DNA
ccgctactctggccctcagggttgtgtagtttccggggccacggcacctgggcacaccaggtggcgtcgcgcctttgctttcctgagccttctgagtaaggtaatgtggtgtccgtggggcgacgcctgcgcacaagaccgcgtcgggcctcacttttcccaggccttctgggtaatgtagtttccgggatcggcacccggcctgtgccagcttgcagagctcaccaggtgcagacccctgcggccagggcgaggacggatctgagcagctgggcagcaggtgccaccgcctgtgggacccagagggcttgaggacatctgcaatgctccagaagcccaagagcgtgaagctgcgggccctgcgcagcccgaggaagttcggcgtggctggccggagctgccaggaggtgctgcgcaagggctgtctccgcttccagctccctgagcgcggttcccggctgtgcctgtacgaggatggcacggagctgacggaagattacttccccagtgttcccgacaacgccgagctggtgctgctcaccttgggccaggcctggcagggctatgtgagcgacatcaggcgcttcctcagtgcatttcacgagccacaggtggggctcatccaggccgcccagcagctgctgtgtgatgagcaggccccacagaggcagaggctgctggctgacctcctgcacaacgtcagccagaacatcgcggccgagacccgggctgaggacccgccgtggtttgaaggcttggagtcccgatttcagagcaagtctggctatctgagatacagctgtgagagccggatccggagttacctgagggaggtgagctcctacccctccacggtgggtgcggaggctcaggaggaattcctgcgggtcctcggctccatgtgccagaggctccggtccatgcagtacaatggcagctacttcgacagaggagccaagggcggcagccgcctctgcacaccggaaggctggttctcctgccagggtccctttgacatggacagctgcttatcaagacactccatcaacccctacagtaacagggagagcaggatcctcttcagcacctggaacctggatcacatagatggagtcttgctctgtggcccaggctaa

SEQ ID NO: 8623 - DNA, 3005 bp, Homo sapiens
  source 1..3005: mol_type = unassigned DNA
ggcacccggcctgtgccagcttgcagagctcaccaggtgcagacccctgcggccagggcgaggacggatctgagcagctgggcagcaggtgccaccgcctgtgggacccagagggcttgaggacatctgcaatgctccagaagcccaagagcgtgaagctgcgggccctgcgcagcccgaggaagttcggcgtggctggccggagctgccaggaggtgctgcgcaagggctgtctccgcttccagctccctgagcgcggttcccggctgtgcctgtacgaggatggcacggagctgacggaagattacttccccagtgttcccgacaacgccgagctggtgctgctcaccttgggccaggcctggcagggctctgttggtgtcagggcaaggacaaagacccgggacacctcaagtctgagtcctggtgattgccaggccctggggaatgggggaagatgtggtcagaggctcttcttgtgaccggggcaggatgtgtcttctgctggaccggcaccttttgtttgtcccattggtggcagatgtgagcgacatcaggcgcttcctcagtgcatttcacgagccacaggtggggctcatccaggccgcccagcagctgctgtgtgatgagcaggccccacagaggcagaggctgctggctgacctcctgcacaacgtcagccagaacatcgcggccgagacccgggctgaggacccgccgtggtttgaaggcttggagtcccgatttcagagcaagtctggctatctgagatacagctgtgagagccggatccggagttacctgagggaggtgagctcctacccctccacggtgggtgcggaggctcaggaggaattcctgcgggtcctcggctccatgtgccagaggctccggtccatgcagtacaatggcagctacttcgacagaggagccaagggcggcagccgcctctgcacaccggaaggctggttctcctgccagggtccctttgacatggacagctgcttatcaagacactccatcaacccctacagtaacagggagagcaggatcctcttcagcacctggaacctggatcacataatagaaaagaaacgcaccatcattcctacactggtggaagcaattaaggaacaagatggaagagaagtggactgggagtatttttatggcctgctttttacctcagagaacctaaaactagtgcacattgtctgccataagaaaaccacccacaagctcaactgtgacccaagcagaatctacaaaccccagacaaggttgaagcggaagcagcctgtgcggaaacgccagtgacacgtacacaccacgtcctggtctttgtttgaggcctgacgtgggcatcattttaacaggtgccttttttgtttttttgtttttcgtttttttggtcactccagtagctcctggaaaaaaccttaaaaaatgtttcctccaaatctgatttcattacatttctgaattgttggggttttttttgttgttttgttttgttttgtagatggagtttcacttttgttgcccaggctggagtgtagtggcgcgatctcggctcagcctcccgagtagctgggattacaggcatgtgccaccacgcccggctaatgtttgtatttttagtagagacggggtttcaccatgttggtcaggctggtctcaaactcctgacctcaggtgatccgcccacctcagcctcccaaagtgctgggatgacaggtgtgagccactgcgcccagcctgaatcatttcttataccttctgacagcccaacttccagaggacagctctggggtactcgttggatgtctgtgagtacctggtcatacgggtcagtagggataagaattgtctctgggctgaggaattcttctgttctctggtttcaccagcgttgggtttgctcatgtaatgtggtcaccatactcaaatggtgtcatggctgaagttggccaccttgcttgagggacaagttgtttatgtatcagctctctgctgggtctccctttccatggcaaatgggcagctccatcctcttgactcttctaaatgcccaaaagaggtgtcatgctttgggggtacgatgtttatactccgtaaagaacatacaaggacattcactgctgatttttttttttgtttgtttgagacagggtctcactctgtcgctcaggctggagtgcagtgatgcaatcttggctcactgcaacctccgcctctcaggttcaagtggttctccttcctcagcctcccaagtagctgggattacaggcacctaccaccagggccagctaatttttgtatgtttagtagaaacggggtttcaccatgttggccaggctgttctcgaactcctgacctcaggtgatctgcccgcctcggtctcccaaagtgctgggattacaggcatgagccactgcacctgacctgctgaattgtttataatggcaagaaataggaaaccccccaatgtctgttgaacagctatcacgttgaaccacgtgaaactgctgttttctaggccaaaaatggtgagcgatcatttatttcatgattcaacctgatacatttacatagtgcaaaactgtgtcacagtttcaggcttttatgaggaaagcgtttctgtgtagaaactggaagctgttcagggcatcggcagctgaaccctgctccgttggtcagcgttactatcatctcggatcatatggagctcatgtcagccgtgtgggtggcgggtgcacagagacggtctggaaggaaacacgcggatctgaacagcagtaatcctgggggatacgggggttgggctagattacagagggctcattttctacgtcatgtattttatgatacttgaattttttgaaatgggcatttattttataacatgttaaaatgtactttttaaattaagtcattttgtaatatttgaatttttacatttgttgtacaatcaggaaaagcaataaagatttttcaaaaataga

SEQ ID NO: 8624 - DNA, 635 bp, Homo sapiens
  source 1..635: mol_type = unassigned DNA
ccgctactctggccctcagggttgtgtagtttccggggccacggcacctgggcacaccaggtggcgtcgcgcctttgctttcctgagccttctgagtaaggtaatgtggtgtccgtggggcgacgcctgcgcacaagaccgcgtcgggcctcacttttcccaggccttctgggtaatgtagtttccgggatcggcacccggcctgtgccagcttgcagagctcaccaggtgcagacccctgcggccagggcgaggacggatctgagcagctgggcagcaggtgccaccgcctgtgggacccagagggcttgaggacatctgcaatgctccagaagcccaagagcgtgaagctgcgggccctgcgcagcccgaggaagttcggcgtggctggccggagctgccaggaggtgctgcgcaagggctgtctccgcttccagctccctgagcgcggttcccggctgtgcctgtacgaggatggcacggagctgacggaagattacttccccagtgttcccgacaacgccgagctggtgctgctcaccttgggccaggcctggcagggctggtttcgccatgtttcccaggatagtctcacactcctgggctcaagctgtcctcctgccttggtctcctaa

SEQ ID NO: 8625 - DNA, 2842 bp, Homo sapiens
  source 1..2842: mol_type = unassigned DNA
ccctgcggccagggcgaggacggatctgagcagctgggcagcaggtgccaccgcctgtgggacccagagggcttgaggacatctgcaatgctccagaagcccaagagcgtgaagctgcgggccctgcgcagcccgaggaagttcggcgtggctggccggagctgccaggaggtgctgcgcaagggctgtctccgcttccagctccctgagcgcggttcccggctgtgcctgtacgaggatggcacggagctgacggaagattacttccccagtgttcccgacaacgccgagctggtgctgctcaccttgggccaggcctggcagggctgatgtgtcttctgctggaccggcaccttttgtttgtcccattggtggcagatgtgagcgacatcaggcgcttcctcagtgcatttcacgagccacaggtggggctcatccaggccgcccagcagctgctgtgtgatgagcaggccccacagaggcagaggctgctggctgacctcctgcacaacgtcagccagaacatcgcggccgagacccgggctgaggacccgccgtggtttgaaggcttggagtcccgatttcagagcaagtctggctatctgagatacagctgtgagagccggatccggagttacctgagggaggtgagctcctacccctccacggtgggtgcggaggctcaggaggaattcctgcgggtcctcggctccatgtgccagaggctccggtccatgcagtacaatggcagctacttcgacagaggagccaagggcggcagccgcctctgcacaccggaaggctggttctcctgccagggtccctttgacatggacagctgcttatcaagacactccatcaacccctacagtaacagggagagcaggatcctcttcagcacctggaacctggatcacataatagaaaagaaacgcaccatcattcctacactggtggaagcaattaaggaacaagatggaagagaagtggactgggagtatttttatggcctgctttttacctcagagaacctaaaactagtgcacattgtctgccataagaaaaccacccacaagctcaactgtgacccaagcagaatctacaaaccccagacaaggttgaagcggaagcagcctgtgcggaaacgccagtgacacgtacacaccacgtcctggtctttgtttgaggcctgacgtgggcatcattttaacaggtgccttttttgtttttttgtttttcgtttttttggtcactccagtagctcctggaaaaaaccttaaaaaatgtttcctccaaatctgatttcattacatttctgaattgttggggttttttttgttgttttgttttgttttgtagatggagtttcacttttgttgcccaggctggagtgtagtggcgcgatctcggctcagcctcccgagtagctgggattacaggcatgtgccaccacgcccggctaatgtttgtatttttagtagagacggggtttcaccatgttggtcaggctggtctcaaactcctgacctcaggtgatccgcccacctcagcctcccaaagtgctgggatgacaggtgtgagccactgcgcccagcctgaatcatttcttataccttctgacagcccaacttccagaggacagctctggggtactcgttggatgtctgtgagtacctggtcatacgggtcagtagggataagaattgtctctgggctgaggaattcttctgttctctggtttcaccagcgttgggtttgctcatgtaatgtggtcaccatactcaaatggtgtcatggctgaagttggccaccttgcttgagggacaagttgtttatgtatcagctctctgctgggtctccctttccatggcaaatgggcagctccatcctcttgactcttctaaatgcccaaaagaggtgtcatgctttgggggtacgatgtttatactccgtaaagaacatacaaggacattcactgctgatttttttttttgtttgtttgagacagggtctcactctgtcgctcaggctggagtgcagtgatgcaatcttggctcactgcaacctccgcctctcaggttcaagtggttctccttcctcagcctcccaagtagctgggattacaggcacctaccaccagggccagctaatttttgtatgtttagtagaaacggggtttcaccatgttggccaggctgttctcgaactcctgacctcaggtgatctgcccgcctcggtctcccaaagtgctgggattacaggcatgagccactgcacctgacctgctgaattgtttataatggcaagaaataggaaaccccccaatgtctgttgaacagctatcacgttgaaccacgtgaaactgctgttttctaggccaaaaatggtgagcgatcatttatttcatgattcaacctgatacatttacatagtgcaaaactgtgtcacagtttcaggcttttatgaggaaagcgtttctgtgtagaaactggaagctgttcagggcatcggcagctgaaccctgctccgttggtcagcgttactatcatctcggatcatatggagctcatgtcagccgtgtgggtggcgggtgcacagagacggtctggaaggaaacacgcggatctgaacagcagtaatcctgggggatacgggggttgggctagattacagagggctcattttctacgtcatgtattttatgatacttgaattttttgaaatgggcatttattttataacatgttaaaatgtactttttaaattaagtcattttgtaatatttgaatttttacatttgttgtacaatcaggaaaagcaataaagatttttcaaaaataga

SEQ ID NO: 8626 - DNA, 3028 bp, Homo sapiens
  source 1..3028: mol_type = unassigned DNA
ccgctactctggccctcagggttgtgtagtttccggggccacggcacctgggcacaccaggtggcgtcgcgcctttgctttcctgagccttctgagtaaggtaatgtggtgtccgtggggcgacgcctgcgcacaagaccgcgtcgggcctcacttttcccaggccttctgggtaatgtagtttccgggatcggcacccggcctgtgccagcttgcagagctcaccaggtgcagacccctgcggccagggcgaggacggatctgagcagctgggcagcaggtgccaccgcctgtgggacccagagggcttgaggacatctgcaatgctccagaagcccaagagcgtgaagctgcgggccctgcgcagcccgaggaagttcggcgtggctggccggagctgccaggaggtgctgcgcaagggctgtctccgcttccagctccctgagcgcggttcccggctgtgcctgtacgaggatggcacggagctgacggaagattacttccccagtgttcccgacaacgccgagctggtgctgctcaccttgggccaggcctggcagggctatgtgagcgacatcaggcgcttcctcagtgcatttcacgagccacaggtggggctcatccaggccgcccagcagctgctgtgtgatgagcaggccccacagaggcagaggctgctggctgacctcctgcacaacgtcagccagaacatcgcggccgagacccgggctgaggacccgccgtggtttgaaggcttggagtcccgatttcagagcaagtctggctatctgagatacagctgtgagagccggatccggagttacctgagggaggtgagctcctacccctccacggtgggtgcggaggctcaggaggaattcctgcgggtcctcggctccatgtgccagaggctccggtccatgcagtacaatggcagctacttcgacagaggagccaagggcggcagccgcctctgcacaccggaaggctggttctcctgccagggtccctttgacatggacagctgcttatcaagacactccatcaacccctacagtaacagggagagcaggatcctcttcagcacctggaacctggatcacataatagaaaagaaacgcaccatcattcctacactggtggaagcaattaaggaacaagatggaagagaagtggactgggagtatttttatggcctgctttttacctcagagaacctaaaactagtgcacattgtctgccataagaaaaccacccacaagctcaactgtgacccaagcagaatctacaaaccccagacaaggttgaagcggaagcagcctgtgcggaaacgccagtgacacgtacacaccacgtcctggtctttgtttgaggcctgacgtgggcatcattttaacaggtgccttttttgtttttttgtttttcgtttttttggtcactccagtagctcctggaaaaaaccttaaaaaatgtttcctccaaatctgatttcattacatttctgaattgttggggttttttttgttgttttgttttgttttgtagatggagtttcacttttgttgcccaggctggagtgtagtggcgcgatctcggctcagcctcccgagtagctgggattacaggcatgtgccaccacgcccggctaatgtttgtatttttagtagagacggggtttcaccatgttggtcaggctggtctcaaactcctgacctcaggtgatccgcccacctcagcctcccaaagtgctgggatgacaggtgtgagccactgcgcccagcctgaatcatttcttataccttctgacagcccaacttccagaggacagctctggggtactcgttggatgtctgtgagtacctggtcatacgggtcagtagggataagaattgtctctgggctgaggaattcttctgttctctggtttcaccagcgttgggtttgctcatgtaatgtggtcaccatactcaaatggtgtcatggctgaagttggccaccttgcttgagggacaagttgtttatgtatcagctctctgctgggtctccctttccatggcaaatgggcagctccatcctcttgactcttctaaatgcccaaaagaggtgtcatgctttgggggtacgatgtttatactccgtaaagaacatacaaggacattcactgctgatttttttttttgtttgtttgagacagggtctcactctgtcgctcaggctggagtgcagtgatgcaatcttggctcactgcaacctccgcctctcaggttcaagtggttctccttcctcagcctcccaagtagctgggattacaggcacctaccaccagggccagctaatttttgtatgtttagtagaaacggggtttcaccatgttggccaggctgttctcgaactcctgacctcaggtgatctgcccgcctcggtctcccaaagtgctgggattacaggcatgagccactgcacctgacctgctgaattgtttataatggcaagaaataggaaaccccccaatgtctgttgaacagctatcacgttgaaccacgtgaaactgctgttttctaggccaaaaatggtgagcgatcatttatttcatgattcaacctgatacatttacatagtgcaaaactgtgtcacagtttcaggcttttatgaggaaagcgtttctgtgtagaaactggaagctgttcagggcatcggcagctgaaccctgctccgttggtcagcgttactatcatctcggatcatatggagctcatgtcagccgtgtgggtggcgggtgcacagagacggtctggaaggaaacacgcggatctgaacagcagtaatcctgggggatacgggggttgggctagattacagagggctcattttctacgtcatgtattttatgatacttgaattttttgaaatgggcatttattttataacatgttaaaatgtactttttaaattaagtcattttgtaatatttgaatttttacatttgttgtacaatcaggaaaagcaataaagatttttcaaaaataga

SEQ ID NO: 8627 - DNA, 674 bp, Homo sapiens
  source 1..674: mol_type = unassigned DNA
ccgctactctggccctcagggttgtgtagtttccggggccacggcacctgggcacaccaggtggcgtcgcgcctttgctttcctgagccttctgagtaaggtaatgtggtgtccgtggggcgacgcctgcgcacaagaccgcgtcgggcctcacttttcccaggccttctgggtaatgtagtttccgggatcggcacccggcctgtgccagcttgcagagctcaccaggtgcagacccctgcggccagggcgaggacggatctgagcagctgggcagcaggtgccaccgcctgtgggacccagagggcttgaggacatctgcaatgctccagaagcccaagagcgtgaagctgcgggccctgcgcagcccgaggaagttcggcgtggctggccggagctgccaggaggtgctgcgcaagggctgtctccgcttccagctccctgagcgcggttcccggctgtgcctgtacgaggatggcacggagctgacggaagattacttccccagtgttcccgacaacgccgagctggtgctgctcaccttgggccaggcctggcagggctctgttggtgtcagggcaaggacaaagacccgggacacctcaagtctgagtcctggtgattgccaggccctggggaatgggggaagatgtggtcagaggctcttcttgtga

SEQ ID NO: 8628 - DNA, 944 bp, Homo sapiens
  source 1..944: mol_type = unassigned DNA
atgctccagaagcccaagagcgtgaagctgcgggccctgcgcagcccgaggaagttcggcgtggctggccggagctgccaggaggtgctgcgcaagggctgtctccgcttccagctccctgagcgcggttcccggctgtgcctgtacgaggatggcacggagctgacggaagattacttccccagtgttcccgacaacgccgagctggtgctgctcaccttgggccaggcctggcagggctgctggagtgcagtggcgtgatcttggctcaccgcaacctctgcctccctgcaccctctgcctcccaggttaaagcgattctcctgcctcagcctcccgagtagctgggattacagggcttggagtcccgatttcagagcaagtctggctatctgagatacagctgtgagagccggatccggagttacctgagggaggtgagctcctacccctccacggtgggtgcggaggctcaggaggaattcctgcgggtcctcggctccatgtgccagaggctccggtccatgcagtacaatggcagctacttcgacagaggagccaagggcggcagccgcctctgcacaccggaaggctggttctcctgccagggtccctttgacatggacagctgcttatcaagacactccatcaacccctacagtaacagggagagcaggatcctcttcagcacctggaacctggatcacataatagaaaagaaacgcaccatcattcctacactggtggaagcaattaaggaacaagatggaagagaagtggactgggagtatttttatggcctgctttttacctcagagaacctaaaactagtgcacattgtctgccataagaaaaccacccacaagctcaactgtgacccaagcagaatctacaaaccccagacaaggttgaagcggaagcagcctgtgcggaaacgccagtga

SEQ ID NO: 8629 - DNA, 572 bp, Homo sapiens
  source 1..572: mol_type = unassigned DNA
atgctccagaagcccaagagcgtgaagctgcgggccctgcgcagcccgaggaagttcggcgtggctggccggagctgccaggaggtgctgcgcaagggctgtctccgcttccagctccctgagcgcggttcccggctgtgcctgtacgaggatggcacggagctgacggaagattacttccccagtgttcccgacaacgccgagctggtgctgctcaccttgggccaggcctggcagggctgtgagtgatggacagctgcttatcaagacactccatcaacccctacagtaacagggagagcaggatcctcttcagcacctggaacctggatcacataatagaaaagaaacgcaccatcattcctacactggtggaagcaattaaggaacaagatggaagagaagtggactgggagtatttttatggcctgctttttacctcagagaacctaaaactagtgcacattgtctgccataagaaaaccacccacaagctcaactgtgacccaagcagaatctacaaaccccagacaaggttgaagcggaagcagcctgtgcggaaacgccagtga

SEQ ID NO: 8630 - DNA, 3152 bp, Homo sapiens
  source 1..3152: mol_type = unassigned DNA
ccgctactctggccctcagggttgtgtagtttccggggccacggcacctgggcacaccaggtggcgtcgcgcctttgctttcctgagccttctgagtaaggtaatgtggtgtccgtggggcgacgcctgcgcacaagaccgcgtcgggcctcacttttcccaggccttctgggtaatgtagtttccgggatcggcacccggcctgtgccagcttgcagagctcaccaggtgcagacccctgcggccagggcgaggacggatctgagcagctgggcagcaggtgccaccgcctgtgggacccagagggcttgaggacatctgcaatgctccagaagcccaagagcgtgaagctgcgggccctgcgcagcccgaggaagttcggcgtggctggccggagctgccaggaggtgctgcgcaagggctgtctccgcttccagctccctgagcgcggttcccggctgtgcctgtacgaggatggcacggagctgacggaagattacttccccagtgttcccgacaacgccgagctggtgctgctcaccttgggccaggcctggcagggctatgtgagcgacatcaggcgcttcctcagtgcatttcacgagccacaggtggggctcatccaggccgcccagcagctgctgtgtgatgagcaggccccacagaggcagaggctgctggctgacctcctgcacaacgtcagccagaacatcgcggccgagacccgggctgaggacccgccgtggtttgaaggcttggagtcccgatttcagagcaagtctggctatctgagatacagctgtgagagccggatccggagttacctgagggaggtgagctcctacccctccacggtgggtgcggaggctcaggaggaattcctgcgggtcctcggctccatgtgccagaggctccggtccatgcagtacaatggcagctacttcgacagaggagccaagggcggcagccgcctctgcacaccggaaggctggttctcctgccagggtccctttgacatggacagctgcttatcaagacactccatcaacccctacagtaacagggagagcaggatcctcttcagcacctggaacctggatcacatagatggagtcttgctctgtggcccaggctaaagtgcagtggcaggatcatggctcactgaagccctgaactcctggcctcaagcaatcctcctgcctcagcctcctgagtcgctgggactacagaatagaaaagaaacgcaccatcattcctacactggtggaagcaattaaggaacaagatggaagagaagtggactgggagtatttttatggcctgctttttacctcagagaacctaaaactagtgcacattgtctgccataagaaaaccacccacaagctcaactgtgacccaagcagaatctacaaaccccagacaaggttgaagcggaagcagcctgtgcggaaacgccagtgacacgtacacaccacgtcctggtctttgtttgaggcctgacgtgggcatcattttaacaggtgccttttttgtttttttgtttttcgtttttttggtcactccagtagctcctggaaaaaaccttaaaaaatgtttcctccaaatctgatttcattacatttctgaattgttggggttttttttgttgttttgttttgttttgtagatggagtttcacttttgttgcccaggctggagtgtagtggcgcgatctcggctcagcctcccgagtagctgggattacaggcatgtgccaccacgcccggctaatgtttgtatttttagtagagacggggtttcaccatgttggtcaggctggtctcaaactcctgacctcaggtgatccgcccacctcagcctcccaaagtgctgggatgacaggtgtgagccactgcgcccagcctgaatcatttcttataccttctgacagcccaacttccagaggacagctctggggtactcgttggatgtctgtgagtacctggtcatacgggtcagtagggataagaattgtctctgggctgaggaattcttctgttctctggtttcaccagcgttgggtttgctcatgtaatgtggtcaccatactcaaatggtgtcatggctgaagttggccaccttgcttgagggacaagttgtttatgtatcagctctctgctgggtctccctttccatggcaaatgggcagctccatcctcttgactcttctaaatgcccaaaagaggtgtcatgctttgggggtacgatgtttatactccgtaaagaacatacaaggacattcactgctgatttttttttttgtttgtttgagacagggtctcactctgtcgctcaggctggagtgcagtgatgcaatcttggctcactgcaacctccgcctctcaggttcaagtggttctccttcctcagcctcccaagtagctgggattacaggcacctaccaccagggccagctaatttttgtatgtttagtagaaacggggtttcaccatgttggccaggctgttctcgaactcctgacctcaggtgatctgcccgcctcggtctcccaaagtgctgggattacaggcatgagccactgcacctgacctgctgaattgtttataatggcaagaaataggaaaccccccaatgtctgttgaacagctatcacgttgaaccacgtgaaactgctgttttctaggccaaaaatggtgagcgatcatttatttcatgattcaacctgatacatttacatagtgcaaaactgtgtcacagtttcaggcttttatgaggaaagcgtttctgtgtagaaactggaagctgttcagggcatcggcagctgaaccctgctccgttggtcagcgttactatcatctcggatcatatggagctcatgtcagccgtgtgggtggcgggtgcacagagacggtctggaaggaaacacgcggatctgaacagcagtaatcctgggggatacgggggttgggctagattacagagggctcattttctacgtcatgtattttatgatacttgaattttttgaaatgggcatttattttataacatgttaaaatgtactttttaaattaagtcattttgtaatatttgaatttttacatttgttgtacaatcaggaaaagcaataaagatttttcaaaaataga

SEQ ID NO: 8631 - DNA, 4208 bp, Homo sapiens
  source 1..4208: mol_type = unassigned DNA
ccccggttccgctgtcttttctgtctacagtttgcgatccccgcgtccaggatggagcagctgaacgaactggagctgctgatggagaagagtttttgggaggaggcggagctgccggcggagctatttcagaagaaagtggtagcttcctttccaagaacagttctgagcacaggaatggataaccggtacctggtgttggcagtcaatactgtacagaacaaagagggaaactgtgaaaagcgcctggtcatcactgcttcacagtcactagaaaataaagaactatgcatccttaggaatgactggtgttctgttccagtagagccaggagatatcattcatttggagggagactgcacatctgacacttggataatagataaagattttggatatttgattctgtatccagacatgctgatttctggcaccagcatagccagtagtattcgatgtatgagaagagctgtcctgagtgaaacttttaggagctctgatccagccacacgccaaatgctaattggtacggttctccatgaggtgtttcaaaaagccataaataatagctttgccccagaaaagctacaagaacttgcttttcaaacaattcaagaaataagacatttgaaggaaatgtaccgcttaaatctaagtcaagatgaaataaaacaagaagtagaggactatcttccttcgttttgtaaatgggcaggagatttcatgcataaaaacacttcgactgacttccctcagatgcagctctctctgccaagtgataatagtaaggataattcaacatgtaacattgaagtcgtgaaaccaatggatattgaagaaagcatttggtcccctaggtttggattgaaaggcaaaatagatgttacagttggtgtgaaaatacatcgagggtataaaacaaaatacaagataatgccgctggaacttaaaactggcaaagaatcaaattctattgaacaccgtagtcaggttgttctgtacactctactaagccaagagagaagagctgatccagaggctggcttgcttctctacctcaagactggtcagatgtaccctgtgcctgccaaccatctagataaaagagaattattaaagctaagaaaccagatggcattctcattgtttcaccgtattagcaaatctgctactagacagaagacacagcttgcttctttgccacaaataattgaggaagagaaaacttgtaaatattgttcacaaattggcaattgtgctctttatagcagagcagttgaacaacagatggattgtagttcagtcccaattgtgatgctgcccaaaatagaagaagaaacccagcatctgaagcaaacacacttagaatatttcagcctttggtgtctaatgttaaccctggagtcacaatcgaaggataataaaaagaatcaccaaaatatctggctaatgcctgcttcggaaatggagaagagtggcagttgcattggaaacctgattagaatggaacatgtaaagatagtttgtgatgggcaatatttacataatttccaatgtaaacatggtgccatacctgtcacaaatctaatggcaggtgacagagttattgtaagtggagaagaaaggtcactgtttgctttgtctagaggatatgtgaaggagattaacatgacaacagtaacttgtttattagacagaaacttgtcggtccttccagaatcaactttgttcagattagaccaagaagaaaaaaattgtgatatagataccccattaggaaatctttccaaattgatggaaaacacgtttgtcagcaaaaaacttcgagatttaattattgactttcgtgaacctcagtttatatcctaccttagttctgttcttccacatgatgcaaaggatacagttgcctgcattctaaagggtttgaataagcctcagaggcaagcgatgaaaaaggtacttctttcaaaagactacacactcatcgtgggtatgcctgggacaggaaaaacaactacgatatgtactctcgtaagaattctctacgcctgtggttttagcgttttgttgaccagctatacacactctgctgttgacaatattcttttgaagttagccaagtttaaaataggatttttgcgtttgggtcagattcagaaggttcatccagctatccagcaatttacagagcaagaaatttgcagatcaaagtccattaaatccttagctcttctagaagaactctacaatagtcaacttatagttgcaacaacatgtatgggaataaaccatccaatattttcccgtaaaatttttgatttttgtattgtggatgaagcctctcaaattagccaaccaatttgtctgggccccctttttttttcacggagatttgtgttagtgggggaccatcagcagcttcctcccctggtgctaaaccgtgaagcaagagctcttggcatgagtgaaagcttattcaagaggctggagcagaataagagtgctgttgtacagttaaccgtgcagtacagaatgaacagtaaaattatgtccttaagtaataagctgacctatgagggcaagctggagtgtggatcagacaaagtggccaatgcagtgataaacctacgtcactttaaagatgtgaagctggaactggaattttatgctgactattctgataatccttggttgatgggagtatttgaacccaacaatcctgtttgtttccttaatacagacaaggttccagcgccagaacaagttgaaaaaggtggtgtgagcaatgtaacagaagccaaactcatagttttcctaacctccatttttgttaaggctggatgcagtccctctgatattggtattattgcaccgtacaggcagcaattaaagatcatcaatgatttattggcacgttctattgggatggtcgaagttaatacagtagacaaataccaaggaagggacaaaagtattgtcctagtatcttttgttagaagtaataaggatggaactgttggtgaactcttgaaagattggcgacgtcttaatgttgctataaccagagccaaacataaactgattcttctggggtgtgtgccctcactaaattgctatcctcctttggagaagctgcttaatcatttaaactcagaaaaattaatcattgatcttccatcaagagaacatgaaagtctttgccacatattgggtgactttcaaagagaataaaacactatttcccttgccttttcatactagggcagtatctcctctagctagtgcccatacagaaaattctatcaccatacaaaatttaatgcagtatttatgttttaaagcacaggtgtaccgaaaactgtgaaaagtctgaatttatgggttctatgcatgcatttttgcctaacctagagaaagagtttgataaatttttaccagctttgaagatggattaacttttgactttgagctttaaacttttaagtcagacatttcaggactaatttgattttgtagatatcattgtaagaactttatttgaaagactgaataaagggatttgatttgttttcatcatttaagcacagtcttgtgatgatgagaacataagtgtgattcttttctgtattttgaggtccctaatccaaagcccattttgctaggattttttctgctatcagatgtgttttcactctaaacctagtcttttatgacatgaattgattacttcctgttaattttctatcctcccttactatcctccttttttgttttcagtattcagtatttcagtattctagagtagattttgatataaaagaaaataattcttacatcatcttttgcaacaaattttgttttctgaattgataataaatttaaaaagttgattcctattttcacatatgttcatatgcccctatgtttgggggtatcactcagttttcccttttttgtgtaaagatgttttgtaaaacaaaattgtctcaaagtgattatattatatatataaaaagtaacagattttaacaaaggttaaaagattcttggggtaacagattcttctggggcttggaaatcttccatttctcttgagggttttttttaatgagtgttaaatatgttaaaatttttatttctacctcatgtgtttttttaaattattacttgaagttttttatttaataaattttttctactaatgg

SEQ ID NO: 8632 - DNA, 3702 bp, Homo sapiens
  source 1..3702: mol_type = unassigned DNA
atgaagactccctgtattcccagtcctaagcaagggagcaaaggcaggggacagagccctgctgctcaggtgaggggccccacgtggaacgcgccggcgcgggaggggcggcctggcgcaggtcatttgggacatctgcgggttggcgcatgcgcgcgaggtgcgcaggctcgcgcctttttcccttttctaagctttctgtgttacccccggttccgctgtcttttctgtctacagtttgcgatccccgcgtccaggatggagcagctgaacgaactggagctgctgatggagaagagtttttgggaggaggcggagctgccggcggagctatttcagaagaaagtggtagcttcctttccaagaacagttctgagcacaggaatggataaccggtacctggtgttggcagtcaatactgtacagaacaaagagggaaactgtgaaaagcgcctggtcatcactgcttcacagtcactagaaaataaagaactatgcatccttaggaatgactggtgttctgttccagtagagccaggagatatcattcatttggagggagactgcacatctgacacttggataatagataaagattttggatatttgattctgtatccagacatgctgatttctggcaccagcatagccagtagtattcgatgtatgagaagagctgtcctgagtgaaacttttaggagctctgatccagccacacgccaaatgctaattggtacggttctccatgaggtgtttcaaaaagccataaataatagctttgccccagaaaagctacaagaacttgcttttcaaacaattcaagaaataagacatttgaaggaaatgtaccgcttaaatctaagtcaagatgaaataaaacaagaagtagaggactatcttccttcgttttgtaaatgggcaggagatttcatgcataaaaacacttcgactgacttccctcagatgcagctctctctgccaagtgataatagtaaggataattcaacatgtaacattgaagtcgtgaaaccaatggatattgaagaaagcatttggtcccctaggtttggattgaaaggcaaaatagatgttacagttggtgtgaaaatacatcgagggtataaaacaaaatacaagataatgccgctggaacttaaaactggcaaagaatcaaattctattgaacaccgtagtcaggttgttctgtacactctactaagccaagagagaagagctgatccagaggctggcttgcttctctacctcaagactggtcagatgtaccctgtgcctgccaaccatctagataaaagagaattattaaagctaagaaaccagatggcattctcattgtttcaccgtattagcaaatctgctactagacagaagacacagcttgcttctttgccacaaataattgaggaagagaaaacttgtaaatattgttcacaaattggcaattgtgctctttatagcagagcagttgaacaacagatggattgtagttcagtcccaattgtgatgctgcccaaaatagaagaagaaacccagcatctgaagcaaacacacttagaatatttcagcctttggtgtctaatgttaaccctggagtcacaatcgaaggataataaaaagaatcaccaaaatatctggctaatgcctgcttcggaaatggagaagagtggcagttgcattggaaacctgattagaatggaacatgtaaagatagtttgtgatgggcaatatttacataatttccaatgtaaacatggtgccatacctgtcacaaatctaatggcaggtgacagagttattgtaagtggagaagaaaggtcactgtttgctttgtctagaggatatgtgaaggagattaacatgacaacagtaacttgtttattagacagaaacttgtcggtccttccagaatcaactttgttcagattagaccaagaagaaaaaaattgtgatatagataccccattaggaaatctttccaaattgatggaaaacacgtttgtcagcaaaaaacttcgagatttaattattgactttcgtgaacctcagtttatatcctaccttagttctgttcttccacatgatgcaaaggatacagttgcctgcattctaaagggtttgaataagcctcagaggcaagcgatgaaaaaggtacttctttcaaaagactacacactcatcgtgggtatgcctgggacaggaaaaacaactacgatatgtactctcgttccagcgccagaacaagttgaaaaaggtggtgtgagcaatgtaacagaagccaaactcatagttttcctaacctccatttttgttaaggctggatgcagtccctctgatattggtattattgcaccgtacaggcagcaattaaagatcatcaatgatttattggcacgttctattgggatggtcgaagttaatacagtagacaaataccaaggaagggacaaaagtattgtcctagtatcttttgttagaagtaataaggatggaactgttggtgaactcttgaaagattggcgacgtcttaatgttgctataaccagagccaaacataaactgattcttctggggtgtgtgccctcactaaattgctatcctcctttggagaagctgcttaatcatttaaactcagaaaaattaatcattgatcttccatcaagagaacatgaaagtctttgccacatattgggtgactttcaaagagaataaaacactatttcccttgccttttcatactagggcagtatctcctctagctagtgcccatacagaaaattctatcaccatacaaaatttaatgcagtatttatgttttaaagcacaggtgtaccgaaaactgtgaaaagtctgaatttatgggttctatgcatgcatttttgcctaacctagagaaagagtttgataaatttttaccagctttgaagatggattaacttttgactttgagctttaaacttttaagtcagacatttcaggactaatttgattttgtagatatcattgtaagaactttatttgaaagactgaataaagggatttgatttgttttcatcatttaagcacagtcttgtgatgatgagaacataagtgtgattcttttctgtattttgaggtccctaatccaaagcccattttgctaggattttttctgctatcagatgtgttttcactctaaacctagtcttttatgacatgaattgattacttcctgttaattttctatcctcccttactatcctccttttttgttttcagtattcagtatttcagtattctagagtagattttgatataaaagaaaataattcttacatcatcttttgcaacaaattttgttttctgaattgataataaatttaaaaagttgattcctattttcacatatgttcatatgcccctatgtttgggggtatcactcagttttcccttttttgtgtaaagatgttttgtaaaacaaaattgtctcaaagtgattatattatatatataaaaagtaacagattttaacaaaggttaaaagattcttggggtaacagattcttctggggcttggaaatcttccatttctcttgagggttttttttaatgagtgttaaatatgttaaaatttttatttctacctcatgtgtttttttaaattattacttgaagttttttatttaataaattttttctactaatgga

SEQ ID NO: 8633 - DNA, 4416 bp, Homo sapiens
  source 1..4416: mol_type = unassigned DNA
atgaagactccctgtattcccagtcctaagcaagggagcaaaggcaggggacagagccctgctgctcaggtgaggggccccacgtggaacgcgccggcgcgggaggggcggcctggcgcaggtcatttgggacatctgcgggttggcgcatgcgcgcgaggtgcgcaggctcgcgcctttttcccttttctaagctttctgtgttacccccggttccgctgtcttttctgtctacagtttgcgatccccgcgtccaggatggagcagctgaacgaactggagctgctgatggagaagagtttttgggaggaggcggagctgccggcggagctatttcagaagaaagtggtagcttcctttccaagaacagttctgagcacaggaatggataaccggtacctggtgttggcagtcaatactgtacagaacaaagagggaaactgtgaaaagcgcctggtcatcactgcttcacagtcactagaaaataaagaactatgcatccttaggaatgactggtgttctgttccagtagagccaggagatatcattcatttggagggagactgcacatctgacacttggataatagataaagattttggatatttgattctgtatccagacatgctgatttctggcaccagcatagccagtagtattcgatgtatgagaagagctgtcctgagtgaaacttttaggagctctgatccagccacacgccaaatgctaattggtacggttctccatgaggtgtttcaaaaagccataaataatagctttgccccagaaaagctacaagaacttgcttttcaaacaattcaagaaataagacatttgaaggaaatgtaccgcttaaatctaagtcaagatgaaataaaacaagaagtagaggactatcttccttcgttttgtaaatgggcaggagatttcatgcataaaaacacttcgactgacttccctcagatgcagctctctctgccaagtgataatagtaaggataattcaacatgtaacattgaagtcgtgaaaccaatggatattgaagaaagcatttggtcccctaggtttggattgaaaggcaaaatagatgttacagttggtgtgaaaatacatcgagggtataaaacaaaatacaagataatgccgctggaacttaaaactggcaaagaatcaaattctattgaacaccgtagtcaggttgttctgtacactctactaagccaagagagaagagctgatccagaggctggcttgcttctctacctcaagactggtcagatgtaccctgtgcctgccaaccatctagataaaagagaattattaaagctaagaaaccagatggcattctcattgtttcaccgtattagcaaatctgctactagacagaagacacagcttgcttctttgccacaaataattgaggaagagaaaacttgtaaatattgttcacaaattggcaattgtgctctttatagcagagcagttgaacaacagatggattgtagttcagtcccaattgtgatgctgcccaaaatagaagaagaaacccagcatctgaagcaaacacacttagaatatttcagcctttggtgtctaatgttaaccctggagtcacaatcgaaggataataaaaagaatcaccaaaatatctggctaatgcctgcttcggaaatggagaagagtggcagttgcattggaaacctgattagaatggaacatgtaaagatagtttgtgatgggcaatatttacataatttccaatgtaaacatggtgccatacctgtcacaaatctaatggcaggtgacagagttattgtaagtggagaagaaaggtcactgtttgctttgtctagaggatatgtgaaggagattaacatgacaacagtaacttgtttattagacagaaacttgtcggtccttccagaatcaactttgttcagattagaccaagaagaaaaaaattgtgatatagataccccattaggaaatctttccaaattgatggaaaacacgtttgtcagcaaaaaacttcgagatttaattattgactttcgtgaacctcagtttatatcctaccttagttctgttcttccacatgatgcaaaggatacagttgcctgcattctaaagggtttgaataagcctcagaggcaagcgatgaaaaaggtacttctttcaaaagactacacactcatcgtgggtatgcctgggacaggaaaaacaactacgatatgtactctcgtaagaattctctacgcctgtggttttagcgttttgttgaccagctatacacactctgctgttgacaatattcttttgaagttagccaagtttaaaataggatttttgcgtttgggtcagattcagaaggttcatccagctatccagcaatttacagagcaagaaatttgcagatcaaagtccattaaatccttagctcttctagaagaactctacaatagtcaacttatagttgcaacaacatgtatgggaataaaccatccaatattttcccgtaaaatttttgatttttgtattgtggatgaagcctctcaaattagccaaccaatttgtctgggccccctttttttttcacggagatttgtgttagtgggggaccatcagcagcttcctcccctggtgctaaaccgtgaagcaagagctcttggcatgagtgaaagcttattcaagaggctggagcagaataagagtgctgttgtacagttaaccgtgcagtacagaatgaacagtaaaattatgtccttaagtaataagctgacctatgagggcaagctggagtgtggatcagacaaagtggccaatgcagtgataaacctacgtcactttaaagatgtgaagctggaactggaattttatgctgactattctgataatccttggttgatgggagtatttgaacccaacaatcctgtttgtttccttaatacagacaaggttccagcgccagaacaagttgaaaaaggtggtgtgagcaatgtaacagaagccaaactcatagttttcctaacctccatttttgttaaggctggatgcagtccctctgatattggtattattgcaccgtacaggcagcaattaaagatcatcaatgatttattggcacgttctattgggatggtcgaagttaatacagtagacaaataccaaggaagggacaaaagtattgtcctagtatcttttgttagaagtaataaggatggaactgttggtgaactcttgaaagattggcgacgtcttaatgttgctataaccagagccaaacataaactgattcttctggggtgtgtgccctcactaaattgctatcctcctttggagaagctgcttaatcatttaaactcagaaaaattaatcattgatcttccatcaagagaacatgaaagtctttgccacatattgggtgactttcaaagagaataaaacactatttcccttgccttttcatactagggcagtatctcctctagctagtgcccatacagaaaattctatcaccatacaaaatttaatgcagtatttatgttttaaagcacaggtgtaccgaaaactgtgaaaagtctgaatttatgggttctatgcatgcatttttgcctaacctagagaaagagtttgataaatttttaccagctttgaagatggattaacttttgactttgagctttaaacttttaagtcagacatttcaggactaatttgattttgtagatatcattgtaagaactttatttgaaagactgaataaagggatttgatttgttttcatcatttaagcacagtcttgtgatgatgagaacataagtgtgattcttttctgtattttgaggtccctaatccaaagcccattttgctaggattttttctgctatcagatgtgttttcactctaaacctagtcttttatgacatgaattgattacttcctgttaattttctatcctcccttactatcctccttttttgttttcagtattcagtatttcagtattctagagtagattttgatataaaagaaaataattcttacatcatcttttgcaacaaattttgttttctgaattgataataaatttaaaaagttgattcctattttcacatatgttcatatgcccctatgtttgggggtatcactcagttttcccttttttgtgtaaagatgttttgtaaaacaaaattgtctcaaagtgattatattatatatataaaaagtaacagattttaacaaaggttaaaagattcttggggtaacagattcttctggggcttggaaatcttccatttctcttgagggttttttttaatgagtgttaaatatgttaaaatttttatttctacctcatgtgtttttttaaattattacttgaagttttttatttaataaattttttctactaatgga

SEQ ID NO: 8634 - DNA, 3519 bp, Homo sapiens
  source 1..3519: mol_type = unassigned DNA
gggaaggccagagcgggcgtccccgccagtgaccccacgccgcccgtccgcgcccaacccggcctccgccgagtgtccaaaccaaaagcgaaaggaacccgaccccgcgtcccctccggcggctccgtagtcgcgtccgcttggagctcgccgggcgcctccgaccctgccgggccgctttgtgacttcactcgtttcgcaacaagcccgggcagcccgcgccccacccactctggcccggcagcctcgccgcccgcagcctcgctccgctcctcgcgcttcccctccctccggggctgggcctgccccggccgtcgcggagcctcccctcccaccgtccgtgagtgtacgcgcccggccgccgcctccaggcagcccggagcaacccggcgcccggccccgctgggcgcagcactccgtcggcggcggcggcggcgcgatgctgtgcttcctgaggggaatggctttcgtccccttcctcttggtgacctggtcgtcagccgccttcattatctcctacgtggtcgccgtgctctccgggcacgtcaaccccttcctcccgtatatcagtgatacgggaacaacacctccagagagtggtatttttggatttatgataaacttctctgcatttcttggtgcagccacgatgtatacaagatacaaaatagtacagaagcaaaatcaaacctgctatttcagcactcctgtttttaacttggtgtctttagtgcttggattggtgggatgtttcggaatgggcattgtcgccaattttcaggagttagctgtgccagtggttcatgacgggggcgctcttttggcctttgtctgtggtgtcgtgtacacgctcctacagtccatcatctcttacaaatcatgtccccagtggaacagtctctcgacatgccacatacggatggtcatctctgccgtttcttgcgcagctgtcatccccatgattgtctgtgcttcactaatttccataaccaagctggagtggaatccaagagaaaaggattatgtatatcacgtagtgagtgcgatctgtgaatggacagtggcctttggttttattttctacttcctaactttcatccaagatttccagagtgtcaccctaaggatatccacagaaatcaatggtgatatttgaagaaagaagaattcagtctcactcagtgaatgtcgcaggccatttctaaaagtgctacagaggacagacagggttttgaggccaccctgattattgggatgcatctgcagcacatccaggacttgaatttcattacgagttcctaatagttgtatttctaaagatgtgtttcctagagaatgtacagccttatgacactgtagtgatgtttttataattttctaagtagatttttttatattaacaaattcatatacagaaaaaataaggtgttacaaaaaatggagagctcttatttttgtacagattctgtcgtttttgttttatttgtgtgagatttatggaaatacactaaatgagtaattcaggttcagtacatttattacaaagtgaaatcaggggatattcatttgtaaattttattcttagtgaatgaactgtataattttttttatcaggagagcacttataaaattcaatttataaagatcatatacccaaatcataaagatttagttgatacattaacactaagatactctgatttttagccgaactaaacaaagtgcttctactgagaggcctttataccaccatgtacagtaactctaagtgaatacggaagaccttggttttgaaattctgccaccttgtttctccctgctcatgaggtcgcaccttttgctcttgctgctaattgcccattcgtagtgggtgtaatgccaggtggaatggtttcaacaagtcaggtgaaaaccatcctttattgttgctggcacaacttgatatatagtctgactcagaactgaagctcacatctcaaattcatttcatgccagtaaatgtggcaaagagaagaaaggcccaagagcgagacaagaagaatggagaagggggcagccaagaagaacttctgggttcagggtactgtttatttgctccttctcttcatgcctgtggctggatgtcccacaacactataagaaatataagtcaagccctttgtgttaagcaagaactacagactccatcttttcacccaaatcatgaatgaccaataaaaagcaagttattccagaggaagaagcagcccttgaaatgttaaggcttaggcttgaaaggtgaagagcaggaattctctctttcaaatcctagagcataaacccatgtgtggccaagtgagatcagccctcaagggcacatgccaagggcagagcagcccatgtagacagcttcggagggcatgggggtgtagggagttcggggtagctcctcattaactatttgttgggtgagtaaaggggtgaggctcagtggcaggtacctctgcaatgacaagctgcctcccctctatgtgtttagcatatgttattagaacatgtccgacacccctaccgctgccatttgggccctttaataaagccaagtagagaaatctggcaataaaaggcaaatgtaagcatgctttctttaagacgcatcataaatggttttctttaagtgaatggaagagtttgacagagatacacctttgtaagaaaacattaagaatgctggctggctgtggtggctcacacctgtattcccagcactttgggaggcctaggcaggaggattgcttgagcctgggacttcgagaccagactgggaaacatggcaaaatcccatctctacaacaaaaatacaaaaattagccaagtgcggtggtgtgcctgtagtcctagttacttgggaggctgaggtgggagaatcacctgagcccaggaggtggaggctgcagtgagccatgccaatgcactccagtctgggcaacagagtgagaccctgtctcaaaaataaataaataaataaatgaataaagagaatgctaatcatttctgggttcactgcgactcactgtagtgctggggatcccccttgtaacactggaactgaaagacagtgatgaaagctatgtcaagcattcattattctgaagaggaggagaaatgccacatacctttcccatgggacctgtggtggaatgaatccatacttctgcctcacttcgagcagacttttgttctcggcgctcctcacgatggagtttcatgcttcattttcacatctctctgcacaattagattgggagctccttgagggcagagtacgtgccttaatctttatctttgtaatgccacaatgaacagagtgcctcctggtacactgtaggagcttaagaaatactcactgaatgcatgaatgaatgaatgaacaaatgaaggaatgactaaggatgtttgtagtgctataatatagaatgggatttactctgctttaccagttagtttcataataaacaaatagtctgtatcgcctggtaa

SEQ ID NO: 8635 - DNA, 2246 bp, Homo sapiens
  source 1..2246: mol_type = unassigned DNA
aaggtaagtcgaagtaggggagaagggacaggccccagcgcttgcagcccgctccctctagaagggtgcgtcagagggtgggatctggcagctcggggaagtgggcgcagcctggagcccccttacccgcgtcgcaggcgcgcgagactcctgctggccctcattgcctccgggggctaccttatgccaggcgccagaggggggctggttggggcgggagctgcgggggtttccgggggcggggatgagtgcagctgggctcagctccccgtgccctacctttctgttctcttccttggtttcccctactctcctcctgccccaagcagtgcctgatgccgagttccgtctctcgcgtcttttcctggtcccaggcaaagcggagcggagatcctcaaacggcctagtgcttcgcgcttccggagaaaatcagcggtctaattaattcctctggtttgttgaagcagttaccaagaatcttcaaccctttcccacaaaagctaattgagtacacgttcctgttgagtacacgttcctgttgatttacaaaaggtgcaggtatgagcaggtctgaagactaacattttgtgaagttgtaaaacagaaaacctgttagaaatgtggtggtttcagcaaggcctcagtttccttccttcagcccttgtaatttggacatctgctgctttcatattttcatacattactgcagtaacactccaccatatagacccggctttaccttatatcagtgacactggtacagtagctccagaaaaatgcttatttggggcaatgctaaatattgcggcagttttatgcattgctaccatttatgttcgttataagcaagttcatgctctgagtcctgaagagaacgttatcatcaaattaaacaaggctggccttgtacttggaatactgagttgtttaggactttctattgtggcaaacttccagaaaacaaccctttttgctgcacatgtaagtggagctgtgcttacctttggtatgggctcattatatatgtttgttcagaccatcctttcctaccaaatgcagcccaaaatccatggcaaacaagtcttctggatcagactgttgttggttatctggtgtggagtaagtgcacttagcatgctgacttgctcatcagttttgcacagtggcaattttgggactgatttagaacagaaactccattggaaccccgaggacaaaggttatgtgcttcacatgatcactactgcagcagaatggtctatgtcattttccttctttggttttttcctgacttacattcgtgattttcagaaaatttctttacgggtggaagccaatttacatggattaaccctctatgacactgcaccttgccctattaacaatgaacgaacacggctactttccagagatatttgatgaaaggataaaatatttctgtaatgattatgattctcagggattggggaaaggttcacagaagttgcttattcttctctgaaattttcaaccacttaatcaaggctgacagtaacactgatgaatgctgataatcaggaaacatgaaagaagccatttgatagattattctaaaggatatcatcaagaagactattaaaaacacctatgcctatacttttttatctcagaaaataaagtcaaaagactatgatatcatagttttttataccttatttaagagaaacaacctgacgtgcaccaatcagtctgcacatcccaacccttcacattttataaattattgtagatcatgttttgttaggagcacttttatgagagacattttccatgactaaataatcagcattagtcagtaaatcctttagaactgggttttgaaatgggagttttatcatattaaatcatttcttgtagtcttacattttttgttgttgttctggaatctacctgtaaaggaaagtagacctggattcatgtgggctcttccatggcttaagtgttgcccaagagattttgtaggtaacgatttttttttttctggccacaatgccagatactaagctaattggtctatcatacacatgcttgcagtagtttcatgaagtttagtctctggcgtgaaattttaatcaccaatgaaggagagaggcacctgtaggtaaatttactttagtcatattttatataaaacaagggttagtattcatgtaacattgagaagtttgggaataacagcagatatgattaataaaagtcataaccat

SEQ ID NO: 8636 - DNA, 1883 bp, Homo sapiens
  source 1..1883: mol_type = unassigned DNA
gcgattgccgtaaaggggaacaaggtttgaacgagcagcgccgcaggcgcgctcctcggtgccgtgagcgcgccccggggccggccggtctgctcgggagcgcgccccgtggcccagccctgtctccttttagcataggggcttcggcgccagcggccagcgctagtcggtctggtaaggatttacaaaaggtgcaggtatgagcaggtctgaagactaacattttgtgaagttgtaaaacagaaaacctgttagaaatgtggtggtttcagcaaggcctcagtttccttccttcagcccttgtaatttggacatctgctgctttcatattttcatacattactgcagtaacactccaccatatagacccggctttaccttatatcagtgacactggtacagtagctccagaaaaatgcttatttggggcaatgctaaatattgcggcagttttatgcattgctaccatttatgttcgttataagcaagttcatgctctgagtcctgaagagaacgttatcatcaaattaaacaaggctggccttgtacttggaatactgagttgtttaggactttctattgtggcaaacttccagaaaacaaccctttttgctgcacatgtaagtggagctgtgcttacctttggtatgggctcattatatatgtttgttcagaccatcctttcctaccaaatgcagcccaaaatccatggcaaacaagtcttctggatcagactgttgttggttatctggtgtggagtaagtgcacttagcatgctgacttgctcatcagttttgcacagtggcaattttgggactgatttagaacagaaactccattggaaccccgaggacaaaggttatgtgcttcacatgatcactactgcagcagaatggtctatgtcattttccttctttggttttttcctgacttacattcgtgattttcagaaaatttctttacgggtggaagccaatttacatggattaaccctctatgacactgcaccttgccctattaacaatgaacgaacacggctactttccagagatatttgatgaaaggataaaatatttctgtaatgattatgattctcagggattggggaaaggttcacagaagttgcttattcttctctgaaattttcaaccacttaatcaaggctgacagtaacactgatgaatgctgataatcaggaaacatgaaagaagccatttgatagattattctaaaggatatcatcaagaagactattaaaaacacctatgcctatacttttttatctcagaaaataaagtcaaaagactatgatatcatagttttttataccttatttaagagaaacaacctgacgtgcaccaatcagtctgcacatcccaacccttcacattttataaattattgtagatcatgttttgttaggagcacttttatgagagacattttccatgactaaataatcagcattagtcagtaaatcctttagaactgggttttgaaatgggagttttatcatattaaatcatttcttgtagtcttacattttttgttgttgttctggaatctacctgtaaaggaaagtagacctggattcatgtgggctcttccatggcttaagtgttgcccaagagattttgtaggtaacgatttttttttttctggccacaatgccagatactaagctaattggtctatcatacacatgcttgcagtagtttcatgaagtttagtctctggcgtgaaattttaatcaccaatgaaggagagaggcacctgtaggtaaatttactttagtcatattttatataaaacaagggttagtattcatgtaacattgagaagtttgggaataacagcagatatgattaataaaagtcataacc

SEQ ID NO: 8637 - DNA, 1748 bp, Homo sapiens
  source 1..1748: mol_type = unassigned DNA
gggcgcagcaggccaagggggaggtgcgagcgtggacctgggacgggtctgggcggctctcggtggttggcacgggttcgcacacccattcaagcggcaggacgcacttgtcttagcagttctcgctgaccgcgctagctgcggcttctacgctccggcactctgagttcatcagcaaacgccctggcgtctgtcctcaccatgcctagcctttgggaccgcttctcgtcgtcgtccacctcctcttcgccctcgtccttgccccgaactcccaccccagatcggccgccgcgctcagcctgggggtcggcgacccgggaggaggggtttgaccgctccacgagcctggagagctcggactgcgagtccctggacagcagcaacagtggcttcgggccggaggaagacacggcttacctggatggggtgtcgttgcccgacttcgagctgctcagtgaccctgaggatgaacacttgtgtgccaacctgatgcagctgctgcaggagagcctggcccaggcgcggctgggctctcgacgccctgcgcgcctgctgatgcctagccagttggtaagccaggtgggcaaagaactactgcgcctggcctacagcgagccgtgcggcctgcggggggcgctgctggacgtctgcgtggagcagggcaagagctgccacagcgtgggccagctggcactcgaccccagcctggtgcccaccttccagctgaccctcgtgctgcgcctggactcacgactctggcccaagatccaggggctgtttagctccgccaactctcccttcctccctggcttcagccagtccctgacgctgagcactggcttccgagtcatcaagaagaagctgtacagctcggaacagctgctcattgaggagtgttgaacttcaacctgagggggccgacagtgccctccaagacagagacgactgaacttttggggtggagactagaggcaggagctgagggactgattcctgtggttggaaaactgaggcagccacctaaggtggaggtgggggaatagtgtttcccaggaagctcattgagttgtgtgcgggtggctgtgcattggggacacatacccctcagtactgtagcatgaaacaaaggcttaggggccaacaaggcttccagctggatgtgtgtgtagcatgtaccttattatttttgttactgacagttaacagtggtgtgacatccagagagcagctgggctgctcccgccccagcccggcccagggtgaaggaagaggcacgtgctcctcagagcagccggagggaggggggaggtcggaggtcgtggaggtggtttgtgtatcttactggtctgaagggaccaagtgtgtttgttgtttgttttgtatcttgtttttctgatcggagcatcactactgacctgttgtaggcagctatcttacagacgcatgaatgtaagagtaggaaggggtgggtgtcagggatcacttgggatctttgacacttgaaaaattacacctggcagctgcgtttaagccttcccccatcgtgtactgcagagttgagctggcaggggaggggctgagagggtgggggctggaacccctccccgggaggagtgccatctgggtcttccatctagaactgtttacatgaagataagatactcactgttcatgaatacacttgatgttcaagtattaagacctatgcaatattttttacttttctaataaacatgtttgttaaaaca

SEQ ID NO: 8638 - DNA, 2604 bp, Homo sapiens
  source 1..2604: mol_type = unassigned DNA
gctactgcgaggagccggcgcagggtggcccgggaggggtgagcagggtgccgctggctgctggggtctgcaggtcaccgagtccccaggagaggggactcctaagaagccacctgcctgtgtttacccggcagcgagcgcgcaggcccccgcgaactcctggcagcgctcaggaaaggccgttgcgcctcgcgaaggaaacagagccgttgaccatggttgcaactggcagtttgagcagcaagaacccggccagcatttcagaattgctggactgtggctatcacccagagagcctgctaagtgattttgactactgggattatgttgttcctgaacccaacctcaacgaggtaatatttgaggaatcaacttgccagaatttggttaaaatgctggagaactgtctgtccaaatcaaagcaaactaaacttggttgctcaaaggtccttgtccctgagaaactgacccagagaattgctcaagatgtcctgcggctttcctcaacggagccctgcggcttgcgaggttgtgttatgcacgtgaacttggaaattgaaaatgtatgtaaaaagctggataggattgtgtgtgattctagcgtcgtacctacttttgagcttacacttgtgtttaagcaggagaactgctcatggactagcttcagggactttttctttagtagaggtcgcttctcctctggtttcaggagaactctgatcctcagctcaggatttcgacttgttaagaaaaaactttactcactgattggaacaacagtgattgaagggtcctaaaaagggaaaatatataaagattatttcatgattgggtagtaaaactattcagctagtcagctaaagtcatttgtagtttgccccacctgccctaaataagaaaccccaaatgtagtctcttttctttctgtgtttcacattcatagcaactgcagctaacaggctgattttctggcctttggagaagtgattcaaaatagtgtagattttctgcatagatcccatttttgtacagaattgaatgggatggaataggtaagcaaaagtagaagcccatttgagttttacatttgattccacaatttggtttcaggtaggcttggtaatagactatataaaccagatttgcctattttgattttcatatggcttttttttctgtaagttttcagaggattttttaaatcacagaatcatactaaatgatatttagcctatcaaaacttccaaaagcccacaccaccagttcctgactcaaatttgaagggtttttagacaggagggtaggattaagtaggtgagtttaattaaagcttaaccctaggtaagagtaaatgagaaatattacggcaataatggaactgcttcactgtttcttggtgacttcctcactctaatgttttaaagaggcaacaaaagcttgtggtgccatttcagtaaccacggtgttgttttagatgcctttataagctcagtttcccctgttcttaagtgttgaatactgtctttaaactagaaaaatgcaaaatattgaactgatatttttgtgtgtagttgattactcttccattgagtgaatgatgaatacctgtgaggataggaaattagttctgagatctagtccctctctgattcacttagtaatctatcctcttttcagtattacatgtgcttaatctcagatgaaccatttcaccatggcagtgttatctcatctctgggcttttctgggaattgaagtatctctccttaaccccaattgtcaagggtagtagctgtatactaccactttgaattattgaaacgggtcaatttacgaagtctgcattggctatggagatatggtttatagtacagcctagagaatgaaactcaccgtccagataaccatgcatgcacccagattttttccaccttggatacctgtcactagggaataataaaggcctgattttttgtcttattccaactaagtagatcattatctctttccttttttatgttaatgagagaatttagcctccactcaacaatgttcaattcagcaaggctttcatatccttgctgtgggtcgtggataaggagcttattcaggtttcctgccctagctattagctccacttcacatgctggagaccggcgtagggacagatgtattcatcctggtgttactgaaaaacaggtgtgatcctgttactgatactataagtgacctaaaatgtcactgttcaaattagccagtgttctaacaaactaaactcttcaaatgcttggaaagatactacaaagccaatctttatagaattgggccaagataaatctatgttgttttgcatggctattgttaagctccaaaggttcactgtgtttctgccgctgtcctggagttgtcaccactgactgggcaaggcttcttgggcatggatgtagaactgttgtccttttcccactaacagttatctttgactctcttgcctgttatgcttacaaaatggtgatggcttatggaaggctgttaaattaatattcctgttaaaggaaattaaagtttgtctatttttgacaataaaacattatatatttttaa

SEQ ID NO: 8639 - DNA, 852 bp, Homo sapiens
  source 1..852: mol_type = unassigned DNA
aggtgagcgaagctgcggccttggtgggggcagcggggccggggggcgctccgcggggcaggtcgcttccaagttttgcgaactgttgagttagtttcaggttgcggctccgctcccagggctttgtcaaattgagttgcagaggccggttccacccctttggcaaaggagttcctccgctagttcgctcccgggacgccgggcattttaggagcctctgcacgactcgcctgcttttgcaaatccgtctcttctcgcctcattttttccagcgctcaggaaaggccgttgcgcctcgcgaaggaaacagagccgttgaccatggttgcaactggcagtttgagcagcaagaacccggccagcatttcagaattgctggactgtggctatcacccagagagcctgctaagtgattttgactactgggattatgttgttcctgaacccaacctcaacgaggtaatatttgaggaatcaacttgccagaatttggttaaaatgctggagaactgtctgtccaaatcaaagcaaactaaacttggttgctcaaaggtccttgtccctgagaaactgacccagagaattgctcaagatgtcctgcggctttcctcaacggagccctgcggcttgcgaggttgtgttatgcacgtgaacttggaaattgaaaatgtatgtaaaaagctggataggattgtgtgtgattctagcgtcgtacctacttttgagcttacacttgtgtttaagcaggagaactgctcatggactagcttcagggactttttctttagtagaggtcgcttctcctctggtttcaggagaactctgatcctcagctcaggatttcgacttgtt

SEQ ID NO: 8640 - DNA, 553 bp, Homo sapiens
  source 1..553: mol_type = unassigned DNA
gagtgtgaaagcgcggacgctcggggaggggtcgcactgaacaatcaggttcaggctttgacgagtcgtgcacccggaattgcggtcccagtggcccgagatctaccctggaagcaacagcgctcaggaaaggccgttgcgcctcgcgaaggaaacagagccgttgaccatggttgcaactggcagtttgagcagcaagaacccggccagcatttcagaattgctggactgtggctatcacccagagagcctgctaagtgattttgactactgggattatgttgttcctgaacccaacctcaacgaggtaatatttgaggaatcaacttgccagaatttggttaaaatgctggagaactgtctgtccaaatcaaagcaaactaaacttggttgctcaaaggtccttgtccctgagaaactgacccagagaattgctcaagatgtcctgcggctttcctcaacggagccctgcggcttgcgaggttgtgttatgcacgtgaacttggaaattgaaaatgtatgtaaaaagctggataggattgtgtgtgattct

SEQ ID NO: 8641 - DNA, 3048 bp, Homo sapiens
  source 1..3048: mol_type = unassigned DNA
gcgctgggtcaaagttcagccccgcccccgcttccccctcgctgtctccctcggcctgtgccgccgccgacgccgcttgtgggcccgactccgctctgtctgcttcgccaccttctccccgagcactgcccggccggccgccatggctaacgtggctgacacgaagctgtacgacatcctgggcgtcccgcccggcgccagcgagaacgagctgaagaaggcatacagaaagttagccaaggaatatcatcctgataagaatccaaatgcaggagacaaatttaaagaaataagttttgcatatgaagtactatcaaatcctgagaagcgtgagttatatgacagatacggagagcaaggtcttcgggaaggcagcggcggaggtggtggcatggatgatattttctctcacatttttggtgggggattgttcggcttcatgggcaatcagagtagaagtcgaaatggcagaagaagaggagaggacatgatgcatccactcaaagtatctttagaagatctgtataatggcaagacaaccaaactacaacttagcaagaatgtgctctgtagtgcatgcagtggccaaggcggaaagtctggagctgtccaaaagtgtagtgcttgtcgaggtcgaggtgtgcgcatcatgatcagacagctggctccagggatggtacaacagatgcagtctgtgtgctctgattgtaatggagaaggagaggtaattaatgaaaaagaccgctgtaaaaaatgtgaagggaagaaggtgattaaagaagtcaagattcttgaagtccacgtagacaaaggcatgaaacatggacagagaattacattcactggggaagcagaccaggccccaggagtggaacccggagacattgttcttttgctacaggagaaagaacatgaggtatttcagagagatgggaatgatttgcacatgacatataaaataggacttgttgaagctctatgtggatttcagttcacatttaagcaccttgatggacgtcagattgtggtgaaatacccccctggcaaagtaattgaaccagggtgtgttcgtgtagttcgaggtgaagggatgccgcagtatcgtaatccctttgaaaaaggtgatctttacataaagtttgatgtgcagtttcctgaaaacaactggatcaacccagacaagctttctgaactagaagatcttctgccatctagaccggaagttcctaacataattggagaaacagaggaggtagagcttcaggaatttgatagcactcgaggctcaggaggtggtcagaggcgtgaagcctataatgatagctctgatgaagaaagcagcagccatcatggacctggagtgcagtgtgcccatcagtaaactctgcaaacaaattgcacaggtggattttctttccacatttgcctgatttgttctcagcaatccagctggagtgtcttatcaatccagatgaactgagggacatctgttggtctatgtataacttttaaaattggtatagtatctacagagtgtataatttaaactaaccacaaagctttacatcttcattttgactgttccatagcagaataaagcacttgaaaggaaacaagactccctttcacacatggattattataagtttcaatcctggtatctgtgcttgatttttatcagttttgtgtagatttttatgtttcatattttaaatttaaatcccacattgtaaagtttgtacaatttgtcctgaagctttgtgtttggctgcacctgcataagctgctacaaatagaataaagaatttcatagcctgtatctatcatttagatgcatggaaaaaaatgggctttgcacacaatgggtttggagctgactgggaacaatggaaaaaattacattagctgtggttgtaaagtttttttgtttttggttttgttttttttttcttttttctttttttttttttttaccatcttgtgaaaggtttctgaaactcgataataaaaagcggttggtgtaaattattcttttgtgtcacatttttagaaggaaaaacataaaagaatgtatccttagtactggttcttaaacagcccataaaaacccattggcctgaagcttatatctcaggcctatgcccatcttatagtcttggaagacaaaaggctggtagagacagtcttcagtggcttcagtgatgctctgtagaggccagggtgtcttgagtgctgtaactcccaagcactgggctagcctgacttctgtatctccctaccaccacccccttaaaaaaataaggtaacagcaaatctatagtaaaaccatgtctgcatagaacgtgttcaaatcctctgttttcattaaatgtaaaagatgctgtctccattaagttgaatatttggaattggagaagccattgattattattttgagtttctgtaatgttttatagaaaagtaagatgcttattcagaatttaagaatgaaggcaactgaaatatgcattgttgtagttatttatatttcaaactaaaaataagcaaaaaaaaaaggctggtttgagaaaaatcaggtaaaattgatgaaacggatgttgtgtttctctttccatcatctggtttttaccatttcactcagtaggtatttttagaacacacttatttgaggaaagagacatcagatgcacaattttacatttataaaggaacaaatggggaaaactgaaaactaaaaattttaaatgtattaaatgccatccctgagcctaaatctagtatttgtagtttatttctaggtctgctagaacctgaaaacctgaatgaaaaaaggtgtgctgacactaatcaagtcctgtgaggtttaaattattgacctatccactctacctccattgtacaaaaaatattttacaacaagcctgggtaagattcaacagcatagtagttttgtatccaaggttacttccccacaaccactttaaacataagaaatgtggtggcaatataaagtttgtagcctttccaataaaggtttataaaacagtt

SEQ ID NO: 8642 - DNA, 2763 bp, Homo sapiens
  source 1..2763: mol_type = unassigned DNA
cgcctctacgcgcgcccgccgttcccgcgaggcccacctagagccgggcggcgcaggcgcagagtccccgggccaagatggctgcgcggtgctccacacgctggttgctggtggttgtggggaccccgcggctgccggctatatcgggtagaggggcccggccgcccagggagggcgtggtgggggcatggctgagccgcaagctgagcgtccccgcctttgcgtcttccctgacctcttgcggcccccgagcgctgctgacattgagacctggtgtcagccttacaggaacaaaacataaccctttcatttgtactgcctccttccacacgagtgcccctttggccaaagaagattattatcagatattaggagtgcctcgaaatgccagccagaaagagatcaagaaagcctattatcagcttgccaagaagtatcaccctgacacaaataaggatgatcccaaagccaaggagaagttctcccagctggcagaagcctatgaggttttgagtgatgaggtgaagaggaagcagtacgatgcctacggctctgcaggcttcgatcctggggccagcggctcccagcatagctactggaagggaggccccactgtggaccccgaggagctgttcaggaagatctttggcgagttctcatcctcttcatttggagatttccagaccgtgtttgatcagcctcaggaatacttcatggagttgacattcaatcaagctgcaaagggggtcaacaaggagttcaccgtgaacatcatggacacgtgtgagcgctgcaacggcaaggggaacgagcccggcaccaaggtgcagcattgccactactgtggcggctccggcatggaaaccatcaacacaggcccttttgtgatgcgttccacgtgtaggagatgtggtggccgcggctccatcatcatatcgccctgtgtggtctgcaggggagcaggacaagccaagcagaaaaagcgagtgatgatccctgtgcctgcaggagtcgaggatggccagaccgtgaggatgcctgtgggaaaaagggaaattttcattacgttcagggtgcagaaaagccctgtgttccggagggacggcgcagacatccactccgacctctttatttctatagctcaggctcttcttgggggtacagccagagcccagggcctgtacgagacgatcaacgtgacgatcccccctgggactcagacagaccagaagattcggatgggtgggaaaggcatcccccggattaacagctacggctacggagaccactacatccacatcaagatacgagttccaaagaggctaacgagccggcagcagagcctgatcctgagctacgccgaggacgagacagatgtggaggggacggtgaacggcgtcaccctcaccagctctggtggcagcaccatggatagctccgcaggaagcaaggctaggcgtgaggctggggaggacgaggagggattcctttccaaacttaagaaaatgtttacctcatgatatcccagccgaggaaaaagatccactggaaactaggccgggaagcagcagcccctccaagggccagggcacctgggagacgggaggattccagaacagcagcactgagctcccacccgcagagcctctggacggccttggcaacagcaaaatcatgggacaacacctctctccacggaaaggtcacagtggacagcccgggcagtaggatgcagccccagaggctggtggcagtttcctgtccattggtaggtgacggcccctggctcaggcagagggagatggttagactcttgcagggctaaaactctaatttggaattgaatattgtggatatcttagttaaaggccatgcttacagcttagaaatgaagccttaagctgcatcaagttacgaagtgattaatttccttctcagcaaacctccgggaggttccagaatgagttcttcctgacaggttgtcttcactgggagcgtggggcccccaggccccaccagcaccgtcctcccctaatgaggggccctgccgaggcatcagctgctctgctcagttagtttttattcccggggtaccaagcagctgcacagtcggtgcctgggaggcacgtagaggcccagagagtccctgggggttctgctctgaccgtgtgggtggtgatccttgtcaggatgtacagtccttgctcccaccccatccgggatggccgcctgtccctgactattgagtcctgttgttgtaagccaggcatggagggctcctgcccttctgctgagccacagcccattgcagcactgtgctggccagacttcagctgccttgggaactgaagccctgccactgttgctagtcaggggcttggttctcccacttacactgttgacatctattttctgaagtgtgtttaaattattcagtgctaatcattgttttttcctttgtaaatgttgattcagaaaaggaaagcacaggctaagcagttgaaggttccccaccattcagtgagagcagaacccccattccccagcctctgctggtagcatgtcgcagtttccatgtgtttcaggatcttcgggctgtcgttagacaggttaatgaagaacacttctcaacagtttcctttttgttttcctttataattcactaaaataaagcatctattagtgtctgatttaggaatgtaaaatgattctgtattaatgtaaataagattatctattgcaaaaagatatttcaaacctaaa

SEQ ID NO: 8643 - DNA, 2591 bp, Homo sapiens
  source 1..2591: mol_type = unassigned DNA
gcaggcgcagagtccccgggccaagatggctgcgcggtgctccacacgctggttgctggtggttgtggggaccccgcggctgccggctatatcgggtagaggggcccggccgcccagggagggcgtggtgggggcatggctgagccgcaagctgagcgtccccgcctttgcgtcttccctgacctcttgcggcccccgagcgctgctgacattgagacctggtgtcagccttacaggaacaaaacataaccctttcatttgtactgcctccttccacacgagtgcccctttggccaaagaagattattatcagatattaggagtgcctcgaaatgccagccagaaagagatcaagaaagcctattatcagcttgccaagaagtatcaccctgacacaaataaggatgatcccaaagccaaggagaagttctcccagctggcagaagcctatgaggttttgagtgatgaggtgaagaggaagcagtacgatgcctacggctctgcaggcttcgatcctggggccagcggctcccagcatagctactggaagggaggccccactgtggaccccgaggagctgttcaggaagatctttggcgagttctcatcctcttcatttggagatttccagaccgtgtttgatcagcctcaggaatacttcatggagttgacattcaatcaagctgcaaagggggtcaacaaggagttcaccgtgaacatcatggacacgtgtgagcgctgcaacggcaaggggaacgagcccggcaccaaggtgcagcattgccactactgtggcggctccggcatggaaaccatcaacacaggcccttttgtgatgcgttccacgtgtaggagatgtggtggccgcggctccatcatcatatcgccctgtgtggtctgcaggggagcaggacaagccaagcagaaaaagcgagtgatgatccctgtgcctgcaggagtcgaggatggccagaccgtgaggatgcctgtgggaaaaagggaaattttcattacgttcagggtgcagaaaagccctgtgttccggagggacggcgcagacatccactccgacctctttatttctatagctcaggctcttcttgggggtacagccagagcccagggcctgtacgagacgatcaacgtgacgatcccccctgggactcagacagaccagaagattcggatgggtgggaaaggcatcccccggattaacagctacggctacggagaccactacatccacatcaagatacgagttccaaagaggctaacgagccggcagcagagcctgatcctgagctacgccgaggacgagacagatgtggaggggacggtgaacggcgtcaccctcaccagctctggaaaaagatccactggaaactaggccgggaagcagcagcccctccaagggccagggcacctgggagacgggaggattccagaacagcagcactgagctcccacccgcagagcctctggacggccttggcaacagcaaaatcatgggacaacacctctctccacggaaaggtcacagtggacagcccgggcagtaggatgcagccccagaggctggtggcagtttcctgtccattggtaggtgacggcccctggctcaggcagagggagatggttagactcttgcagggctaaaactctaatttggaattgaatattgtggatatcttagttaaaggccatgcttacagcttagaaatgaagccttaagctgcatcaagttacgaagtgattaatttccttctcagcaaacctccgggaggttccagaatgagttcttcctgacaggttgtcttcactgggagcgtggggcccccaggccccaccagcaccgtcctcccctaatgaggggccctgccgaggcatcagctgctctgctcagttagtttttattcccggggtaccaagcagctgcacagtcggtgcctgggaggcacgtagaggcccagagagtccctgggggttctgctctgaccgtgtgggtggtgatccttgtcaggatgtacagtccttgctcccaccccatccgggatggccgcctgtccctgactattgagtcctgttgttgtaagccaggcatggagggctcctgcccttctgctgagccacagcccattgcagcactgtgctggccagacttcagctgccttgggaactgaagccctgccactgttgctagtcaggggcttggttctcccacttacactgttgacatctattttctgaagtgtgtttaaattattcagtgctaatcattgttttttcctttgtaaatgttgattcagaaaaggaaagcacaggctaagcagttgaaggttccccaccattcagtgagagcagaacccccattccccagcctctgctggtagcatgtcgcagtttccatgtgtttcaggatcttcgggctgtcgttagacaggttaatgaagaacacttctcaacagtttcctttttgttttcctttataattcactaaaataaagcatctattagtgtctgatttaggaatgtaaaatgattctgtattaatgtaaataagattatctattgcaaaaagatatttcaaacct

SEQ ID NO: 8644 - DNA, 1413 bp, Homo sapiens
  source 1..1413: mol_type = unassigned DNA
agagtccccgggccaagatggctgcgcggtgctccacacgctggttgctggtggttgtggggaccccgcggctgccggctatatcgggtagaggggcccggccgcccagggagggcgtggtgggggcatggctgagccgcaagctgagcgtccccgcctttgcgtcttccctgacctcttgcggcccccgagcgctgctgacattgagacctggtgtcagccttacaggaagatctttggcgagttctcatcctcttcatttggagatttccagaccgtgtttgatcagcctcaggaatacttcatggagttgacattcaatcaagctgcaaagggggtcaacaaggagttcaccgtgaacatcatggacacgtgtgagcgctgcaacggcaaggggaacgagcccggcaccaaggtgcagcattgccactactgtggcggctccggcatggaaaccatcaacacaggcccttttgtgatgcgttccacgtgtaggagatgtggtggccgcggctccatcatcatatcgccctgtgtggtctgcaggggagcaggacaagccaagcagaaaaagcgagtgatgatccctgtgcctgcaggagtcgaggatggccagaccgtgaggatgcctgtgggaaaaagggaaattttcattacgttcagggtgcagaaaagccctgtgttccggagggacggcgcagacatccactccgacctctttatttctatagctcaggctcttcttgggggtacagccagagcccagggcctgtacgagacgatcaacgtgacgatcccccctgggactcagacagaccagaagattcggatgggtgggaaaggcatcccccggattaacagctacggctacggagaccactacatccacatcaagatacgagttccaaagaggctaacgagccggcagcagagcctgatcctgagctacgccgaggacgagacagatgtggaggggacggtgaacggcgtcaccctcaccagctctggaaaaagatccactggaaactaggccgggaagcagcagcccctccaagggccagggcacctgggagacgggaggattccagaacagcagcactgagctcccacccgcagagcctctggacggccttggcaacagcaaaatcatgggacaacacctctctccacggaaaggtcacagtggacagcccgggcagtaggatgcagccccagaggctggtggcagtttcctgtccattggtaggtgacggcccctggctcaggcagagggagatggttagactcttgcagggctaaaactctaatttggaattgaatattgtggatatcttagttaaaggccatgcttacagcttagaaatgaagccttaagctgcatcaagttacgaagtgattaatttccttctcagc

SEQ ID NO: 8645 - DNA, 2233 bp, Homo sapiens
  source 1..2233: mol_type = unassigned DNA
gggacggcgacagcgggtcggcgggccgcaggagggggtcatgggtaaagactactaccagacgttgggcctggcccgcggcgcgtcggacgaggagatcaagcgggcctaccgccgccaggcgctgcgctaccacccggacaagaacaaggagcccggcgccgaggagaagttcaaggagatcgctgaggcctacgacgtgctcagcgacccgcgcaagcgcgagatcttcgaccgctacggggaggaaggcctaaaggggagtggccccagtggcggtagcggcggtggtgccaatggtacctctttcagctacacattccatggagaccctcatgccatgtttgctgagttcttcggtggcagaaatccctttgacaccttttttgggcagcggaacggggaggaaggcatggacattgatgacccattctctggcttccctatgggcatgggtggcttcaccaacgtgaactttggccgctcccgctctgcccaagagcccgcccgaaagaagcaagatcccccagtcacccacgaccttcgagtctcccttgaagagatctacagcggctgtaccaagaagatgaaaatctcccacaagcggctaaaccccgacggaaagagcattcgaaacgaagacaaaatattgaccatcgaagtgaagaaggggtggaaagaaggaaccaaaatcactttccccaaggaaggagaccagacctccaacaacattccagctgatatcgtctttgttttaaaggacaagccccacaatatctttaagagagatggctctgatgtcatttatcctgccaggatcagcctccgggaggctctgtgtggctgcacagtgaacgtccccactctggacggcaggacgatacccgtcgtattcaaagatgttatcaggcctggcatgcggcgaaaagttcctggagaaggcctccccctccccaaaacacccgagaaacgtggggacctcattattgagtttgaagtgatcttccccgaaaggattccccagacatcaagaaccgtacttgagcaggttcttccaatatagctatctgagctccccaaggactgaccagggacctttccagagctcaaggatttctggacctttctaccagttgtggaccatgagagggtgggagggcccagggagggctttcgtactgctgaatgttttccagagcatatattacaatctttcaaagtcgcacactagacttcagtggtttttcgagctatagggcatcaggtggtgggaacagcaggaaaaggcattccagtctgccccactgggtctggcagccctcccgggatgggcccacatccacctccagtccctggccaggggtgagaggcagaccagcagatggacttgatccctctgtgtctttttgcttctggctggtagataatgtcaacctgcagtcttgattcccagaccctgtacactcctccttttctgttgtgtgatcagtttgtgctttattctgtatttgtctcccatgtcttgctcttctcctggagaattctgtcttctctttggccatctcaaattgagaacctaaactattcctgcagaactgcctggttggcgtccacaagcaatacctctcgttccagcaggaccaagggagccagcctccagtgagtgactccagcaagtgcagccacctctcccttgatggtctgggagcctggcctcagcaaggggccttcctgacctctggctccagtgaagctgaatgtcctcactttgtgggtcacactctttacatttctgtaaggcaatcttggcacacgtggggcttaccagtggcccaggtaattttttgtttcatggactatggactctttcaaagggatctgatccttttgaattttgcacagccctagatacaatcccttttgataaaagggtctttgcttctgattacaggagcactgtggaacgtctgtaaatatgtttttataattccatgtatagttggtgtacactcaaaacctgtccccggcagccagtgctctctgtatagggccataatggaattctgaagaaatcttggggagggaaggggagttggaacaaatgtctgttccctggaggccagtccagtgctcagacctttagactcattgtaagttgccactgccaacatgagaccaaagtgtgtgactagtcaatgaagtgcgacagcattaaagactgatgctaaacctc

SEQ ID NO: 8646 - DNA, 1216 bp, Homo sapiens
  source 1..1216: mol_type = unassigned DNA
aggcggcgccgaaggggtaaattctgagatcctgcccctgagctttcatgagctgttgaaccatctggaattcacaggcctgtcatgagagacacgatgagaagtccttaaaggcctaaaggggagtggccccagtggcggtagcggcggtggtgccaatggtacctctttcagctacacattccatggagaccctcatgccatgtttgctgagttcttcggtggcagaaatccctttgacaccttttttgggcagcggaacggggaggaaggcatggacattgatgacccattctctggcttccctatgggcatgggtggcttcaccaacgtgaactttggccgctcccgctctgcccaagagcccgcccgaaagaagcaagatcccccagtcacccacgaccttcgagtctcccttgaagagatctacagcggctgtaccaagaagatgaaaatctcccacaagcggctaaaccccgacggaaagagcattcgaaacgaagacaaaatattgaccatcgaagtgaagaaggggtggaaagaaggaaccaaaatcactttccccaaggaaggagaccagacctccaacaacattccagctgatatcgtctttgttttaaaggacaagccccacaatatctttaagagagatggctctgatgtcatttatcctgccaggatcagcctccgggaggctctgtgtggctgcacagtgaacgtccccactctggacggcaggacgatacccgtcgtattcaaagatgttatcaggcctggcatgcggcgaaaagttcctggagaaggcctccccctccccaaaacacccgagaaacgtggggacctcattattgagtttgaagtgatcttccccgaaaggattccccagacatcaagaaccgtacttgagcaggttcttccaatatagctatctgagctccccaaggactgaccagggacctttccagagctcaaggatttctggacctttctaccagttgtggaccatgagagggtgggagggcccagggagggctttcgtactgctgaatgttttccagagcatatattacaatctttcaaagtcgcacactagacttcagtggtttttcgagctatagggcatcaggtggtgggaacagcaggaaaaggcattccagtctgccccactgggtctggcagccctcccgggatgggcccacatccacctccagtccct

SEQ ID NO: 8647 - DNA, 4360 bp, Homo sapiens
  source 1..4360: mol_type = unassigned DNA
gttggcgcatactcaactctaagacctccggaacatggaatctgggcgtgcaccattattgacacctacaccagccgtccctttcttagaagacatacggtagcacttccaccctcgctcaaaactcgggaaaggaggggcggagggtggatgtcatcactccgcgcccggctgcccgcgacgcgccggcgggtggcgcagcccttcgctcgcccggcctccccctccctggttccgcgttctggttccgccatggaatccaacaaggatgaagctgagcgctgtatcagcatcgccctcaaggccatccagagcaaccagcccgaccgggcgctccgcttcctggagaaggcacagcggctgtatccgacgccgcgagttcgcgccctgattgagtccctcaaccagaaaccacagactgccggtgaccaacccccacccacagacacaacccatgccacccacaggaaagcaggtgggaccgatgccccctcggccaacggtgaagctggaggagagagcaccaaaggctacactgcagaacaggttgcagctgtgaaaagggtcaagcaatgtaaagattactatgagatcctgggggtgagcagaggggcctcggatgaggacctgaagaaggcctaccgcagactggccctcaaattccacccagacaagaaccacgcacctggtgccactgaagccttcaaagccattggcacagcatatgcggtactcagcaacccggagaagaggaagcagtatgaccagttcggcgatgacaagagccaggcggcccggcacggccatgggcatggggatttccaccgtggctttgaggccgacatctcccctgaagacctcttcaacatgttctttggcggcggcttcccttctagtaacgtccacgtctacagcaacggccgcatgcgctatacctaccagcaaaggcaggaccgcagggacaaccagggtgatggcgggctaggggtgtttgtgcagctgatgcctatcctcatcctgattctcgtgtcagctctcagccagctcatggtctccagtccaccctacagtctgagtccaagaccgtccgtgggccacatccacaggcgagtcactgaccacctgggtgtcgtctactatgtgggagacactttctccgaagagtacacaggctccagcctcaaaacagtcgagcggaatgtggaagatgattatatcgccaacctccggaacaactgctggaaggagaagcagcagaaggaaggcttgctgtaccgggcacgctactttggcgacacagatatgtaccacagagcacagaagatgggcacccccagctgcagccgactgtcagaggtgcaggcctccctgcatggatagtcctgggccagccacaccaccgaggtccaagtatgagccagggctgcctccaccctgcaactcctggcagctttggccctggtcatgagcagaggagggagggggagaaagggaggaagcctggtgattgtggcaaagactcctgtccccagcctgacctccagcctccagagaccgagcagctgtggggcctgctgggaaaccaaggtcggtttccgccctctagcgatgctgtcctccccactcctccgctctgctccctggctccaggggtgtgggggaccccagaaccaggcagagtgggaacttgaaactgttgctgagggccacccggggcttcttggtccactccagccatcagtcagcacggccctttctccagcacagcagactattgtccgtgccctggtatttaggccatcacatatggtggggcccaagagagccccatatgcacactgcctgcctgataccaggaagaaccatgtgggaataggtgggccaagagccctcccctttctccatccctccagctaggaggaaatggagcaagatgaacaggcagccacgaggtgggtgggagctggcagtcttggtggcggcaggggccgcgggccctgaccacccccctctggtgggatctgaggcactctctcgaatgccgtcacacctggcagcctggaagccacaggcatccggccttgcccaggcatctcgcctgcggtctgaggaagggaacagaaggtcatgagttcagggtcagacgcagccgctcagcacaggaggggtggaggggaaatgagagttgctggtagcaggctccctccttctgcagcccggcgaatgggggcgctgggctctgttcccagcgtttgccagaggtggccacttcagccaagcccagagaagtgtgggcagaagcagtgaaggttcttctctgtgtgggtgccctgcccaccccctcctttgcctgtgtcctcccggcctggatccatggctgactctgcctggaggccatttgtgcctgcctctgtgctgccgcaggagggcaggccgcaagtggggttggtgggggtcgagcgggcagcacggtgcagcggtgcagtggcaaggggggctacttgtgtggcataagctagaggagccggtgccgcctgaatgccgagctaactgttgccactctcctccccagactatgaaatccctggagaatttttggtgacatgcactgagccaaggtgatggactgtatatttgaggaaagacaaacaaagaaacaaaattaaaatggaattggaggccgaacgctgcacagctgccctctctctcacccagtaaatgcagaaagctcttaggacagacagaaaacctgccatggggctgcttccctccctcgcagggctggcggaggctccgcatcgcctctctcctaggatacagaaaccatggcaacgaaagtagaatgtaaaactcgcagcagatatcagtgggaagggctgggggagggggcacccagctgcctttcctccctcacaggagccaccaccagccacctctcaggagaagccagaggccctggccaaagataggaggaagaaagagaactctccatagaatgtaatttatagatgcgtgtatatgtatatatatctatttatatgtaaataggcatatatgaagatatatatatatatagtctactttttaaactctgcagggatttggttaagttgttgagctgatttcttccatgttttagaaaatgaggcctgtttggggaaggtaccctggtgatgtttttgctagacattagctgtagctgacagcataaggagagtcgcatcagagcttttcacagccccccgaaaccccagcctggttttgatggcagcagtaatcatgatagtgtgaacccgcgaaggcctcaggattatggttaacctggagaggagcaggccatggaggcaggtgccaggtcagtattgagtcacagtagaggccccacaaggacctgcttgggtgagaccacctctcccctctcagcagcgctggtgggctctttgtcctggtgcccaggagccctccagccccctgcccacagaagggaaggcctgcagagggggccaggatctacctaaccatttccccacccctaagtccctcagtgggctttgccttataggtgccacagggcacagctccatcattgccactggtttttcctaagtcatgcaccaaggacttcagaaagttcttcctccgagtcagtcagtggtgccgggaccccagggcagcctcctcgactcctgaagaaaaggcagtgcccgtggctgcctctgtcttcactcgctgttgatgtgaccgccaggcctcctctcgtaccttggacaaaggatacacctgaaccagaatagttttcttaccctcacattgaaatgaggattttgcttaaaacagcacttgccgccagtgggaggagggaggttttatttattcccacagtttctcctgggccttctggaatgaccatgttttcctgtggcggtgggtgtgtcattgcgcccgccgtcttccaaagccttacttccccaagctgccagccaggaggtgataaccaccctcccagagtttctctcggctctttttttaaaagtcccccaacaaataggattcttgctgggaaaggaagttcggtaaggaaatgtcaaatctggtttttaaacaaggtccaaccctgcaatgaagcagccacttcagcccagagagattataagaactgatgtggccagagtgcctacccactgtggccccggtgctctgcccccacgccccgaccatctggtcttggtagatgtccctagacgggctgagccatgtgcaataagaacatagatcctaaaggatcctctggaagctgtatttcttgaattagaattctcaaattgtacatctgttaatatatgtttattatgtgactggc

SEQ ID NO: 8648 - DNA, 3198 bp, Homo sapiens
  source 1..3198: mol_type = unassigned DNA
gttggcgcatactcaactctaagacctccggaacatggaatctgggcgtgcaccattattgacacctacaccagccgtccctttcttagaagacatacggtagcacttccaccctcgctcaaaactcgggaaaggaggggcggagggtggatgtcatcactccgcgcccggctgcccgcgacgcgccggcgggtggcgcagcccttcgctcgcccggcctccccctccctggttccgcgttctggttccgccatggaatccaacaaggatgaagctgagcgctgtatcagcatcgccctcaaggccatccagagcaaccagcccgaccgggcgctccgcttcctggagaaggcacagcggctgtatccgacgccgcgagttcgcgccctgattgagtccctcaaccagaaaccacagactgccggtgaccaacccccacccacagacacaacccatgccacccacaggaaagcaggtgggaccgatgccccctcggccaacggtgaagctggaggagagagcaccaaaggctacactgcagaacaggttgcagctgtgaaaagggtcaagcaatgtaaagattactatgagatcctgggggtgagcagaggggcctcggatgaggacctgaagaaggcctaccgcagactggccctcaaattccacccagacaagaaccacgcacctggtgccactgaagccttcaaagccattggcacagcatatgcggtactcagcaacccggagaagaggaagcagtatgaccagttcggcgatgacaagagccaggcggcccggcacggccatgggcatggggatttccaccgtggctttgaggccgacatctcccctgaagacctcttcaacatgttctttggcggcggcttcccttctagtaacgtccacgtctacagcaacggccgcatgcgctatacctaccagcaaaggcaggaccgcagggacaaccagggtgatggcgggctaggggtgtttgtgcagctgatgcctatcctcatcctgattctcgtgtcagctctcagccagctcatggtctccagtccaccctacagtctgagtccaagaccgtccgtgggccacatccacaggcgagtcactgaccacctgggtgtcgtctactatgtgggagacactttctccgaagagtacacaggctccagcctcaaaacagtcgagcggaatgtggaagatgattatatcgccaacctccggaacaactgctggaaggagaagcagcagaaggaaggcttgctgtaccgggcacgctactttggcgacacagatatgtaccacagagcacagaagatgggcacccccagctgcagccgactgtcagaggtgcaggcctccctgcatggatagtcctgggccagccacaccaccgaggtccaaactatgaaatccctggagaatttttggtgacatgcactgagccaaggtgatggactgtatatttgaggaaagacaaacaaagaaacaaaattaaaatggaattggaggccgaacgctgcacagctgccctctctctcacccagtaaatgcagaaagctcttaggacagacagaaaacctgccatggggctgcttccctccctcgcagggctggcggaggctccgcatcgcctctctcctaggatacagaaaccatggcaacgaaagtagaatgtaaaactcgcagcagatatcagtgggaagggctgggggagggggcacccagctgcctttcctccctcacaggagccaccaccagccacctctcaggagaagccagaggccctggccaaagataggaggaagaaagagaactctccatagaatgtaatttatagatgcgtgtatatgtatatatatctatttatatgtaaataggcatatatgaagatatatatatatatagtctactttttaaactctgcagggatttggttaagttgttgagctgatttcttccatgttttagaaaatgaggcctgtttggggaaggtaccctggtgatgtttttgctagacattagctgtagctgacagcataaggagagtcgcatcagagcttttcacagccccccgaaaccccagcctggttttgatggcagcagtaatcatgatagtgtgaacccgcgaaggcctcaggattatggttaacctggagaggagcaggccatggaggcaggtgccaggtcagtattgagtcacagtagaggccccacaaggacctgcttgggtgagaccacctctcccctctcagcagcgctggtgggctctttgtcctggtgcccaggagccctccagccccctgcccacagaagggaaggcctgcagagggggccaggatctacctaaccatttccccacccctaagtccctcagtgggctttgccttataggtgccacagggcacagctccatcattgccactggtttttcctaagtcatgcaccaaggacttcagaaagttcttcctccgagtcagtcagtggtgccgggaccccagggcagcctcctcgactcctgaagaaaaggcagtgcccgtggctgcctctgtcttcactcgctgttgatgtgaccgccaggcctcctctcgtaccttggacaaaggatacacctgaaccagaatagttttcttaccctcacattgaaatgaggattttgcttaaaacagcacttgccgccagtgggaggagggaggttttatttattcccacagtttctcctgggccttctggaatgaccatgttttcctgtggcggtgggtgtgtcattgcgcccgccgtcttccaaagccttacttccccaagctgccagccaggaggtgataaccaccctcccagagtttctctcggctctttttttaaaagtcccccaacaaataggattcttgctgggaaaggaagttcggtaaggaaatgtcaaatctggtttttaaacaaggtccaaccctgcaatgaagcagccacttcagcccagagagattataagaactgatgtggccagagtgcctacccactgtggccccggtgctctgcccccacgccccgaccatctggtcttggtagatgtccctagacgggctgagccatgtgcaataagaacatagatcctaaaggatcctctggaagctgtatttcttgaattagaattctcaaattgtacatctgttaatatatgtttattatgtgactggc

SEQ ID NO: 8649 - DNA, 3278 bp, Homo sapiens
  source 1..3278: mol_type = unassigned DNA
actccgaaggccccagtctcatcccgacggctaccacgtgaccttcctgagcttgggtttcctcctccggaagattagagggttggcgcatactcaactctaagacctccggaacatggaatctgggcgtgcaccattattgacacctacaccagccgtccctttcttagaagacatacggtagcacttccaccctcgctcaaaactcgggaaaggaggggcggagggtggatgtcatcactccgcgcccggctgcccgcgacgcgccggcgggtggcgcagcccttcgctcgcccggcctccccctccctggttccgcgttctggttccgccatggaatccaacaaggatgaagctgagcgctgtatcagcatcgccctcaaggccatccagagcaaccagcccgaccgggcgctccgcttcctggagaaggcacagcggctgtatccgacgccgcgagttcgcgccctgattgagtccctcaaccagaaaccacagactgccggtgaccaacccccacccacagacacaacccatgccacccacaggaaagcaggtgggaccgatgccccctcggccaacggtgaagctggaggagagagcaccaaaggctacactgcagaacaggttgcagctgtgaaaagggtcaagcaatgtaaagattactatgagatcctgggggtgagcagaggggcctcggatgaggacctgaagaaggcctaccgcagactggccctcaaattccacccagacaagaaccacgcacctggtgccactgaagccttcaaagccattggcacagcatatgcggtactcagcaacccggagaagaggaagcagtatgaccagttcggcgatgacaagagccaggcggcccggcacggccatgggcatggggatttccaccgtggctttgaggccgacatctcccctgaagacctcttcaacatgttctttggcggcggcttcccttctagtaacgtccacgtctacagcaacggccgcatgcgctatacctaccagcaaaggcaggaccgcagggacaaccagggtgatggcgggctaggggtgtttgtgcagctgatgcctatcctcatcctgattctcgtgtcagctctcagccagctcatggtctccagtccaccctacagtctgagtccaagaccgtccgtgggccacatccacaggcgagtcactgaccacctgggtgtcgtctactatgtgggagacactttctccgaagagtacacaggctccagcctcaaaacagtcgagcggaatgtggaagatgattatatcgccaacctccggaacaactgctggaaggagaagcagcagaaggaaggcttgctgtaccgggcacgctactttggcgacacagatatgtaccacagagcacagaagatgggcacccccagctgcagccgactgtcagaggtgcaggcctccctgcatggatagtcctgggccagccacaccaccgaggtccaaactatgaaatccctggagaatttttggtgacatgcactgagccaaggtgatggactgtatatttgaggaaagacaaacaaagaaacaaaattaaaatggaattggaggccgaacgctgcacagctgccctctctctcacccagtaaatgcagaaagctcttaggacagacagaaaacctgccatggggctgcttccctccctcgcagggctggcggaggctccgcatcgcctctctcctaggatacagaaaccatggcaacgaaagtagaatgtaaaactcgcagcagatatcagtgggaagggctgggggagggggcacccagctgcctttcctccctcacaggagccaccaccagccacctctcaggagaagccagaggccctggccaaagataggaggaagaaagagaactctccatagaatgtaatttatagatgcgtgtatatgtatatatatctatttatatgtaaataggcatatatgaagatatatatatatatagtctactttttaaactctgcagggatttggttaagttgttgagctgatttcttccatgttttagaaaatgaggcctgtttggggaaggtaccctggtgatgtttttgctagacattagctgtagctgacagcataaggagagtcgcatcagagcttttcacagccccccgaaaccccagcctggttttgatggcagcagtaatcatgatagtgtgaacccgcgaaggcctcaggattatggttaacctggagaggagcaggccatggaggcaggtgccaggtcagtattgagtcacagtagaggccccacaaggacctgcttgggtgagaccacctctcccctctcagcagcgctggtgggctctttgtcctggtgcccaggagccctccagccccctgcccacagaagggaaggcctgcagagggggccaggatctacctaaccatttccccacccctaagtccctcagtgggctttgccttataggtgccacagggcacagctccatcattgccactggtttttcctaagtcatgcaccaaggacttcagaaagttcttcctccgagtcagtcagtggtgccgggaccccagggcagcctcctcgactcctgaagaaaaggcagtgcccgtggctgcctctgtcttcactcgctgttgatgtgaccgccaggcctcctctcgtaccttggacaaaggatacacctgaaccagaatagttttcttaccctcacattgaaatgaggattttgcttaaaacagcacttgccgccagtgggaggagggaggttttatttattcccacagtttctcctgggccttctggaatgaccatgttttcctgtggcggtgggtgtgtcattgcgcccgccgtcttccaaagccttacttccccaagctgccagccaggaggtgataaccaccctcccagagtttctctcggctctttttttaaaagtcccccaacaaataggattcttgctgggaaaggaagttcggtaaggaaatgtcaaatctggtttttaaacaaggtccaaccctgcaatgaagcagccacttcagcccagagagattataagaactgatgtggccagagtgcctacccactgtggccccggtgctctgcccccacgccccgaccatctggtcttggtagatgtccctagacgggctgagccatgtgcaataagaacatagatcctaaaggatcctctggaagctgtatttcttgaattagaattctcaaattgtacatctgttaatatatgtttattatgtgactgg

SEQ ID NO: 8650 - DNA, 3176 bp, Homo sapiens
  source 1..3176: mol_type = unassigned DNA
gtgtgcccaaaatagccggctccgccctcttctcccggcagcccctgcaggcccccacccccccaggggacaggcggagccggccttctccccgtctctagtagtttccgcaccgctgacgcatgcctgcgcgcacagctgggccgggcgcgtcctacgcagcagccgcgagccgggctgcgggtgccagacggttcccggcggggggcaggggcggggcgccgcaggaggccgggactcctggcggaggagccccaaggaggcccgcctgacgactgaccagttgccatggcatcctactacgagatcctagacgtgccgcgaagtgcgtccgctgatgacatcaagaaggcgtatcggcgcaaggctctccagtggcacccagacaaaaacccagataataaagagtttgctgagaagaaatttaaggaggtggccgaggcatatgaagtgctgtctgacaagcacaagcgggagatttacgaccgctatggccgggaagggctgacagggacaggaactggcccatctcgggcagaagctggcagtggtgggcctggcttcaccttcaccttccgcagccccgaggaggtcttccgggaattctttgggagtggagacccttttgcagagctctttgatgacctgggccccttctcagagcttcagaaccggggttcccgacactcaggccccttctttaccttctcttcctccttccctgggcactccgatttctcctcctcatctttctccttcagtcctggggctggtgcttttcgctctgtttctacatctaccacctttgtccaaggacgccgcatcaccacacgcagaatcatggagaacgggcaggagcgggtggaagtggaggaggatgggcagctgaagtcagtcacaatcaatggtgtcccagatgacctggcactgggcttggagctgagccgtcgcgagcagcagccgtcagtcacttccaggtctgggggcactcaggtccagcagacccctgcctcatgccccttggacagcgacctctctgaggatgaggacctgcagctggccatggcctacagcctgtcagagatggaggcagctgggaagaaacccgcaggtgggcgggaggcacagcaccgacggcaggggcggcccaaggcccagcaccaagatccaggcttgggggggacccaggagggtgcgaggggtgaagcaaccaaacgcagtccatccccagaggagaaggcctctcgctgcctcatcctctgaacaccgggcccaacctgatctgatccagatcttgactggggggtctgactcactgtgggaagagaagaggggagtatcctgagttgtaggaactgctttccaactccaagctccctccacaagtttccctcccaggccccccacaccccagtgtggacttgggatttgctgtgctcagcccagggctgataggtccctggtgaagcccagggtggggggtgtcagggcagtggaggggcccgaggagccaggttgcatttattggatggggagctccaaggggcattagtggtttgggctgggccttttgtgccctggtactctgccacctgtgttgctgatggtgtcaaggaaggaggacttggcctagggttgtctgagccggagccggcagctccactggagagcagtgcaggcagagtggagcctcctgctctcctggaccagctgcagacccccaaccctggtttctgtgccatgttgcgctctgaccgtctctgttgcttctcttctggtgttgcttctcctccctcccattctctctgcaactccctgcgggccgcatcgcttgctttcactgccgtctggctaggactcccttcttccttccttccccgagaaggcctcaatgtggcgaggaagatgctggggccggtagggctgtgagatcttctggggaggctagccgggtggggcgggagcctctcagctgtccagattcagaactggagcccactcctcctccctctcgttgcctcagcctgccctcaccctcaggactaggcagaggtgaggctggctcaccctgaagaggtgggataggaccgggggaccccagagggaggcctaggaggggactgcacccatactgcttccctaccacaaatcagggctcagggagaggccatgcggccagcccaggtctgcatgctgagccccatcctccacagcttgccgctgacgctctctcctgtcaccccgcccctgctctctccccagatgtgttctgagctggatgccgggttccagaatcgctgcacagttccaacaggacagcgccttcccccatgcgctgggaggggaccctccatttctccccctcacccatgctgagtgtagagccggggcctgggtggcgggtgggggccgggtgggaggtggcagtagtcttagcctgtgcactctcttccttgggtgtttggtgctggctcctggggactacaaatcccagagtgcggtgtgcccggcctcatttctgatagatcccgcttgggggaggtggtgtatggttacggagctgtgcatcttgggacatgtagtagcccaggtcggcttgtcactcgctgtgagatggggagattttgtcttttgatttatccctgtagggctggcagggttgtagatgaagggggaatgatctgagccttggttcccctgacacgtcttgctagccccagggttagagtgggcagggcagagccgcgcagcacctgggagcggtacctttcccttgggcagcctggggtcccaggaacaagccagggcgagtggcatgtctgcctgagcagggtgtggccccagaaagctgaggagtgtgggctggcagagagcttcgagggcaaggccacccgcgggggcgtgtgtgtggtggggcttggcatgtgatggcagctccaggcatgccgctgcttgtatggctttctttggcctctgaccctgctgcccattctttccaacatcacagatgaactgcctctcctcctccctgcctggggagcccagtggccagggaggggagtggtggagccagtcgctgtaacactgagcctcagagacgaaccaaaaccagctgggctgagctcagatccagggggaaatgctggaagtcaataaaactgagttttgagagcttg

SEQ ID NO: 8651 - DNA, 1946 bp, Homo sapiens
  source 1..1946: mol_type = unassigned DNA
agccggccttctccccgtctctagtagtttccgcaccgctgacgcatgcctgcgcgcacagctgggccgggcgcgtcctacgcagcagccgcgagccgggctgcgggtgccagacggttcccggcggggggcaggggcggggcgccgcaggaggccgggactcctggcggaggagccccaaggaggcccgcctgacgactgaccagttgccatggcatcctactacgagatcctagacgtgccgcgaagtgcgtccgctgatgacatcaagaaggcgtatcggcgcaaggctctccagtggcacccagacaaaaacccagataataaagagtttgctgagaagaaatttaaggaggtggccgaggcatatgaagtgctgtctgacaagcacaagcgggagatttacgaccgctatggccgggaagggctgacagggacaggaactggcccatctcgggcagaagctggcagtggtgggcctggcttcaccttcaccttccgcagccccgaggaggtcttccgggaattctttgggagtggagacccttttgcagagctctttgatgacctgggccccttctcagagcttcagaaccggggttcccgacactcaggccccttctttaccttctcttcctccttccctgggcactccgatttctcctcctcatctttctccttcagtcctggggctggtgcttttcgctctgtttctacatctaccacctttgtccaaggacgccgcatcaccacacgcagaatcatggagaacgggcaggagcgggtggaagtggaggaggatgggcagctgaagtcagtcacaatcaatggtgtcccagatgacctggcactgggcttggagctgagccgtcgcgagcagcagccgtcagtcacttccaggtctgggggcactcaggtccagcagacccctgcctcatgccccttggacagcgacctctctgaggatgaggacctgcagctggccatggcctacagcctgtcagagatggaggcagctgggaagaaacccgcagatgtgttctgagctggatgccgggttccagaatcgctgcacagttccaacaggacagcgccttcccccatgcgctgggaggggaccctccatttctccccctcacccatgctgagtgtagagccggggcctgggtggcgggtgggggccgggtgggaggtggcagtagtcttagcctgtgcactctcttccttgggtgtttggtgctggctcctggggactacaaatcccagagtgcggtgtgcccggcctcatttctgatagatcccgcttgggggaggtggtgtatggttacggagctgtgcatcttgggacatgtagtagcccaggtcggcttgtcactcgctgtgagatggggagattttgtcttttgatttatccctgtagggctggcagggttgtagatgaagggggaatgatctgagccttggttcccctgacacgtcttgctagccccagggttagagtgggcagggcagagccgcgcagcacctgggagcggtacctttcccttgggcagcctggggtcccaggaacaagccagggcgagtggcatgtctgcctgagcagggtgtggccccagaaagctgaggagtgtgggctggcagagagcttcgagggcaaggccacccgcgggggcgtgtgtgtggtggggcttggcatgtgatggcagctccaggcatgccgctgcttgtatggctttctttggcctctgaccctgctgcccattctttccaacatcacagatgaactgcctctcctcctccctgcctggggagcccagtggccagggaggggagtggtggagccagtcgctgtaacactgagcctcagagacgaaccaaaaccagctgggctgagctcagatccagggggaaatgctggaagtcaataaaactgagttttgagagct

SEQ ID NO: 8652 - DNA, 828 bp, Homo sapiens
  source 1..828: mol_type = unassigned DNA
ggagccggccttctccccgtctctagtagtttccgcaccgctgacgcatgcctgcgcgcacagctgggccgggcgcgtcctacgcagcagccgcgagccgggctgcggccccaaggaggcccgcctgacgactgaccagttgccatggcatcctactacgagatcctagacgtgccgcgaagtgcgtccgctgatgacatcaagaaggcgtatcggcgcaaggctctccagtggcacccagacaaaaacccagataataaagagtttgctgagaagaaatttaaggaggtggccgaggcatatgaagtgctgtctgacaagcacaagcgggagatttacgaccgctatggccgggaagggctgacagggacaggaactggcccatctcgggcagaagctggcagtggtgggcctggcttcaccttcaccttccgcagccccgaggaggtcttccgggaattctttgggagtggagacccttttgcagagctctttgatgacctgggccccttctcagagcttcagaaccggggttcccgacactcaggccccttctttaccttctcttcctccttccctgggcactccgatttctcctcctcatctttctccttcagtcctggggctggtgcttttcgctctgtttctacatctaccacctttgtccaaggacgccgcatcaccacacgcagaatcatggagaacgggcaggagcgggtggaagtggaggaggatgggcagctgaagtcagtcacaatcaatggtgtcccagatgacctggcactgggcttggagctgagccgtcgcgagcagcagccgtcagtcact

SEQ ID NO: 8653 - DNA, 652 bp, Homo sapiens
  source 1..652: mol_type = unassigned DNA
aggtgcggccgggggcccgggtcaggctgggggccctggatcggactgctggagttggggggccccgatagggctcctgggcctgggcgtcgagatagctcttggccccggcctgcgggggcagataaggctgccggagggagcctagtcaccggccgcaagcagagcccgccccaaggaggcccgcctgacgactgaccagttgccatggcatcctactacgagatcctagacgtgccgcgaagtgcgtccgctgatgacatcaagaaggcgtatcggcgcaaggctctccagtggcacccagacaaaaacccagataataaagagtttgctgagaagaaatttaaggaggtggccgaggcatatgaagtgctgtctgacaagcacaagcgggagatttacgaccgctatggccgggaagggctgacagggacaggaactggcccatctcgggcagaagctggcagtggtgggcctggcttcaccttcaccttccgcagccccgaggaggtcttccgggaattctttgggagtggagacccttttgcagagctctttgatgacctgggccccttctcagagcttcagaaccggggttcccgacactcaggccccttctttaccttctcttcctccttccctgggcactccg

SEQ ID NO: 8654 - DNA, 686 bp, Homo sapiens
  source 1..686: mol_type = unassigned DNA
gaggtgcggccgggggcccgggtcaggctgggggccctggatcggactgctggagttggggggccccgatagggctcctgggcctgggcgtcgagatagctcttggccccggcctgcgggggcagataaggctgccggagggagcctagtcaccggccgcaagcagagcccggtgtgctccgcttccaactgggagcgccttccgccacccggggagggggactgctgcagccacagggtggggctcttggttctttccgcctgactccttctcttctgcagccccaaggaggcccgcctgacgactgaccagttgccatggcatcctactacgagatcctagacgtgccgcgaagtgcgtccgctgatgacatcaagaaggcgtatcggcgcaaggctctccagtggcacccagacaaaaacccagataataaagagtttgctgagaagaaatttaaggaggtggccgaggcatatgaagtgctgtctgacaagcacaagcgggagatttacgaccgctatggccgggaagggctgacagggacaggaactggcccatctcgggcagaagctggcagtggtgggcctggcttcaccttcaccttccgcagccccgaggaggtcttccgggaattctttgggagtggagacccttttgcagagctctttgatgacctgggcccctt

SEQ ID NO: 8655 - DNA, 2527 bp, Homo sapiens
  source 1..2527: mol_type = unassigned DNA
agttgacgccgccgtgccgccgccgcgtgacgcatttcctgtttgttgttggagaaaggagagaaaggaaagcgcgaggagccgccgccaccaccagcgcagcagtcctggagctgtgaggagattcgggccgtcaccctgcctcccctgcgtcccgccaccggccgcttctgtcctcggacccattccaacaatctcgtaaaacatggtggattactatgaagttctaggcgtgcagagacatgcctcacccgaggatattaaaaaggcatatcggaaactggcactgaagtggcatccagataaaaatcctgagaataaagaagaagcagagagaaaattcaagcaagtagcggaggcatatgaagtgctgtcggatgctaagaaacgggacatctatgacaaatatggcaaagaaggattaaatggtggaggaggaggtggaagtcattttgacagtccatttgaatttggcttcacattccgtaacccagatgatgtcttcagggaattttttggtggaagggacccattttcatttgacttctttgaagacccttttgaggacttctttgggaatcgaaggggtccccgaggaagcagaagccgagggacggggtcgtttttctctgcgttcagtggatttccgtcttttggaagtggattttcttcttttgatacaggatttacttcatttgggtcactaggtcacgggggcctcacttcattctcttccacgtcatttggtggtagtggcatgggcaacttcaaatcgatatcaacttcaactaaaatggttaatggcagaaaaatcactacaaagagaattgtcgagaacggtcaagaaagagtagaagttgaagaagatggccagttaaagtccttaacaataaatggtgtggccgacgacgatgccctcgctgaggagcgcatgcggagaggccagaacgccctgccagcccagcctgccggcctccgcccgccgaagccgccccggcctgcctcgctgctgagacacgcgcctcactgtctctctgaggaggagggcgagcaggaccgacctcgggcacccgggccctgggaccccctcgcgtccgcagcaggattgaaagaaggtggcaagaggaagaagcagaagcagagagaggagtcgaagaagaagaagtcgaccaaaggcaatcactagaccggacttgaggcacgcggtgcacccccagacgctggcgctccaccgtgctcggcatgcggtcgtgcacacgcgctaggtagcagcgtcggtcaggactgtctcgaggccacactcgctcggcaggattatgcgatcacggatcagtcagagcagggtcaggagacggggctgacggcacgggtggcggggacagacgtttgggacttggccgcgactctctgcttctctccagctctcaatctgctgcattttcctctagtgcttccggatcctcttcattcttttcggctactcaaccactccgcatgctgctggaatatttctggctttagaagtacaggagggcgcagatggctaactgagtaacattcatgaaatgaggctttctgtggcggcgtagtgtttggaattagaaggtaattcagtagagtgtaacttagagaatattgcaagtgacacattgaatcctgcccgtcagggcaccttttcctcagagcaatccggccacacgaatagaaggctgtcgtgaatcacatcagatgtaaaatcattccttctgtttactcttttaattttcatcctttgcaggtagtgcaaattcaacttcaaatatggtgtaggttttgctagattccatatttttttcttggatttttgctaattatttttagcaaaaaatttttgctcagtggcactctccctagtgtccatgggttagggccatgctggggaaaacgggccggtatttacacacgcgcaaaacacccagagacggcacaaggaggttgaactcatgtttcagttcgcgaacattgactccttacgaaagtcacttcattctaactagatgcgcccacttccggtcattatttcgtttgcatgatgtattgcttcttcacgttttgtttttattgagcacggagtagaattccagggctgccttgacttcttccctgcatgctccctcccagtgactttccttccctttcacatgaggatctgccgttcatgttgctttctcctttgtcctcttggacttgagggcattgtgaaaagctttgctgtgatttaaaaatgccagcaattttaatctagcagtgttgaagctgggaattttttggcgcaatccatgtagcagtgacccaggcttgggagccagaaacaagtgtgacctgggattttatttaacacaactgttgccaaagagttggctttgtttatttggttttggcggggagaggagtggtatttgatgctttctgtggacaatgtaaccctaaacacatcatgtattttaaatgccacctacataaataaaacataagcatattgaataca

SEQ ID NO: 8656 - DNA, 506 bp, Homo sapiens
  source 1..506: mol_type = unassigned DNA
tttttctaaggctcccgcactcgcgtctgaaaccagaaacgggagtggcttgcggagcaggaatgccgcagccgtgccgccaagttcggagggagaagaagcaggacccattccaacaatctcgtaaaacatggtggattactatgaagttctaggcgtgcagagacatgcctcacccgaggatattaaaaaggcatatcggaaactggcactgaagtggcatccagataaaaatcctgagaataaagaagaagcagagagaaaattcaagcaagtagcggaggcatatgaagtgctgtcggatgctaagaaacgggacatctatgacaaatatggcaaagaaggattaaatggtggaggaggaggtggaagtcattttgacagtccatttgaatttggcttcacattccgtaacccagatgatgtcttcagggaattttttggtggaagggacccattttcatttgacttctttgaagacccttttgaggacttctttgggaatc

SEQ ID NO: 8657 - DNA, 852 bp, Homo sapiens
  source 1..852: mol_type = unassigned DNA
gttgttggagaaaggagagaaaggaaagcgcgaggagccgccgccaccaccagcgcagcagtcctggagctgtgaggagattcgggccgtcaccctgcctcccctgcgtcccgccaccggccgcttctgtcctcggtgagggacccattccaacaatctcgtaaaacatggtggattactatgaagttctaggcgtgcagagacatgcctcacccgaggatattaaaaaggcatatcggaaactggcactgaagtggcatccagataaaaatcctgagaataaagaagaagcagagagaaaattcaagcaagtagcggaggcatatgaagtgctgtcggatgctaagaaacgggacatctatgacaaatatggcaaagaaggattaaatggtggaggaggaggtggaagtcattttgacagtccatttgaatttggcttcacattccgtaacccagatgatgtcttcagggaattttttggtggaagggacccattttcatttgacttctttgaagacccttttgaggacttctttgggaatcgaaggggtccccgaggaagcagaagccgagggacggggtcgtttttctctgcgttcagtggatttccgtcttttggaagtggattttcttcttttgatacaggatttacttcatttgggtcactaggtcacgggggcctcacttcattctcttccacgtcatttggtggtagtggcatgggcaacttcaaatcgatatcaacttcaactaaaatggttaatggcagaaaaatcactacaaagagaattgtcgagaacggtcaagaaagagtagaagttgaagaagatggccagttaaagtccttaacaa

SEQ ID NO: 8658 - DNA, 972 bp, Homo sapiens
  source 1..972: mol_type = unassigned DNA
ccaccaccagcgcagcagtcctggagctgacccattccaacaatctcgtaaaacatggtggattactatgaagttctaggcgtgcagagacatgcctcacccgaggatattaaaaaggcatatcggaaactggcactgaagtggcatccagataaaaatcctgagaataaagaagaagcagagagaaaattcaagcaagtagcggaggcatatgaagtgctgtcggatgctaagaaacgggacatctatgacaaatatggcaaagaaggattaaatggtggaggaggaggtggaagtcattttgacagtccatttgaatttggcttcacattccgtaacccagatgatgtcttcagggaattttttggtggaagggacccattttcatttgacttctttgaagacccttttgaggacttctttgggaatcgaaggggtccccgaggaagcagaagccgagggacggggtcgtttttctctgcgttcagtggatttccgtcttttggaagtggattttcttcttttgatacaggatttacttcatttgggtcactaggtcacgggggcctcacttcattctcttccacgtcatttggtggtagtggcatgggcaacttcaaatcgatatcaacttcaactaaatggttaatggcagaaaaatcactacaaagagaattgtcgagaacggtcaagaaagagtagaagttgaagaagatggccagttaaagtccttaacaataaatggtaaggagcagctgctgcgcttggataacaagtaattcaacgcacgcacttaacagaaatgttaaactataacaagcaccatttgaggattaacaggaacatttttttgaagatttcaaacgaactcgactttcagtataattgtacctaaagtatttataaacagctcatcggagcctctatttgtcatagacttttgagttgattgttgggaccacataataggac

SEQ ID NO: 8659 - DNA, 1609 bp, Homo sapiens
  source 1..1609: mol_type = unassigned DNA
agttgacgccgccgtgccgccgccgcgtgacgcatttcctgtttgttgttggagaaaggagagaaaggaaagcgcgaggagccgccgccaccaccagcgcagcagtcctggagctgtgaggagattcgggccgtcaccctgcctcccctgcgtcccgccaccggccgcttctgtcctcggacccattccaacaatctcgtaaaacatggtggattactatgaagttctaggcgtgcagagacatgcctcacccgaggatattaaaaaggcatatcggaaactggcactgaagtggcatccagataaaaatcctgagaataaagaagaagcagagagaaaattcaagcaagtagcggaggcatatgaagtgctgtcggatgctaagaaacgggacatctatgacaaatatggcaaagaaggattaaatggtggaggaggaggtggaagtcattttgacagtccatttgaatttggcttcacattccgtaacccagatgatgtcttcagggaattttttggtggaagggacccattttcatttgacttctttgaagacccttttgaggacttctttgggaatcgaaggggtccccgaggaagcagaagccgagggacggggtcgtttttctctgcgttcagtggatttccgtcttttggaagtggattttcttcttttgatacaggatttacttcatttgggtcactaggtcacgggggcctcacttcattctcttccacgtcatttggtggtagtggcatgggcaacttcaaatcgatatcaacttcaactaaaatggttaatggcagaaaaatcactacaaagagaattgtcgagaacggtcaagaaagagtagaagttgaagaagatggccagttaaagtccttaacaataaatggtaaggagcagctgctgcgcttggataacaagtaattcaacgcacgcacttaacagaaatgttaaactataacaagcaccatttgaggattaacaggaacatttttttgaagatttcaaacgaactcgactttcagtataattgtacctaaagtatttataaacagctcatcggagcctctatttgtcatagacttttgagttgattgttgggaccacataataggaccattttttttttgtctttaaaattgttgtaaatctctgtatgcactttgcttttttattaaacgtactccaaggtgagtcttgactctttagtgtaggacaagattgtacactaacaccagcatggacctgcttttcattgtgtctgaaatgtgagccacgtagtgtcggcctgctgtgaagttaacattgccaggacgattcttctacagaaataatttcaatttttttcagtatttagtagtgaaagatattaatacattaatggtaatacatttctggtttaatataaattaaggatgttttctagttgtgcatgaatgctggcaacttagtaagttttgacaattgtttaaatatgtaatgttaagcttaggtttaaaaaagtaaagctggtaaactgggtctttgtcatttgctttaaaaaaaaaaaaaaagaaaataaatgcgaatgtgttggtgcattcttcctgagtgggatctgga

SEQ ID NO: 8660 - DNA, 566 bp, Homo sapiens
  source 1..566: mol_type = unassigned DNA
accaccagcgcagcagtcctggagctgtgaggagattcgggccgtcaccctgcctcccctgcgtcccgccaccggccgcttctgtcctcgaaacgggagtggcttgcggagcaggaatgccgcagccgtgccgccaagttcggagggagaagaagcaggtgggggaccgcaaagccctgtttctagaactccggacggattgttcagaagtttgtggaagagcaggctgcctttctcactcagaatgtttgtctgctttgctttgcgttaaagaatctgcaccgtagttgatgcaactgaagtttatataagaagtttacattaactcttacctaaggaaggacccattccaacaatctcgtaaaacatggtggattactatgaagttctaggcgtgcagagacatgcctcacccgaggatattaaaaaggcatatcggaaactggcactgaagtggcatccagataaaaatcctgagaataaagaagaagcagagagaaaattcaagcaagtagcggaggcatatgaagtgctgtcggatgctaagaaacgggacatctatgaca

SEQ ID NO: 8661 - DNA, 398 bp, Homo sapiens
  source 1..398: mol_type = unassigned DNA
ttcactatgttgttcaggctggtctcgaactcctgacctcaggtgatccacccgcctcggcttcgcaaagtgctggattacaggtgtgagcccgcgcgtccggctgtcactttaaagagtattataagagggcacttcataacttgggcaggtatttttagtcatcctgaacgtgtcgctgtggactgggtgtcaccgcgggaccgcacagacaccttactgtcgtctgctgtaaaggacccattccaacaatctcgtaaaacatggtggattactatgaagttctaggcgtgcagagacatgcctcacccgaggatattaaaaaggcatatcggaaactggcactgaagtggcatccagataaaaatcctgagaataaagaagaagcagagagaaaa

SEQ ID NO: 8662 - DNA, 1022 bp, Homo sapiens
  source 1..1022: mol_type = unassigned DNA
atactaatgtggtaatcagtgaactatttgcttccgtttccttcagtcactattccctggcgaagtctccacgcgctcccgttcgccggggaacttagggtatccgggcttccctaaattgacaagcgggggccggcgccttcgcccgccttcgctggccgccgcttggtttgttcttcttctccttcggggacttctccgcccgcgcccgcgcccgcgccccagctttcgtcccgctgtgcggagatgccacccagctccaccgcaggaccgcggagcgagaggcggcagacgcgctccgggggccgccggtcaagaggaagatgaagggcgcgacgacttcgcggtttccagaatgggctccttctggcccaacaataagtgccatttggaatcttctcggccttctctgtgccttccgcgcgtctgggctccccggagagaaaggaaagcgcgaggagccgccgccaccaccagcgcagcagtcctggagctgtgaggagattcgggccgtcaccctgcctcccctgcgtcccgccaccggccgcttctgtcctcggacccattccaacaatctcgtaaaacatggtggattactatgaagttctaggcgtgcagagacatgcctcacccgaggatattaaaaaggcatatcggaaactggcactgaagtggcatccagataaaaatcctgagaataaagaagaagcagagagaaaattcaagcaagtagcggaggcatatgaagtgctgtcggatgctaagaaacgggacatctatgacaaatatggcaaagaaggattaaatggtggaggaggaggtggaagtcattttgacagtccatttgaatttggcttcacattccgtaacccagatgatgtcttcagggaattttttggtggaagggacccattttcatttgacttctttgaagacccttttgaggacttctttgggaatcgaaggggtccccgaggaagcagaagccgagggacggggtcgtttttctctgcgttcagtgg

SEQ ID NO: 8663 - DNA, 1159 bp, Homo sapiens
  source 1..1159: mol_type = unassigned DNA
agagaaaggaaagcgcgaggagccgccgccaccaccagcgcagcagtcctggagctgtgaggagattcgggccgtcaccctgcctcccctgcgtcccgccaccggccgcttctgtcctcggacccattccaacaatctcgtaaaacatggtggattactatgaagttctaggcgtgcagagacatgcctcacccgaggatattaaaaaggcatatcggaaactggcactgaagtggcatccagataaaaatcctgagaataaagaagaagcagagagaaaattcaagcaagtagcggaggcatatgaagtgctgtcggatgctaagaaacgggacatctatgacaaatatggcaaagaaggattaaatggtggaggaggaggtggaagtcattttgacagtccatttgaatttggcttcacattccgtaacccagatgatgtcttcagggaattttttggtggaagggacccattttcatttgacttctttggtgtggccgacgacgatgccctcgctgaggagcgcatgcggagaggccagaacgccctgccagcccagcctgccggcctccgcccgccgaagccgccccggcctgcctcgctgctgagacacgcgcctcactgtctctctgaggaggagggcgagcaggaccgacctcgggcacccgggccctgggaccccctcgcgtccgcagcaggattgaaagaaggtggcaagaggaagaagcagaagcagagagaggagtcgaagaagaagaagtcgaccaaaggcaatcactagaccggacttgaggcacgcggtgcacccccagacgctggcgctccaccgtgctcggcatgcggtcgtgcacacgcgctaggtagcagcgtcggtcaggactgtctcgaggccacactcgctcggcaggattatgcgatcacggatcagtcagagcagggtcaggagacggggctgacggcacgggtggcggggacagacgtttgggacttggccgcgactctctgcttctctccagctctcaatctgctgcattttcctctagtgcttccggatcctcttcattcttttcggctactcaaccactccgcatgctgctggaatatttctggctttagaagtacaggagggcgcagatggctaactgagtaacattcatg

SEQ ID NO: 8664 - DNA, 2180 bp, Homo sapiens
  source 1..2180: mol_type = unassigned DNA
ggagaaaggagagaaaggaaagcgcgaggagccgccgccaccaccagcgcagcagtcctggagctgtgaggagattcgggccgtcaccctgcctcccctgcgtcccgccaccggccgcttctgtcctcggacccattccaacaatctcgtaaaacatggtggattactatgaagttctaggcgtgcagagacatgcctcacccgaggatattaaaaaggcctaagaaacgggacatctatgacaaatatggcaaagaaggattaaatggtggaggaggaggtggaagtcattttgacagtccatttgaatttggcttcacattccgtaacccagatgatgtcttcagggaattttttggtggaagggacccattttcatttgacttctttgaagacccttttgaggacttctttgggaatcgaaggggtccccgaggaagcagaagccgagggacggggtcgtttttctctgcgttcagtggatttccgtcttttggaagtggattttcttcttttgatacaggatttacttcatttgggtcactaggtcacgggggcctcacttcattctcttccacgtcatttggtggtagtggcatgggcaacttcaaatcgatatcaacttcaactaaaatggttaatggcagaaaaatcactacaaagagaattgtcgagaacggtcaagaaagagtagaagttgaagaagatggccagttaaagtccttaacaataaatggtgtggccgacgacgatgccctcgctgaggagcgcatgcggagaggccagaacgccctgccagcccagcctgccggcctccgcccgccgaagccgccccggcctgcctcgctgctgagacacgcgcctcactgtctctctgaggaggagggcgagcaggaccgacctcgggcacccgggccctgggaccccctcgcgtccgcagcaggattgaaagaaggtggcaagaggaagaagcagaagcagagagaggagtcgaagaagaagaagtcgaccaaaggcaatcactagaccggacttgaggcacgcggtgcacccccagacgctggcgctccaccgtgctcggcatgcggtcgtgcacacgcgctaggtagcagcgtcggtcaggactgtctcgaggccacactcgctcggcaggattatgcgatcacggatcagtcagagcagggtcaggagacggggctgacggcacgggtggcggggacagacgtttgggacttggccgcgactctctgcttctctccagctctcaatctgctgcattttcctctagtgcttccggatcctcttcattcttttcggctactcaaccactccgcatgctgctggaatatttctggctttagaagtacaggagggcgcagatggctaactgagtaacattcatgaaatgaggctttctgtggcggcgtagtgtttggaattagaaggtaattcagtagagtgtaacttagagaatattgcaagtgacacattgaatcctgcccgtcagggcaccttttcctcagagcaatccggccacacgaatagaaggctgtcgtgaatcacatcagatgtaaaatcattccttctgtttactcttttaattttcatcctttgcaggtagtgcaaattcaacttcaaatatggtgtaggttttgctagattccatatttttttcttggatttttgctaattatttttagcaaaaaatttttgctcagtggcactctccctagtgtccatgggttagggccatgctggggaaaacgggccggtatttacacacgcgcaaaacacccagagacggcacaaggaggttgaactcatgtttcagttcgcgaacattgactccttacgaaagtcacttcattctaactagatgcgcccacttccggtcattatttcgtttgcatgatgtattgcttcttcacgttttgtttttattgagcacggagtagaattccagggctgccttgacttcttccctgcatgctccctcccagtgactttccttccctttcacatgaggatctgccgttcatgttgctttctcctttgtcctcttggacttgagggcattgtgaaaagctttgctgtgatttaaaaatgccagcaattttaatctagcagtgttgaagctgggaattttttggcgcaatccatgtagcagtgacccaggcttg

SEQ ID NO: 8665 - DNA, 590 bp, Homo sapiens
  source 1..590: mol_type = unassigned DNA
actcgcgtctgaaaccagaaacgggagtggcttgcggagcaggaatgccgcagccgtgccgccaagttcggagggagaagaagcaggtgggggaccgcaaagccctgtttctagaactccggacggattgttcagaagtttgtggaagagcaggctgcctttctcactcagaatgtttgtctgctttgctttgcgttaaagaatctgcaccgtagttgatgcaactgaagtttatataagaagtttacattaactcttacctaaggaaggacccattccaacaatctcgtaaaacatggtggattactatgaagttctaggcgtgcagagacatgcctcacccgaggatattaaaaaggcatatcggaaactggcactgaagtggcatccagataaaaatcctgagaataaagaagaagcagagagaaaattcaagcaagtagcggaggcatatgaagtgctgtcggatgctaagaaacgggacatctatgacaaatatggcaaagaaggattaaatggtggaggaggaggtggaagtcattttgacagtccatttgaatttggcttcacattccgtaacccagatgatg

SEQ ID NO: 8666 - DNA, 2715 bp, Homo sapiens
  source 1..2715: mol_type = unassigned DNA
atgactcgggtgaggcccctggagaccggggccggcgacggatgcagggcggccctcctcactgaggatgcgccacaggtccaggcctctcgagcccctgcgcctgcgctagcattctgccgggaaagccgcctcgtctgtcgactcacttccgcctcctccggtttaagcaccgccttttcgggggttgaagccggaagtggcgcacagccctagcagcaacaacagttttccacgtgcgcgtagggcgccgggatcacgtggggaggcagaagccaatggggaagcgtttcgtgtaggtcttctgaggtggtggcgccagcggctacctcctgcctgtgaggagctggctgagaggggactgggcgccggcggggaaggaggagcgctaggtcggtgtacgaccgagattagggtgcgtgccagctccgggaggccgcggtgaggggccgggcccaagctgccgacccgagccgatcgtcagggtcgccagcgcctcagctctgtggaggagcagcagtagtcggagggtgcaggatattagaaatggctactccccagtcaattttcatctttgcaatctgcattttaatgataacagaattaattctggcctcaaaaagctactatgatatcttaggtgtgccaaaatcggcatcagagcgccaaatcaagaaggcctttcacaagttggccatgaagtaccaccctgacaaaaataagagcccggatgctgaagcaaaattcagagagattgcagaagcatatgaaacactctcagatgctaatagacgaaaagagtatgatacacttggacacagtgcttttactagtggtaaaggacaaagaggtagtggaagttcttttgagcagtcatttaacttcaattttgatgacttatttaaagactttggcttttttggtcaaaaccaaaacactggatccaagaagcgttttgaaaatcatttccagacacgccaggatggtggttccagtagacaaaggcatcatttccaagaattttcttttggaggtggattatttgatgacatgtttgaagatatggagaaaatgttttcttttagtggttttgactctaccaatcagcatacagtacagactgaaaatagatttcatggatctagcaagcactgcaggactgtcactcaacgaagaggaaatatggttactacatacactgactgttcaggacagtagttcttattctattctcactaaatccaactggttgactcttcctcattatctttgatgctaaacaattttctgtgaactattttgacaagtgcatgatttcactttaaacaatttgatatagctattaaatatatttaagggttttttttttttgacaaattcaacattcaacgagtagacaaaatgctaattatttccctgattaggaaagtttctttaaaaaacacgtaattttgcctagtgctttttctctacctgcccttgggctcactaatatcaccagtattattaccaagaaaatattgagtttacctgattaaactttaaaagttaattgtagatttaaattgtgtgaacctaatgatttttgcagtgaaacctttactaattcaaagttgcatgttctatgacatctgtgacttgcgttgcagagtgtacatgaaactgtataattgagtcattcagtaaaggagaacagtatcttggttaattgctactgaaaggttgagaaaggaatggtttgatatttaccacagcgctgtgcctttctacagtagaactggggtaaaggaaatggttttattgcccatagtcatttaggctggaaaaaagttgaaaacttaacgaaatattgccaagagattgttatgtgtttggttccagcctaaaaatgattttgtagtgttgaaatcatagctacttacatagctttttcatatttctttcttagttgttggcactcttaggtcttagtatggatttatgtgtttgtgtgtgtgtagtttatcctctctctcatctttatctagagattgactgatacctcattctgtttgtaaaaccagccagtaatttctgtgcaaccttactatgtgcaatatttttaaatcctgagaaatgtgtgcttttgttttcggatagacttatttctttagttctgcacttttccacattatactccatatgagtattaatcctatggatacatattaaaacaagtgtctcatacaacattgtatgtgagagaaatataaatatttacaacctgatattcgttgttgttttattgttaaaagtttattatgcaactctggaggtatagagggcatataagctatgggacatatgctgatcacaggctatattcatgaagttacttttgaccaacctgaaaactgataggattttgtttgtcatttggtaatttctactgcattcttaccatccttctctcacaaattttgatagcttgaagatctttttaattataattttgttgtatttgtttcctaggagcaagtgttcctgctgccagttctttcctctttaggcgtggttgagaaaaagcagaaactttacataaagctgtatttcttaatcatctttaatttgaaacttaagaaaatgaatttattctgttatatttatgtaacttatttcctggaagttatatctactagttttgtttgataataataaaattagctataccttgaa

SEQ ID NO: 8667 - DNA, 5272 bp, Homo sapiens
  source 1..5272: mol_type = unassigned DNA
agaccggcgcgtgaggaacctaccggtaccggccgcgcgctggtagtcgccggtgtggctgcacctcaccaatcccgtgcgccgcggctgggccgtcggagagtgcgtgtgcttctctcctgcacgcggtgcttgggctcggccaggcggggtccgccgccagggtttgaggatgggggagtagctacaggaagcgaccccgcgatggcaaggtatatttttgtggaatgaaaaggaagtattagaaatgagctgaagaccattcacagattaatatttttggggacagatttgtgatgcttgattcacccttgaagtaatgtagacagaagttctcaaatttgcatattacatcaactggaaccagcagtgaatcttaatgttcacttaaatcagaacttgcataagaaagagaatgggagtctggttaaataaagatgactatatcagagacttgaaaaggatcattctctgttttctgatagtgtatatggccattttagtgggcacagatcaggatttttacagtttacttggagtgtccaaaactgcaagcagtagagaaataagacaagctttcaagaaattggcattgaagttacatcctgataaaaacccgaataacccaaatgcacatggcgattttttaaaaataaatagagcatatgaagtactcaaagatgaagatctacggaaaaagtatgacaaatatggagaaaagggacttgaggataatcaaggtggccagtatgaaagctggaactattatcgttatgattttggtatttatgatgatgatcctgaaatcataacattggaaagaagagaatttgatgctgctgttaattctggagaactgtggtttgtaaatttttactccccaggctgttcacactgccatgatttagctcccacatggagagactttgctaaagaagtggatgggttacttcgaattggagctgttaactgtggtgatgatagaatgctttgccgaatgaaaggagtcaacagctatcccagcctcttcatttttcggtctggaatggccccagtgaaatatcatggagacagatcaaaggagagtttagtgagttttgcaatgcagcatgttagaagtacagtgacagaactttggacaggaaattttgtcaactccatacaaactgcttttgctgctggtattggctggctgatcactttttgttcaaaaggaggagattgtttgacttcacagacacgactcaggcttagtggcatgttggatggtcttgttaatgtaggatggatggactgtgccacccaggataacctttgtaaaagcttagatattacaacaagtactactgcttattttcctcctggagccactttaaataacaaagagaaaaacagtattttgtttctcaactcattggatgctaaagaaatatatttggaagtaatacataatcttccagattttgaactactttcggcaaacacactagaggatcgtttggctcatcatcggtggctgttattttttcattttggaaaaaatgaaaattcaaatgatcctgagctgaaaaaactaaaaactctacttaaaaatgatcatattcaagttggcaggtttgactgttcctctgcaccagacatctgtagtaatctgtatgtttttcagccgtctctagcagtatttaaaggacaaggaaccaaagaatatgaaattcatcatggaaagaagattctatatgatatacttgcctttgccaaagaaagtgtgaattctcatgttaccacgcttggacctcaaaattttcctgccaatgacaaagaaccatggcttgttgatttctttgccccctggtgtccaccatgtcgagctttactaccagagttacgaagagcatcaaatcttctttatggtcagcttaagtttggtacactagattgtacagttcatgagggactctgtaacatgtataacattcaggcttatccaacaacagtggtattcaaccagtccaacattcatgagtatgaaggacatcactctgctgaacaaatcttggagttcatagaggatcttatgaatccttcagtggtctcccttacacccaccaccttcaacgaactagttacacaaagaaaacacaacgaagtctggatggttgatttctattctccgtggtgtcatccttgccaagtcttaatgccagaatggaaaagaatggcccggacattaactggactgatcaacgtgggcagtatagattgccaacagtatcattctttttgtgcccaggaaaacgttcaaagataccctgagataagattttttcccccaaaatcaaataaagcttatcattatcacagttacaatggttggaatagggatgcttattccctgagaatctggggtctaggatttttacctcaagtatccacagatctaacacctcagactttcagtgaaaaagttctacaagggaaaaatcattgggtgattgatttctatgctccttggtgtggaccttgccagaattttgctccagaatttgagctcttggctaggatgattaaaggaaaagtgaaagctggaaaagtagactgtcaggcttatgctcagacatgccagaaagctgggatcagggcctatccaactgttaaattttatttctacgaaagagcaaagagaaattttcaagaagagcagataaataccagagatgcaaaagcaatcgctgccttaataagtgaaaaattggaaactctccgaaatcaaggcaagaggaataaggatgaactttgataatgttgaagatgaagaaaaagtttaaaagaaattctgacagatgacatcagaagacacctatttagaatgttacatttatgatgggaatgaatgaacattatcttagacttgcagttgtactgccagaattatctacagcactggtgtaaaagaagggtctgcaaactttttctgtaaagggccggtttataaatattttagactttgcaggctataatatatggttcacacatgagaacaagaatagagtcatcatgtattctttgttatttgcttttaacaacctttaaaaaatattaaaacgattcttagctcagagccatacaaaagtaggctggattcagtccatggaccatagattgctgtccccctcgacggacttataatgtttcaggtggctggcttgaacatgagtctgctgtgctatctacataaatgtctaagttgtataaagtccactttcccttcacgttttttggctgacctgaaaagaggtaacttagtttttggtcacttgttctcctaaaaatgctatccctaaccatatatttatatttcgttttaaaaacacccatgatgtggcacagtaaacaaaccctgttatgctgtattattatgaggagattcttcattgttttctttccttctcaaaggttgaaaaaatgcttttaatttttcacagccgagaaacagtgcagcagtatatgtgcacacagtaagtacacaaatttgagcaacagtaagtgcacaaattctgtagtttgccgtatcatccaggaaaacctgagggaaaaaaattatagcaattaactgggcattgtagagtatcctaaatatgttatcaagtatttagagttctatattttaaagatatatgtgttcatgtattttctgaaattgctttcatagaaattttcccactgatagttgatttttgaggcatctaatatttacatatttgccttctgaactttgttttgacctgtatcctttatttacattgggtttttctttcgtagttttggtttttcactcctgtccagtctatttattattcaaataggaaaaattactttacaggttgttttactgtagcttataatgatactgtagttattccagttactagtttactgtcagagggctgcctttttcagataaatattgacataataactgaagttatttttataagaaaatcaagtatataaatctaggaaagggatcttctagtttctgtgttgtttagactcaaagaatcacaaatttgtcagtaacatgtagttgtttagttataattcagagtgtacagaatggtaaaaattccaatcagtcaaaagaggtcaatgaattaaaaggcttgcaactttttcaaaaacctgttagaatatgctttattgtgttttgaggagttttcctttttttcttttcaatatcactttatcctgctcaccagtatttcctcataagggttattatagccataattaatgttaaaatagactttgttcttcatattctcccatctttttcgctactatatactctgtctggattctgctgtatgcctgttggcatatatggaacagtcaccacttgtcacacttaacaccagctttttgaattatgatcagtaatggcaagagcctttcattctcgaatgtttaaagcctaggagttctacaaaattggcttctttctacaagaatcccaaaatggaatgcctaaagaagtcttacttgggtaaatacttactaaaatatactggttatgtgcatatcaccacactggacactgaggagtgttcaaaaggaatctaagacatggtccccatcttccaactgtctgtaattcactgttttgtcattgagctcataaggtacttacattactacctataaatgtttcctgtacttgttagttgttgagaaacattttaggcagtaaataaaatagtaaatattatgtgtcctataatttgacctaagctgtgtgcctttggaatcagctctaagccagggccccctgggagtcatgttaagaaacacgtatcataaagtgacatacatcaaggttatcttatatagtcataacagtattattgggtctttcaaaaacagctggcagattgagcttttaatggctatattgatacagtagatagagcacctctaaggagtaccaggtataatgtgccatttctctcagcaacaccatttttgtgtgcagctgaccctctaacatggtatcaattctagctgaccaaagcacattctatcaggcagccaggcttggaaattaggtccatttaaagtatgtggcttacagtcaggtatggtggtgtgcgcctattgtcccatctacttgagaggctgaggcaggagggattgcttgggctcaggattttgaatccagcctgggcaacatagcaagaccccatctctaataaataaattatgttttgggcattaa

SEQ ID NO: 8668 - DNA, 2644 bp, Homo sapiens
  source 1..2644: mol_type = unassigned DNA
gaggaacctaccggtaccggccgcgcgctggtagtcgccggtgtggctgcacctcaccaatcccgtgcgccgcggctgggccgtcggagagtgcgtgtgcttctctcctgcacgcggtgcttgggctcggccaggcggggtccgccgccagggtttgaggatgggggagtagctacaggaagcgaccccgcgatggcaaggtatatttttgtggaatgaaaaggaagtattagaaatgagctgaagaccattcacagattaatatttttggggacagatttgtgatgcttgattcacccttgaagtaatgtagacagaagttctcaaatttgcatattacatcaactggaaccagcagtgaatcttaatgttcacttaaatcagaacttgcataagaaagagaatgggagtctggttaaataaagatgactatatcagagacttgaaaaggatcattctctgttttctgatagtgtatatggccattttagtgggcacagatcaggatttttacagtttacttggagtgtccaaaactgcaagcagtagagaaataagacaagctttcaagaaattggcattgaagttacatcctgataaaaacccgaataacccaaatgcacatggcgattttttaaaaataaatagagcatatgaagtactcaaagatgaagatctacggaaaaagtatgacaaatatggagaaaagggacttgaggataatcaaggtggccagtatgaaagctggaactattatcgttatgattttggtatttatgatgatgatcctgaaatcataacattggaaagaagagaatttgatgctgctgttaattctggagaactgtggtttgtaaatttttactccccaggctgttcacactgccatgatttagctcccacatggagagactttgctaaagaagtggatgggttacttcgaattggagctgttaactgtggtgatgatagaatgctttgccgaatgaaaggagtcaacagctatcccagcctcttcatttttcggtctggaatggccccagtgaaatatcatggagacagatcaaaggagagtttagtgagttttgcaatgcagcatgttagaagtacagtgacagaactttggacaggaaattttgtcaactccatacaaactgcttttgctgctggtattggctggctgatcactttttgttcaaaaggaggagattgtttgacttcacagacacgactcaggcttagtggcatgttgtttctcaactcattggatgctaaagaaatatatttggaagtaatacataatcttccagattttgaactactttcggcaaacacactagaggatcgtttggctcatcatcggtggctgttattttttcattttggaaaaaatgaaaattcaaatgatcctgagctgaaaaaactaaaaactctacttaaaaatgatcatattcaagttggcaggtttgactgttcctctgcaccagacatctgtagtaatctgtatgtttttcagccgtctctagcagtatttaaaggacaaggaaccaaagaatatgaaattcatcatggaaagaagattctatatgatatacttgcctttgccaaagaaagtgtgaattctcatgttaccacgcttggacctcaaaattttcctgccaatgacaaagaaccatggcttgttgatttctttgccccctggtgtccaccatgtcgagctttactaccagagttacgaagagcatcaaatcttctttatggtcagcttaagtttggtacactagattgtacagttcatgagggactctgtaacatgtataacattcaggcttatccaacaacagtggtattcaaccagtccaacattcatgagtatgaaggacatcactctgctgaacaaatcttggagttcatagaggatcttatgaatccttcagtggtctcccttacacccaccaccttcaacgaactagttacacaaagaaaacacaacgaagtctggatggttgatttctattctccgtggtgtcatccttgccaagtcttaatgccagaatggaaaagaatggcccggacattaactggactgatcaacgtgggcagtatagattgccaacagtatcattctttttgtgcccaggaaaacgttcaaagataccctgagataagattttttcccccaaaatcaaataaagcttatcattatcacagttacaatggttggaatagggatgcttattccctgagaatctggggtctaggatttttacctcaagtatccacagatctaacacctcagactttcagtgaaaaagttctacaagggaaaaatcattgggtgattgatttctatgctccttggtgtggaccttgccagaattttgctccagaatttgagctcttggctaggatgattaaaggaaaagtgaaagctggaaaagtagactgtcaggcttatgctcagacatgccagaaagctgggatcagggcctatccaactgttaaattttatttctacgaaagagcaaagagaaattttcaagaagagcagataaataccagagatgcaaaagcaatcgctgccttaataagtgaaaaattggaaactctccgaaatcaaggcaagaggaataaggatcactta

SEQ ID NO: 8669 - DNA, 934 bp, Homo sapiens
  source 1..934: mol_type = unassigned DNA
gaggaacctaccggtaccggccgcgcgctggtagtcgccggtgtggctgcacctcaccaatcccgtgcgccgcggctgggccgtcggagagtgcgtgtgcttctctcctgcacgcggtgcttgggctcggccaggcggggtccgccgccagggtttgaggatgggggagtagctacaggaagcgaccccgcgatggcaaggtatatttttgtggaatgaaaaggaagtattagaaatgagctgaagaccattcacagattaatatttttggggacagatttgtgatgcttgattcacccttgaagtaatgtagacagaagttctcaaatttgcatattacatcaactggaaccagcagtgaatcttaatgttcacttaaatcagaacttgcataagaaagagaatgggagtctggttaaataaagatgactatatcagagacttgaaaaggatcattctctgttttctgatagtgtatatggccattttagtgggcacagatcaggatttttacagtttacttggagtgtccaaaactgcaagcagtagagaaataagacaagctttcaagaaattggcattgaagttacatcctgataaaaacccgaataacccaaatgcacatggcgattttttaaaaataaatagagcatatgaagtactcaaagatgaagatctacggaaaaagtatgacaaatatggagaaaagggacttgaggataatcaaggtggccagtatgaaagctggaactattatcgttatgattttggtatttatgatgatgatcctgaaatcataacattggaaagaagagaatttgatgctgctgttaattctggagaactgtggtttgtaaatttttactccccaggctgttcacactgccatgatttagctcccacatggagagactttgctaaagaaagcttaagg

SEQ ID NO: 8670 - DNA, 1669 bp, Homo sapiens
  source 1..1669: mol_type = unassigned DNA
gaacttgcataagaaagagaatgggagtctggttaaataaagatgactatatcagagacttgaaaaggatcattctctgttttctgatagtgtatatggccattttagtgggcacagatcaggatttttacagtttacttggagtgtccaaaactgcaagcagtagagaaataagacaagctttcaagaaattggcattgaagttacatcctgataaaaacccgaataacccaaatgcacatggcgattttttaaaaataaatagagcatatgaagtactcaaagatgaagatctacggaaaaagtatgacaaatatggagaaaagggacttgaggataatcaaggtggccagtatgaaagctggaactattatcgttatgattttggtatttatgatgatgatcctgaaatcataacattggaaagaagagaatttgatgctgctgttaattctggagaactgtggtttgtaaatttttactccccaggctgttcacactgccatgatttagctcccacatggagagactttgctaaagaagtggatgggttacttcgaattggagctgttaactgtggtgatgatagaatgctttgccgaatgaaaggagtcaacagctatcccagcctcttcatttttcggtctggaatggccccagtgaaatatcatggagacagatcaaaggagagtttagtgagttttgcaatgcagcatgttagaagtacagtgacagaactttggacaggaaattttgtcaactccatacaaactgcttttgctgctggtattggctggctgatcactttttgttcaaaaggaggagattgtttgacttcacagacacgactcaggcttagtggcatgttggatggtcttgttaatgtaggatggatggactgtgccacccaggataacctttgtaaaagcttagatattacaacaagtactactgcttattttcctcctggagccactttaaataacaaagagaaaaacagtattttgctgcttcattgagagaatcagaccagcagagagagagagttatatgacaaaatatgctgaggataaaatattgacaaataaagaagatttgttagaagggccttttatactcgtttgtgttttaaataagagactcgggccgaaaacaagtttaagataagatctgtatcattgtattttactctaaaaactcctaagtggtttggtttttagatgaaaacctctataatgagcaaaagtccattccaattttccacttctaagttcctcttaattaatcttaattattggttggggaatgaagtgtctttgatagtctattattcttccttctagtgttataaaaattcttaagtgaatgtgtaaaacattggcattctgtaaaacatgattagcattaaaattaagctaaagataatgtggtttttcttgatgattgggaggtcactcaggatttttctgagcatttttatagaatacacatcatagttaattaaaaattccagttaatgcaacatcttataatggaatttattgtatatcactatttaagaaacagcttagttatataatatttttgataattgccaaaatacactttttttgaaaaaagacatttggaattgtttgaaaaactatttaccttctataatcattttcct

SEQ ID NO: 8671 - DNA, 7730 bp, Homo sapiens
  source 1..7730: mol_type = unassigned DNA
gcgaagatggcggcctccagagtgaaactctgagaggcagagggaggaggcggagggggcggggaggcagcgccgcggcggcaccaggaacccgcggcagcggagctgcagggccccggcgggggaaaggggaagtggtgagggtgaggaggccggagggcgcctcatcccactctggaagctgagccggcggcgggaggagctagggctggagcctctccagcctcccgcgaaggtttgagcacaaaatgaacataattagggaaaataaggatctggcatgtttctacacaacaaaacattcatggagggggaagtataagcgtgtcttttcagttggaactcatgcgattactacatataatcccaataccttagaagtaacaaatcagtggccttatggagacatttgcagcatcagccctgttggaaaaggacaaggaacggagttcaacctcacatttcgtaaaggcagtggaaaaaagtcagaaactttaaaattttctacagagcacagaacagaacttcttacagaagcattgagatttagaactgatttttcagagggaaaaatcacaggaaggagatacaactgctataagcatcactggagtgactcaagaaaacctgtaattttggaagtaactccaggaggctttgaccaaattaatcctgcaaccaacagagtactctgttcctatgactatagaaatattgaaggatttgtagatctctcagattatcaaggaggattttgtatactttatggaggatttagtagattgcatttatttgcgtcagagcaaagagaagagattattaaaagtgcaatagaccatgctggtaactacataggtatttcattgcggatcaggaaagagcctttagaattcgagcaatatttgaatcttcgctttggaaaatacagcactgatgaatccatcacatctttagcagagtttgtagtccaaaaaatatcacctagacattcggagcctgttaaaagagttctagcacttacagaaacatgtttagtagaacgtgatccggcaacctataatattgcaacattgaagcctttaggagaagtatttgcgttggtctgtgactcagaaaatccacaactttttaccattgaatttataaaagggcaagtacggaaatattcttcaacagagagagattccttattagcaagtttgctggatggagtaagagcctctggtaatagagatgtttgtgtaaaaatgacaccaacccataaaggtcagcgatgggggttactcagcatgcctgttgatgaggaagtagagagccttcacctcaggttcttagctacgcctccaaatggcaactttgcagatgctgtattcaggttcaatgctaatatttcatacagtggagtcctacatgcagtaacacaagatggtctcttctcagaaaacaaagaaaaactgatcaataatgccataacagcattactgtcccaagaaggggatgtcgttgcttcaaatgcggaacttgagagtcagttccaggctgtgaggaggcttgtggcatccaaagctggtttcctggctttcactcagcttccaaagtttcgcgagcgtctaggggtgaaggtagtaaaagcactcaaaagaagcaacaacggaataatccatgcagcagttgatatgctttgtgcccttatgtgtcccatgcatgatgactatgacttaagacaagaacagttgaacaaagcttctcttctctcgtcaaagaagtttctggaaaacttactggagaaatttaattcccatgtggatcatgggactggtgccctagttattagttcgctcttggacttccttacctttgccctctgtgctccatatagtgagacaactgaagggcagcagtttgatatgctcttggagatggtagcatccaatggaagaaccctttttaaactttttcagcatccttccatggcaataataaaaggagctgggttggttatgaaggcaataatagaggaaggtgataaagaaattgctacaaaaatgcaggagcttgccctaagtgaaggtgccttacctcgacacttgcatactgcgatgtttacaataagctcagatcaaaggatgcttacaaatagacagctaagtagacatttagtgggactctggacagctgataatgcaactgcaacaaacttgttgaaacgcattttgccgccaggcttgctggcatacttggaaagctcagatctcgtacctgagaaggatgctgatcggatgcatgttagagacaatgtgaaaatagcaatggatcagtatggaaaatttaataaagttccagagtggcaaagactagctggaaaagctgctaaagaagttgaaaaatttgccaaagaaaaagtggatcttgtattgatgcactggagggataggatgggcattgctcaaaaagagaatataaatcagaagccagtggttcttcgaaagagaagacaaagaataaaaatagaagcaaattgggatctcttctattataggtttggtcaagaccatgccaggtcaaaccttatttggaatttcaaaacacgagaagaactgaaagatactcttgaatctgaaatgagagcatttaatattgacagagaacttggaagtgcaaatgtgatctcctggaaccaccatgagtttgaggttaaatatgagtgcctggcagaggaaattaaaataggagactattacctgagattactattggaggaagatgagaatgaagaaagtggatcaattaagagatcgtatgaatttttcaatgagctttatcatcgcttcttgctcaccccaaaagtaaacatgaagtgtttatgtttacaagcccttgctattgtttatggcagatgtcacgaagaaataggaccttttacagataccagatatatcattggaatgttagagaggtgcacagataaacttgaacgagataggttgattctcttccttaacaagttgatccttaataagaaaaatgttaaggatctcatggattcaaatggaataagaatccttgtggacttgcttacccttgcacatctccatgtaagccgagctacagtaccactgcaaagcaatgtaattgaagctgctccagatatgaaaagagagagtgaaaaggaatggtattttggcaacgcagacaaagaaaggagtggcccgtatggatttcatgagatgcaagaattgtggaccaaaggaatgttaaatgcaaaaaccagatgctgggctcaaggcatggatggatggcgaccacttcagtccataccccagcttaagtggtgtctcttagccagtggacaggctgtcctgaatgaaactgaccttgctacccttatattgaacatgttgatcacaatgtgtggatattttccaagcagggatcaagacaatgccatcattcggcctctacccaaagtgaaaagactgctgtcagatagcacttgccttccccatattattcagctactgctgacctttgaccctatccttgttgagaaggttgctattttgttataccatatcatgcaagataacccacagttaccccgcctttatctgagtggagtatttttctttatcatgatgtacacaggttccaatgtgcttcctgttgctcgatttttgaaatacacacataccaaacaggctttcaagtcagaagagacaaaaggacaagatatttttcagagaagtatacttgggcacattctacctgaagcaatggtttgttacttagaaaattatgaacctgaaaagttttctgagatttttctaggagaatttgatactccagaagcaatctggagcagtgaaatgaggcgcctgatgatagagaagattgctgcccatctcgcggatttcacacctcgtcttcagagtaacacaagagcactttatcagtattgccccattcctataatcaactatccacaactcgaaaatgaactattttgtaatatttattacctcaaacaactgtgtgatacactccggtttccagattggccaattaaagacccggttaagcttctaaaagatacccttgatgcctggaagaaagaagtagaaaagaagccacctatgatgtcaatagatgatgcttatgaagtgcttaatctgcctcaaggacagggaccgcatgatgagagcaagattaggaaagcttacttcagacttgcacaaaagtaccaccctgataagaatccagaagggagggacatgtttgaaaaagtaaataaagcatatgaatttttatgtaccaaatcagcaaaaatagtggatgggccagatccagagaatataattttaattctaaaaacacagagcatcctcttcaaccgtcataaagaagatttacagccttataaatatgcaggataccccatgcttattcggactataacaatggaaacttcagatgacctccttttctcaaaagaatcaccattgttgcctgcggctacagagctagctttccatactgtcaactgttcagccctcaatgctgaagagctcagaagagagaatggactagaggtgttacaagaggcatttagtcgctgtgtggctgtcttgactcgtgctagtaaaccaagtgacatgtcagtacaggtgtgtggatacataagtaaatgctacagtgtggctgctcagtttgaggaatgccgagagaagatcacggaaatgcctagcatcatcaaggatctctgtcgggtactatattttggcaagagtattccccgcgtagctgctcttggggtagaatgtgtcagttcttttgctgtggatttctggctacagacacacctatttcaggctggaattttgtggtatctccttggttttctgtttaattatgactacacactagaagagagtggcattcagaaaagtgaagaaacaaaccagcaggaggtagcaaacagccttgccaaactgagtgtccatgctctgagtcgccttggagggtatttggctgaagaacaagcaactccagaaaatccaaccataaggaaaagcttagctggcatgctgacaccctatgttgctagaaaacttgctgtggctagtgtgactgagattttgaagatgcttaacagcaacacagaaagtccatatttgatatggaacaattctacaagagcagaattacttgaatttcttgaatcccaacaagaaaacatgattaaaaaaggtgattgtgacaaaacttatggatcagaatttgtctacagtgatcatgccaaagaacttattgtaggggagatttttgttagggtgtataatgaagttcctactttccaactggaggttccaaaagcatttgctgcaagtctcttggattatataggctcgcaggcccaatacttgcacacattcatggccatcacacacgcggcaaaagtggagtcagagcaacatggagatcgcttaccgagagtagaaatggctttggaggctctgagaaatgtcataaaatacaatccaggttctgagagtgaatgcattgggcactttaagttgatattttctcttctccgagttcatggagctggtcaagtgcagcagttggctttagaggttgtgaatatagtgacatctaaccaagactgtgtcaacaatattgctgaatcaatggttttgtccagtttattggctcttctacattcattgccatcaagtcgtcagcttgttctggaaactctttatgctttgacatcgagtacaaaaataatcaaagaagcaatggcaaagggtgctttgatctatttactggatatgttctgcaattcaacacatccacaggttcgagcccaaacagcagaactttttgccaaaatgacagcagataaactgataggtccaaaggttcgaattacgttaatgaaatttctaccaagcgttttcatggatgctatgagagacaatcctgaagctgctgtacatatttttgaaggaactcatgaaaatcctgagttaatttggaatgataattccagagataaagtgtccacaacagttagggaaatgatgctagagcactttaaaaatcagcaggacaaccctgaggcaaactggaagttgcctgaagattttgctgtggtgtttggagaagcagagggtgaacttgctgttggaggagtcttcttgaggatctttattgcacaaccagcctgggttctaagaaagcctagagaatttcttattgccctgttagaaaaattaactgagctcctagagaagaacaatcctcatggagaaactctggaaaccttgacaatggcaacagtgtgtctcttcagcgcacaacctcagctggcagatcaggtcccgccattgggccatcttcccaaagttatccaggcaatgaatcataggaacaatgccattcctaagagtgccattcgggttatccatgccttgtctgaaaatgagctgtgtgttcgagccatggcatctttagagaccattggcccactgatgaatggaatgaaaaagcgagcagatactgttggtctagcctgtgaagcaattaatcgaatgtttcagaaggagcagagtgaattagtagcacaagccctgaaagcagatttggttccatacctcttaaaattactcgaaggcattggccttgaaaacctggacagcccagcagccactaaggctcagattgttaaagctctcaaggcaatgactcgaagtttgcagtatggagaacaggtgaatgaaatcctgtgccgttcttcagtctggagtgccttcaaagatcagaaacatgatttgttcatttctgagtcacaaacagcaggatacctcacaggacctggagttgctggctaccttaccgcaggtacatctacatcagtcatgtctaacctgccacctcctgtagaccatgaggcaggcgaccttggctatcagacttgaaatattcacgagagacaataaacgctgaaaggccagtgccaagtccacattcctccagctgatacgttgaagcaaactcttactgcctttctcctggtttcatgacagtgttattcctttttctataaatatatttttaggaaaaaaagtcagtgatcctaattgtatcacattataagaaagcactctgtggatcaacataagtgggtacacaagaattttttttttcttggtgtatgtaagcacatttgttcctttatatctgtttacaaaactgtgaatcaaaaagacaaaactttcttcctagtttttgtaattttttttttgaactagcatgactgtagggttgagctacagtcaacaaaaattgggctaagtcacttttccccaggaaagaatatttccctctcctgcatcaagtctgcgtggccatcctccccccaccatccaagactattaggttttgtccctgcacccttcactggcatcctcaatcattaaccttctgaaagctcacagtacacattagtatgtataactggctttaccaaattgaatgaaaaggagcttgtgcaaaaaaatttaaaaatggatgtcaagatgttatgtaaaagatgagtgtaattgtgaaatgttctatacactatcaaatatataaagctttctatattgaatgtacattatacagatcattcatatgtgtacataaaattttaaaaataaagggaattgactgctttgttaatgaga

SEQ ID NO: 8672 - DNA, 3972 bp, Homo sapiens
  source 1..3972: mol_type = unassigned DNA
gcacattctacctgaagcaatggtttgttacttagaaaattatgaacctgaaaagttttctgagatttttctaggagaatttgatactccagaagcaatctggagcagtgaaatgaggcgcctgatgatagagaagattgctgcccatctcgcggatttcacacctcgtcttcagagtaacacaagagcactttatcagtattgccccattcctataatcaactatccacaactcgaaaatgaactattttgtaatatttattacctcaaacaactgtgtgatacactccggtttccagattggccaattaaagacccggttaagcttctaaaagatacccttgatgcctggaagaaagaagtagaaaagaagccacctatgatgtcaatagatgatgcttatgaagtgcttaatctgcctcaaggacagggaccgcatgatgagagcaagattaggaaagcttacttcagacttgcacaaaagtaccaccctgataagaatccagaagggagggacatgtttgaaaaagtaaataaagcatatgaatttttatgtaccaaatcagcaaaaatagtggatgggccagatccagagaatataattttaatctaaaaacacagagcatcctcttcaaccgtcataaagaagatttacagccttataaatatgcaggataccccatgcttattcggactataacaatggaaacttcagatgacctccttttctcaaaagaatcaccattgttgcctgcggctacagagctagctttccatactgtcaactgttcagccctcaatgctgaagagctcagaagagagaatggactagaggtgttacaagaggcatttagtcgctgtgtggctgtcttgactcgtgctagtaaaccaagtgacatgtcagtacaggtgtgtggatacataagtaaatgctacagtgtggctgctcagtttgaggaatgccgagagaagatcacggaaatgcctagcatcatcaaggatctctgtcgggtactatattttggcaagagtattccccgcgtagctgctcttggggtagaatgtgtcagttcttttgctgtggatttctggctacagacacacctatttcaggctggaattttgtggtatctccttggttttctgtttaattatgactacacactagaagagagtggcattcagaaaagtgaagaaacaaaccagcaggaggtagcaaacagccttgccaaactgagtgtccatgctctgagtcgccttggagggtatttggctgaagaacaagcaactccagaaaatccaaccataaggaaaagcttagctggcatgctgacaccctatgttgctagaaaacttgctgtggctagtgtgactgagattttgaagatgcttaacagcaacacagaaagtccatatttgatatggaacaattctacaagagcagaattacttgaatttcttgaatcccaacaagaaaacatgattaaaaaaggtgattgtgacaaaacttatggatcagaatttgtctacagtgatcatgccaaagaacttattgtaggggagatttttgttagggtgtataatgaagttcctactttccaactggaggttccaaaagcatttgctgcaagtctcttggattatataggctcgcaggcccaatacttgcacacattcatggccatcacacacgcggcaaaagtggagtcagagcaacatggagatcgcttaccgagagtagaaatggctttggaggctctgagaaatgtcataaaatacaatccaggttctgagagtgaatgcattgggcactttaagttgatattttctcttctccgagttcatggagctggtcaagtgcagcagttggctttagaggttgtgaatatagtgacatctaaccaagactgtgtcaacaatattgctgaatcaatggttttgtccagtttattggctcttctacattcattgccatcaagtcgtcagcttgttctggaaactctttatgctttgacatcgagtacaaaaataatcaaagaagcaatggcaaagggtgctttgatctatttactggatatgttctgcaattcaacacatccacaggttcgagcccaaacagcagaactttttgccaaaatgacagcagataaactgataggtccaaaggttcgaattacgttaatgaaatttctaccaagcgttttcatggatgctatgagagacaatcctgaagctgctgtacatatttttgaaggaactcatgaaaatcctgagttaatttggaatgataattccagagataaagtgtccacaacagttagggaaatgatgctagagcactttaaaaatcagcaggacaaccctgaggcaaactggaagttgcctgaagattttgctgtggtgtttggagaagcagagggtgaacttgctgttggaggagtcttcttgaggatctttattgcacaaccagcctgggttctaagaaagcctagagaatttcttattgccctgttagaaaaattaactgagctcctagagaagaacaatcctcatggagaaactctggaaaccttgacaatggcaacagtgtgtctcttcagcgcacaacctcagctggcagatcaggtcccgccattgggccatcttcccaaagttatccaggcaatgaatcataggaacaatgccattcctaagagtgccattcgggttatccatgccttgtctgaaaatgagctgtgtgttcgagccatggcatctttagagaccattggcccactgatgaatggaatgaaaaagcgagcagatactgttggtctagcctgtgaagcaattaatcgaatgtttcagaaggagcagagtgaattagtagcacaagccctgaaagcagatttggttccatacctcttaaaattactcgaaggcattggccttgaaaacctggacagcccagcagccactaaggctcagattgttaaagctctcaaggcaatgactcgaagtttgcagtatggagaacaggtgaatgaaatcctgtgccgttcttcagtctggagtgccttcaaagatcagaaacatgatttgttcatttctgagtcacaaacagcaggatacctcacaggacctggagttgctggctaccttaccgcaggtacatctacatcagtcatgtctaacctgccacctcctgtagaccatgaggcaggcgaccttggctatcagacttgaaatattcacgagagacaataaacgctgaaaggccagtgccaagtccacattcctccagctgatacgttgaagcaaactcttactgcctttctcctggtttcatgacagtgttattcctttttctataaatatatttttaggaaaaaaagtcagtgatcctaattgtatcacattataagaaagcactctgtggatcaacataagtgggtacacaagaattttttttttcttggtgtatgtaagcacatttgttcctttatatctgtttacaaaactgtgaatcaaaaagacaaaactttcttcctagtttttgtaattttttttttgaactagcatgactgtagggttgagctacagtcaacaaaaattgggctaagtcacttttccccaggaaagaatatttccctctcctgcatcaagtctgcgtggccatcctccccccaccatccaagactattaggttttgtccctgcacccttcactggcatcctcaatcattaaccttctgaaagctcacagtacacattagtatgtataactggctttaccaaattgaatgaaaaggagcttgtgcaaaaaaatttaaaaatggatgtcaagatgttatgtaaaagatgagtgtaattgtgaaatgttctatacactatcaaatatataaagctttctatattgaatgtacattatacagatcattcatatgtgtacataaaattttaaaaataaagggaattgactgctttgttaatg

SEQ ID NO: 8673 - DNA, 1453 bp, Homo sapiens
  source 1..1453: mol_type = unassigned DNA
cgacagttttccggcctagtttgcggctgctcctgccgtgttgcgtagggcgcctgtgcttgaggttgggggttgcgtcgctctctggtaaaggcgtgcaggtgttggccgcggcctctgagctgggatgagccgtgctcccggtggaagcaagggagcccagccggagccatggccagtacagtggtagcagttggactgaccattgctgctgcaggatttgcaggccgttacgttttgcaagccatgaagcatatggagcctcaagtaaaacaagtttttcaaagcctaccaaaatctgccttcagtggtggctattatagaggtgggtttgaacccaaaatgacaaaacgggaagcagcattaatactaggtgtaagccctactgccaataaagggaaaataagagatgctcatcgacgaattatgcttttaaatcatcctgacaaaggaggatctccttatatagcagccaaaatcaatgaagctaaagatttactagaaggtcaagctaaaaaatgaagtaaatgtatgatgaattttaagttcgtattagtttatgtatatgagtactaagtttttataataaaatgcctcagagctacaattttaaaaaatgatttagcacaagctaaatctcaaagccttggtataattttcttgtttaaatttggggattttaaatcagattatagtttagaatatttgcgtattaattatgggcaagcacacaccttctgaatagaaatattgttcattactcatttagcagataatttgggacctatgtctacttttcaaggcaaagtgaagatgacagtccttgctctcagggagcccccactttaatgggagactgataaactggtaattagactgtgataaatagtatgatggaaattagcttaagctgtttaagtagggactcttcttattcggtggaaaggctgttccaggtacaggcaactggcctggcaacttggatacttggaaccttgtatttaaaagtgaatttaaccacaactgagacctaagaaattgacctaggggtgtgtgtgtgtgtgtattctatgtacatataaaccatttttatttcatgcattaaaaatagtatgataaagatttcagagtacaggtctggtacaatcacagttcattgcagcctcaacctcctgggtttaagcagtcctcccgcctcagcctcccaaagtactgggattacaggcatgagtatttacattgtattcagctagccccttaaaggtaatgaccatttataaattattccttcagttggctatttcttgacataatcaaacttctgcaattgttatgattaagcttaaaccctgttagcaaaactgaaaactgaaatgttctcaatatcaacatatttaatttggactctttagaatttatacactaataaatttaaatgatgtttaaaggcaaa

SEQ ID NO: 8674 - DNA, 1846 bp, Homo sapiens
  source 1..1846: mol_type = unassigned DNA
gggacgtgagccgctgcgcccaccgggctagacccggcgccatcatgctgcttctgccaagcgccgcggacggccggggcaccgccatcacccacgctctgacctctgcctctacactctgtcaagttgaacctgtgggaagatggtttgaagcttttgttaagaggagaaacagaaatgcttctgcctcttttcaggaactggaggataagaaagagttatccgaggaatcagaagatgaagaattgcagttggaagagtttcccatgctgaaaacacttgatcccaaagactggaagaaccaagatcattatgcagttcttggacttggccatgtgagatacaaggctacacagagacagatcaaagcagctcataaagcaatggttttaaaacatcacccagacaaacggaaagcagctggtgaaccaataaaagaaggagataatgactacttcacttgcataactaaagcttatgaaatgttatctgatccagtgaaaagacgagcatttaacagtgtagatcctacttttgataactcagttccttctaaaagtgaagcaaaggataatttcttcgaagtgtttaccccagtgtttgaaaggaattccagatggtcaaataaaaaaaatgttcctaaacttggtgatatgaattcatcatttgaagatgtagatatattttattctttctggtataattttgattcttggagagaattttcttatttagatgaagaagaaaaagaaaaagcagaatgtcgtgatgagaggagatggattgaaaagcagaacagagcaacaagagcacaaagaaaaaaagaagaaatgaacagaataagaacattagttgacaatgcatacagctgtgatccaaggataaaaaagttcaaggaagaagaaaaagccaagaaagaagcagaaaagaaagcaaaagcagaagctaaacggaaggagcaagaagctaaagaaaaacaaagacaagctgaattagaagctgctcggttagctaaggagaaagaagaggaggaagtcagacagcaagcattgctggcaaagaaggaaaaagatatccagaaaaaagccattaagaaggaaaggcaaaaacttcgaaactcatgcaagatagaagaaataaatgagcaaatcagaaaagagaaagaggaagctgaggctcgtatgcgacaagcatctaagaacacagagaaatcaactggtggaggtggaaatggaagtaaaaattggtcagaagatgatctacaattactaattaaagctgtgaatctgttccctgctggaacaaattcaagatgggaagttattgctaattacatgaacatacattcttcctctggagtcaaaagaactgccaaagatgttattggcaaagcaaagagtctccaaaaacttgaccctcatcaaaaagatgacataaataaaaaggcatttgataagttcaaaaaagaacatggagtggtacctcaagcagacaacgcaacgccttcagaacgatttgaaggtccatatacagacttcaccccttggacaacagaagaacagaagcttttggaacaagctttgaaaacatacccagtaaatacacctgaaagatgggaaaaaatagcagaagcggtgcctggcaggacaaagaaggactgcatgaaacgatacaaggaacttgtcgagatggtaaaagcaaagaaagctgctcaagaacaagtgctgaatgcaagtagagccaagaaatgacaatctttgttgtgtgtgcatttttataataaaactgaaaatactgtaaacattttcattcttaaaattatactcatggtaataatttgaaagta

SEQ ID NO: 8675 - DNA, 2167 bp, Homo sapiens
  source 1..2167: mol_type = unassigned DNA
agccggatctcagtcagtatagaactaggttaccgcacacgttggcgggggtgggagggtgtgagactggcctccacaccacgaaagatccatcccggaagtgcttactggtcgtctccatgcgccggttcctgggcgtcttagagccaaggcgcgaggctcggagtgagaggtagagctggaggggaccctaagcgccctccgcccgggacgtgagccgctgcgcccaccgggctagacccggcgccatcatgctgcttctgccaagcgccgcggacggccggggcaccgccatcacccacgctctgacctctgcctctacactctgtcaagttgaacctgtgggaagatggtttgaagcttttgttaagaggagaaacagaaatgcttctgcctcttttcaggaactggaggataagaaagagttatccgaggaatcagaagatgaagaattgcagttggaagagtttcccatgctgaaaacacttgatcccaaagactggaagaaccaagatcattatgcagttcttggacttggccatgtgagatacaaggctacacagagacagatcaaagcagctcataaagcaatggttttaaaacatcacccagacaaacggaaagcagctggtgaaccaataaaagaaggagataatgactacttcacttgcataactaaagcttatgaaatgttatctgatccagtgaaaagacgagcatttaacagtgtagatcctacttttgataactcagttccttctaaaagtgaagcaaaggataatttcttcgaagtgtttaccccagtgtttgaaaggaattccagatggtcaaataaaaaaaatgttcctaaacttggtgatatgaattcatcatttgaagatgtagatatattttattctttctggtataattttgattcttggagagaattttcttatttagatgaagaagaaaaagaaaaagcagaatgtcgtgatgagaggagatggattgaaaagcagaacagagcaacaagagcacaaagaaaaaaagaagaaatgaacagaataagaacattagttgacaatgcatacagctgtgatccaaggataaaaaagttcaaggaagaagaaaaagccaagaaagaagcagaaaagaaagcaaaagcagaagctaaacggaaggagcaagaagctaaagaaaaacaaagacaagctgaattagaagctgctcggttagctaaggagaaagaagaggaggaagtcagacagcaagcattgctggcaaagaaggaaaaagatatccagaaaaaagccattaagaaggaaaggcaaaaacttcgaaactcatgcaagacctggaatcatttttctgataatgaggcagagcgggttaaaatgatggaagaagtggaaaaactttgtgatcggcttgaactggcaagcttacagtgcttgaatgaaacactcacatcatgcacaaaagaagtaggaaaggctgctttggaaaaacagatagaagaaataaatgagcaaatcagaaaagagaaagaggaagctgaggctcgtatgcgacaagcatctaagaacacagagaaatcaactggtggaggtggaaatggaagtaaaaattggtcagaagatgatctacaattactaattaaagctgtgaatctgttccctgctggaacaaattcaagatgggaagttattgctaattacatgaacatacattcttcctctggagtcaaaagaactgccaaagatgttattggcaaagcaaagagtctccaaaaacttgaccctcatcaaaaagatgacataaataaaaaggcatttgataagttcaaaaaagaacatggagtggtacctcaagcagacaacgcaacgccttcagaacgatttgaaggtccatatacagacttcaccccttggacaacagaagaacagaagcttttggaacaagctttgaaaacatacccagtaaatacacctgaaagatgggaaaaaatagcagaagcggtgcctggcaggacaaagaaggactgcatgaaacgatacaaggaacttgtcgagatggtaaaagcaaagaaagctgctcaagaacaagtgctgaatgcaagtagagccaagaaatgacaatctttgttgtgtgtgcatttttataataaaactgaaaatactgtaaa

SEQ ID NO: 8676 - DNA, 857 bp, Homo sapiens
  source 1..857: mol_type = unassigned DNA
agccggatctcagtcagtatagaactaggttaccgcacacgttggcgggggtgggagggtgtgagactggcctccacaccacgaaagatccatcccggaagtgcttactggtcgtctccatgcgccggttcctgggcgtcttagagccaaggcgcgaggctcggagtgagaggtagagctggaggggaccctaagcgccctccgcccgggacgtgagccgctgcgcccaccgggctagacccggcgccatcatgctgcttctgccaagcgccgcggacggccggggcaccgccatcacccacgctctgacctctgcctctacactctgtcaagttgaacctgtgggaagatggtttgaagcttttgttaagaggagaaacagaaatgcttctgcctcttttcaggaactggaggataagaaagagttatccgaggaatcagaagatgaagaattgcagttggaagagtttcccatgctgaaaacacttgatcccaaagactggaagaaccaagatcattatgcagttcttggacttggccatgtgagatacaaggctacacagagacagatcaaagcagctcataaagcaatggttttaaaacatcacccagacaaacggaaagcagctggtgaaccaataaaagaaggagataatgactacttcacttgcataactaaagcttatgaaatgttatctgatccagtgaaaagacgagcatttaacagtgtagatcctacttttgataactcagttccttctaaaagtgaagcaaaggataatttcttcgaagtgtttaccccagtgtttgaaaggaattccagagtctccatctcaaaaaaaaaaaaaaaaaaaaga

SEQ ID NO: 8677 - DNA, 4992 bp, Homo sapiens
  source 1..4992: mol_type = unassigned DNA
gtctccctcccccggctccccacgctcccaaccgcccgcgcctgctgccaggcagcggcggggatggcgagcagcggaggcgaggcggtgacgagagcagcggctccgccattggacgaggaggcctgagggacgggccagcggtgcacaagaagagaccgaggcgggtggccccgagagagccagggccatggaggccaacatgccgaagcggaaggagcccggcaggtctctccgcatcaaagtcatctccatgggcaacgccgaagtggggaaaagctgtattataaagcgatactgtgagaaaagattcgtgtctaaatacctggcaacaattggaattgactatggagtcacaaaggtacacgtcagagacagagaaatcaaagttaacatctttgatatggctggacatcccttcttctatgaggttcgaaatgagttttacaaggacacacagggtgtgatactggtctatgatgttgggcagaaagactcctttgacgcccttgatgcgtggctggcagaaatgaagcaagagcttggacctcatggaaacatggaaaatattatatttgtagtttgtgccaacaagattgattgtaccaaacatcgctgtgtagatgaaagtgaaggacgtctttgggctgaaagcaaagggttcctgtactttgaaacttcagcacaaactggagaaggcattaatgagatgttccagaccttttatatatccatagttgatttatgtgaaaatggcgggaaacgccctaccaccaatagcagtgctagtttcaccaaagaacaagcagatgccattcgcagaattcgaaatagtaaagacagttgggacatgctgggagtcaaacctggggcctcaagggatgaagtcaataaagcgtatcggaaacttgctgtgcttcttcaccctgacaaatgtgtagcacctggcagtgaagatgccttcaaagcagttgtgaatgctcggacagccctcctgaaaaacatcaagtagaaagtacagaaaaaagccacatgtgggactcaaatgcaaacagactttccctagaggtgaaataaccaacgtggagttttccttcccagaatctcactgctcttttcattcatgtgttgtcatttgtatatcagtaattcaggtacccatttcatagacattttactgagaaatgacctgcatttgtatgaagtgaactgagcgtcacaccctgtacttcatttcatatttctagataattctgaatttttttctcattcgtcagctctgtaattatagtatcacttagacatttcacttggggaaatccacaaggttcctggaggagggaagagaggacaagaggaccctttcactttttcttttttacggaattcatcatcagagaagaaaataacaaaaatggaagcaaacaacatcagaacccctgtaagtttggtgtgaccttacagacaagttgctgcttttacaatgagttccttaggtggtattttaacccatcgatctataatgatgactcttggcagccctttgggagtttgtaaaatgaggtgatacagttctgaattgagcattcctttatgatattcactctgttcctcttctgcagccaccagtgggagagacaagccagtcctaagagaaaaggtggtggcagccacaaattctaggtacactggctgctgcctatcctgtccctggatctgaggcctttcccttgccatagaaatggttgctggtagcagtagagagcactgtgcacctgggaatgaggaatcaggccccaagacagaagtacttggaggagccagctgcagtagtatccgcctgtagtcccagctactcaggaggctgagacaggaggattgcttaagcccaggagctcaagtcccacctgggcaacatagtaagatcttgtctcttaaagaaaaaaaaaaaaggtacttagaggtcgcacttaaagattatgcacatcagcagaggaaaggccagccaagcttggggcaagcttgatgcagtaggagagactccttatgaggcttagcccttgtcttactgccagcctttgccacaggcaggtgagaaaggcagggccactcctcagcaaagttggcctcttctacacttcctcaccagtgttgtttcttccttttttcccctcttccccttcccgtcttgtgttttttctgaaccccacatctgccatcatttctctcctctagagtccctggcttctggccactgcctcctccctcttctaagccttggcctgaatctggttgatcagaggcaagtgtggatcctttgggtggcagtcaggggagatctcagggcctctgttgggaggaatctctgtaattcctgcttgggctccaaatttctgaagagtaatatttttaaactatagcttacaaaatacattctctgaccacagtctcctccttgatatacaagggatggatgaagttcatgtattaggactggcactccttacggtgcttatagaactagtctcaccacttgactcattacgtcgtcattcttgttacatcactcatacttttagctgcaaccacactaattcacatttttatatactttcaattagctgtactaattggggcttgaaagtatataaaatcttcctgtcctgtgaattttaaaaagctatcccatatcgattgccaaagagcatctaccttacctcctaagaagaaaagccactttcttccaatccaagcccactgcagccttgtggattttccacacagcagcttttcactgtatgcctgtacttgggctgcactgagcttgtcttcaggaaaccagagcgttgctttatcatcgcacttttcatcttggtaatatcaaaacaactttttaaatgaactgattgatatatgttatttcttgcgaggttttcctctggcctttaactggcttctgaggctacagaactccaacccagagttcttcgggacctaaattttgcttaaggaaggcctttatcatgctgaaagcactcagacatgtctgtcctcacagcagaatgtagaagtcatatgaatgagggatcgtgcacggtagcgtcagcccgaattgacacgacaactctgaatgtgtggccctctatgaaagctggtgccagttttcatcactgttattaaatactagattgggaacctcattcagccgtattgcacagatgagcaattacagcagagaaaattcattagtgctcccactcatatccttatgtgtgagttggtgaaatttagcctgagcttgattcttaggtcttgagactcagtttccaacaccttcattattaatgttaagaatggccatataccacttcatttacgtaaaaggaataaaataagcaagttaagcttcagggtcctagaatttttctgatttctataatccttcagcagaatattaagaaataaagcatgatctgcaatggaaaggtttttttggcactaacttcatgcagaatttcacagacatctatgcattaatttaaattcttggtgcaaatgtgtgctttgtagttcaaccttattaaaaattcttcagccagttaggatttcaaaatacattagtgagagtaacagctagcagaataattacaatggctaaaacgtttttatagagaatcttgtttttcaaaaaagaataaaaagtttgaatagctattattaaagaaaagccatgtcttcaacatctgagtcaccaagaagtaacactttttaaacttgttagaaatccctggaggcatttcaaattcatcttctaacctacctaagcactttaaaatacagcctccttctgttcctctgttccccttcatgcctccttttgaattgatatctcagctgtcaatatttctttgacttcagcattgttattttatttctctatatcaatgtgtccttagttttcttagcctgttaatttaaaaatccagacttgggggtcattgtgttgctacccaagagaaaatgctacagttttatagattgcacatcattctttaaggcatacttttacctcaggaaacttactctagtatgttctcatatattgaattctcaactaagtaactatttctttatacctataaactagtacctaattcactgttagttaaatgagctatagataaggcagctaaatttctgaaagatagccagagtaagtaagcagccactgcaagctctgaatcagttttttaaaaaaaagaaaaaaaaaaaaaaggagctgtgccccattgaacaatgacaacatcacaaggggaagggagggattttgccaaaagttagaaaggtggagctgtaagccatgtgcttgttgcctttgacagtgacagtgcgcgtcttacaactaattccactaggcatgggaatgtcacctcctttgccactgtaccccatcaagcttactctgaatcaaaggttttgtaaaacttttgaaaatgaacttagctgcaaaatatagctaaccactttccattgcaagctttgcaaagtgaagagaggttcgtacttctcataattggtatttagcacaattgtaagatacagttttactgtttgtacatcgtttttttccattaaacttttctagagaagacaaaagcttacactggtgacatggataagtgagatggtgtctaacgagcagtgcaatattaggcggtgcaatagaggccctgttggcaagatgagttttgctggagagctggacagtgttggttagcttcctgcattgattgcccctgggcgttcttcccccttaactgtgaaagcagagtctataaatgaactctttgctcttacaaggtaatttacatattttctttctgttgaaataactgaaaatgttaaatctaccagtttatgtcttgtaaacagagtgtcatatgtatttaagttgtgtatttttataaagtaaagccaagtatcaaacaccgg

SEQ ID NO: 8678 - DNA, 1415 bp, Homo sapiens
  source 1..1415: mol_type = unassigned DNA
gtcactcttccggagatggtgtctggggtggcctctaagccttgaatgtacccccaaaagaagctgtattataaagcgatactgtgagaaaagattcgtgtctaaatacctggcaacaattggaattgactatggagtcacaaaggtacacgtcagagacagagaaatcaaagttaacatctttgatatggctggacatcccttcttctatgaggttcgaaatgagttttacaaggacacacagggtgtgatactggtctatgatgttgggcagaaagactcctttgacgcccttgatgcgtggctggcagaaatgaagcaagagcttggacctcatggaaacatggaaaatattatatttgtagtttgtgccaacaagattgattgtaccaaacatcgctgtgtagatgaaagtgaaggacgtctttgggctgaaagcaaagggttcctgtactttgaaacttcagcacaaactggagaaggcattaatgagatgttccagaccttttatatatccatagttgatttatgtgaaaatggcgggaaacgccctaccaccaatagcagtgctagtttcaccaaagaacaagcagatgccattcgcagaattcgaaatagtaaagacagttgggacatgctgggagtcaaacctggggcctcaagggatgaagtcaataaagcgtatcggaaacttgctgtgcttcttcaccctgacaaatgtgtagcacctggcagtgaagatgccttcaaagcagttgtgaatgctcggacagccctcctgaaaaacatcaagtagaaagtacagaaaaaagccacatgtgggactcaaatgcaaacagactttccctagaggtgaaataaccaacgtggagttttccttcccagaatctcactgctcttttcattcatgtgttgtcatttgtatatcagtaattcaggtacccatttcatagacattttactgagaaatgacctgcatttgtatgaagtgaactgagcgtcacaccctgtacttcatttcatatttctagataattctgaatttttttctcattcgtcagctctgtaattatagtatcacttagacatttcacttggggaaatccacaaggttcctggaggagggaagagaggacaagaggaccctttcactttttcttttttacggaattcatcatcagagaagaaaataacaaaaatggaagcaaacaacatcagaacccctgtaagtttggtgtgaccttacagacaagttgctgcttttacaatgagttccttaggtggtattttaacccatcgatctataatgatgactcttggcagccctttgggagtttgtaaaatgaggtgatacagttctgaattgagcattcctttatgatattcactctgttcctcttctgcagccaccagtg

SEQ ID NO: 8679 - DNA, 1631 bp, Homo sapiens
  source 1..1631: mol_type = unassigned DNA
gcgagagccgacggcgggcgggcgcagctgctgccggagcgccggcgcgtgctggtgggccacacacctttcctcctcttcactcgcgagccctcggacatggtggcccccggctccgtgaccagccggctgggctcggtattccccttcctgctagtcctggtggatctgcagtacgaaggtgctgaatgtggagtaaatgcagatgttgagaaacatcttgaattgggcaagaaattacttgcagctggacagctagctgatgctttatctcagtttcatgctgccgtagatggtgaccctgataactatattgcttattatcggagggctactgtctttttagctatgggcaaatcaaaagctgcacttcctgatttaactaaagtgattcaattgaagatggacttcactgcagcaagattacagagaggtcacttattactcaaacaaggaaaacttgatgaagcagaagatgattttaaaaaagtgctcaaatctaatccaagtgaaaatgaagaaaaggaagcacagtctcaacttataaaatctgatgaaatgcagcgtttgcgttcacaagcacttaacgcttttggaagtggagattatactgctgctatagccttccttgataagattttagaggtttgtgtttgggatgcagaactacgggaacttcgagctgaatgttttataaaagaaggagaacctaggaaagctataagtgacttaaaagctgcgtcaaagttgaagaatgataatactgaagcgttttataaaataagcacactgtactaccaactaggagaccacgaactgtccctcagtgaagttcgggaatgtcttaaacttgaccaggatcataaaaggtgttttgcacactataaacaagtaaagaaacttaataagctgattgagtcagctgaagagctcatcagagatggcagatacacagatgctaccagcaaatatgaatctgtcatgaaaacagagccaagcattgctgaatatacagttcgttcaaaggagaggatttgccactgcttttctaaggacgagaagcctgttgaagctattagggtttgttctgaagttttacagatggaacctgacaatgtgaatgccctgaaagatcgagcagaggcctatttgatagaggaaatgtatgatgaagctattcaggattatgaaactgctcaggaacacaatgaaaatgatcagcagattcgagaaggtctagagaaagcacaaagattattgaaacagtcgcagaaacgagattattataaaatcttgggagtaaaaagaaatgccaaaaagcaagaaattattaaagcataccgaaaattagcactgcagtggcacccagataacttccagaatgaagaagaaaagaaaaaagctgagaaaaagttcattgatatagcagctgctaaagaagtcctctctgatccagaaatgagaaagaagtttgacgacggagaagatcctttggatgcagagagccagcaaggaggcggcggcaaccctttccacagaagctggaactcatggcaagggttcaatcccttcagctcaggcggaccatttagatttaaattccacttcaattaaaccaactgtttttctgc

SEQ ID NO: 8680 - DNA, 5213 bp, Homo sapiens
  source 1..5213: mol_type = unassigned DNA
acccgcgccctctgccgccgccgccgccgccgcccggggtctccaggctgaggagtgcgtcggccgctgcccagcagcgccgcgaatcggggagcggagccgcggagccggcgggagggcgggcgggcgggcggacgggcagaatagcctaacatggcagaccagagacagcgctcactgtctacctctggggagtcattgtaccacgtccttgggttggacaagaacgcaacctcagatgacattaaaaagtcctatcggaagcttgccttgaaatatcaccccgacaagaaccccgacaacccggaggccgcggacaagtttaaggagatcaacaacgcgcacgccatcctcacggacgccacaaaaaggaacatctacgacaagtacggctcgctgggtctctacgtggccgagcagtttggggaagagaacgtgaacacctacttcgtgctgtccagctggtgggccaaggccctgtttgtcttctgcggcctcctcacgtgctgctactgctgctgctgtctgtgctgctgcttcaactgctgctgcgggaagtgtaagcccaaggcgcctgaaggcgaggagacggagttctacgtgtcccccgaggatctggaggcacagctgcagtctgacgagagggaggccacagacacgccgatcgtcatacagccggcatccgccaccgagaccacccagctcacagccgactcccaccccagctaccacactgacgggttcaactaaatccaggaggagctgtggtcagaggaggagccggcgcctggccacgccaaccttagaatcatgaactgtagtcacagagatgggaaggcagcctcctgcctgccctggccttgctggggcccctcctgcctccacgcccacccagcgtcgacccttgacccacgaagtgcgtagcatgcagtatttaaagcagtgtagctacggtcttctgtttttttcccttttttaatagcatgtatggggttctgttccatgtctgtgttgtggacattccgcggcatgaccgcgtgaactgcacggtggagctgcctcagggctgtcggtcaggttggtccagtgaggggtgactgcagccggtcaggtgggcgaggagaaggggggctgcccctttcctacctgtgcttgaggggccggaggcaggtgctgcctggcagagctgtgttaccgtcttggcctcggggtctggtccacactctgtgctcccagccttgaggctgcagtaggactctgatctcacctgccagaagagaggcggggccgcgtcctcctggcgtcaccggcgtcactgtcattccttggtgtctgtgctgggcatggttggcttgggggtctgtggtttcctgggccttgtggcagggtttctcccgtgggagaatttggtgtggaaagcataggaggccccttccgaggttgacaccgtgtcctccgcggtgtttctcgcctggtcgtctcgtcgtgtggacgctgccgttctggttctcggaggtgtgtccttcgccgtgttggggttatttgtctgtgttcctgcacttttcccgggctctgagctggattgatggggccagtctcccccctcccatcttgaggtcgttctccacattccttccagcacacctgtcctttccatagccctttttggacctttagaaccacagatgataggaccagcccaatgagccacagtcagagagtagattgtgcatgtgtgagcacccagctactggggacgggggctctcccacgacccctcctcctgtgtttgccagagctcccatctgccccactcgcctttgccccgtcatcgatgattcaggcagagccagattcgttaggtccctggaggaaggactgactggaccagagggaccctctggctcaggagggttgggtccctgggaggccggcagccaggccacagaatccacacgtggaccattgtgggtccctgggaggccggcagccaggccacggaatccacacgtggaccattgtgggtcccttgggaggccagcagccagactacggaatccacatgtggaccatgggaagtcagtctcttgcgtgtcctagaccttgtgggtggcgccctgcataggggagcagggggaacgggtctgatgtccctgtgctggctgagggctcagagctgcccgcactccgtagctcatgggatgtgctgggcctgcctttggcgccatgctgcagactccagtgggcctggtttctgcagaatgtccatggtggccgctgcagagttgcagaggtccctgtagagataaagctgaggaggaggctgtgtgtgatggctctggctcggaccaaccagatgagcctcctgaagcccccttccctgcctgcctgctgacccgtggccccagctcactcattgccctcagcagccacccgaggctgtgcagaagggtaggttcaggttgaccaggaagctgccaaaagggacatggatatgaggatacatctggacgtgcttaggaacagggtgctggttgagggcccccagctgacccctactgcagatccgcatgtggaccatgagccggctgccagcactaggtcctgggcagctttgtttgtcccacttttctttgtttcttctcactaaaatgatcacgaagacctttgacaagaggagagatatgcactgtgatattaaattagaaataatttatcaaaatcagacctctcctaaaagaataagaaattcattgtttggcccatcctgaaaggtgaggtggcgagacagtggggtgcctccgtgccgcttcgtgcagcagcaagttcagcctgagatgctggctgtactcagcctttgcaatttttgtagatgtagcttaggacgtgagttatttttccgcagactggccaagagccaggttctaagcttggacctaaggtagaaagctgcccatcgggggccctagctcagccccaccaggccctctgttgggcctgcacacagctctgtggctagaacactccaaggcccttcggtacccatcagagtgggccccttgccaggtggcttttcagttacagagtccagtggaccattttgtagaaccatgcagctccctgcggaaggtggggtagggtgggaaagaggagcaggtctggaggtttgtggaacccagtcccctgcagaatctgtaaaacctaataaatcatggttgtggccattctcacggtggtgattgtgattagacgacccccgggaagcccagacactcggggcctggagttcctccccctgcctgacctagaagcagaaccgttttcagcgctctgccctgttggctttaaggctttgtcttaatttaaggaaaaagatcctcccgggttttatttctctctttcttgagtggactgtttccctataattaaaagaggtggtgagtcctggggcagcttccgcgcctccctgtccacgtgctaacagatcaggacgcccccagcacccctgcctgcttttgctggtggcagtgacgggaccccgactcctcactctcgggccgcagacaatgctgtgagcaagtgtggccatgggcacagaatgtccctttggacgccgctgctgggggctgccaggggccctctggggtcgtgctttgaggcccgtccggttcacgagggggtccgggcagcactgactgcttccgacctgcaggaggcgtaggagcggccctgcgggccctttcacggcagctgctgctgtatagatttgtctccactcagtgacgtgggatttttttgtcttccttttggctttatttttaaactgctttagatattactgctcagtgtttgtgaactttcctagttctctatgttgttagtgcagccagcacccagtggggacctactagaaaaaggaactggcatgcacacgtgcccagcaggaaaagcttcgtcttcacgtcggctgctgccatccagaagaggccctggagcctcacgccgtcgaggctgctctcaggcgttctgttccgggcgaggcttgtgctgcaaggaagggcaccagcatgcaggctgccactggagggtccgggtgctgcgggcagagttcagcgcttgtccaccctcccttagctctgactcagtgcatcctactgtggggacatctcgtgaggggacacgaaatgactgatctcaccctttcccagtattcagagctgtgaacccctgtggcgcaggactggcctgtgtctgttattttggttgtaaatcattctcctgtggaattggcaaaagctacatttttactgtccttaccagcaacagtttgcgtcgtcacatgctgtgagtgtgggctgtggtgtgtccgtgtgtgtacatatgtgtatatgtatatatcacgcagcaggagtgtcattcatgctgctgtcccctggtgaagtgacaagtacaattaaaggtggctctgaaatggcctctggtttcttgggagtcgggcagggacctgcaggaggctttcccagcaggtgcacagaaggaagcgctgagcccactgtgtgcagagggtgtgtgcccagggcactgccacggcccccaccagcattggcctctgctctgcagggtggggtgcccatcctgggggctgtgtgtcatgctcacctgacccaggtgtgtgtcccggtgtgaaatcgaggaggggactggaagcccttccctgccttgaaacatgaaagctgattttctgagcagcagatacggtcagtggcaaagctgcatctgaagggcggcctgggaaggggccctgtgctggccccgggtccgccccagaggagtccacacagcaccacctccagaaggggctgggcccggggtcctgcaggcggcaccttttggtagagtttgtttccctggaaaatggggaaaatgtttcaagccaggtgaggggggaagttaacactgaaatatgtattgtttttaaaaatcaaatgcacacgcatggaagctgcttgtccatgcactggttttgtcactggcgtcctggaatccgaccgtgttggggtgcaggcgctgtcagactccggctgatcctggctcgagcacacacatctaagggccaggctggttccgcatggtgatctccgtcttgtatgtctgaatgttggcctaaaataaagattactgttgtaaaataaatgttttcactgcggacccca

SEQ ID NO: 8681 - DNA, 674 bp, Homo sapiens
  source 1..674: mol_type = unassigned DNA
gccgctgccggtgccgcacccgcgccctctgccgccgccgccgccgccgcccggggtctccaggctgaggagtgcgtcggccgctgcccagcagcgccgcgaatcggggagcggagccgcggagccggcgggagggcgggcgggcgggcggacgggcagaatagcctaacatggcagaccagagacagcgctcactgtctacctctggggagtcattgtaccacgtccttgggttggacaagaacgcaacctcagatgacattaaaaagtcctatcggaagcttgccttgaaatatcaccccgacaagaaccccgacaacccggaggccgcggacaagtttaaggagatcaacaacgcgcacgccatcctcacggacgccacaaaaaggaacatctacgacaagtacggctcgctgggtctctacgtggccgagcagtttggggaagagaacgtgaacacctacttcgtgctgtccagctggtgggccaaggccctgtttgtcttctgcggcctcctcacgtgctgctactgctgctgctgtctgtgctgctgcttcaactgctgctgcgggaagtgtaagcccaaggcgcctgaaggcgaggagacggagttctacgtgtcccccgaggatctggaggcacagctgcagtctgacgagaggggagggcactga

SEQ ID NO: 8682 - DNA, 1372 bp, Homo sapiens
  source 1..1372: mol_type = unassigned DNA
gcagttactgatatagccaaggtgggacactactggagggagctagaagggatcagccagccatgcctccagttcaggtacttggcattgctaagctcagaacaggacttgccagtgtctagatgaaaaagaggagagatctcaagagggataaccaattggctggcaaagtaacaaatgaaaagtaacctgactctattgacctgcttaaccctgcatgggggggaaggatggaaaggagcagctgtttgctttgaaacggtggaacagttttgcagccttagaaaatggcatgtaacatacctaaccaaagacagcggactctgtcaacaacaggagaagctctatacgaaattcttggtctgcataagggagcatcaaatgaagaaattaagaaaacctacagaaaattggccctgaaacaccatccagacaagaatccagatgatccagctgctactgagaagtttaaagaaatcaacaacgcccacgcaatacttaccgacatttcaaagagaagcatatacgacaagtacggatcgctgggactctacgtggccgagcagtttggagacgaaaacgttaacacctacttcatgctgtcgagctggtgggcaaaggccctgtttgtcatcgttggcctcttgacgggctgctacttttgctgctgcctgtgctgctgctgcaactgctgctgtggacactgccggcccgagtcatcagtgccagaagaggacttctatgtgtccccagaggatctggaggagcagatcaagtctgacatggaaaaagatgtggactttccagtttttctccagcctacaaatgcaaatgagaaaacacagctaatcaaagaaggatctcgaagttattgcacagactcttgatattgagccctcagagagtccacagtccctcctctcagttcagtcttgtctccagatggtcgtaggggagcgtgtggggcataaagtgctgtgaacttttccatcttgttgttttatttttgggttaggaaaacatgattgctatataattttctcagtatgcagactttctctctgagtagaatttcttatgaaacacattcaatttgggtgaataaaggcctgaagagttattttaccctccttgcctgatgtaggacagtggaattgtacagcctttatgaacctgccctttatgtgtggcagatctgattcctaactgaccaaagtaatattccagaacaaaagccacttttcttacatttaacacaatattcatatctaccacgaacatgatcatcaaaatatatgagaacttataaagagtttttgtgtgtggagcctcttccgtgtcaatattcaataaagttatagaaatgtttcaa

SEQ ID NO: 8683 - DNA, 2008 bp, Homo sapiens
  source 1..2008: mol_type = unassigned DNA
aaaaaacgacctgcccagaccctcagcgtcgacgctgcgcacaagcgcagtcaactgctggacccggccggtgtgaagtttcacacccaaaaggatgaagggcacccacctggcttaagagaacgactcccagaaaattagccgggcgtggtggcgtgcacctgtaatctcagctactcgggaggctgaggcaggaaaatcgcttgcacccaggaggtggaggttgcagtgagccgagatcgcgccattacacttcagcctgggcaacaagagcaaaaaactccgtcaaaaaaaaaaaaaagaagaagaagttgtggagctgtctgattcctgatcctgtccgttcaggctggggccgccctggtctttcaaacccagcagtgagcttggacagacccagaggtgtttactccagatcatgtctactgtgaaggaagcagcacaccggctgtccaaaagtgagatgagcctctatgcagtgctggatcttaagaagggcgcctcacctgaagacttcaaaaaatcctacagccattccgcattgcttccccaccctccttttgagtatcacctgggtaggaaactggccttgcggtatcatcccgacaagaatccagggaatgctcaagcagcagaaatattcaaagagatcaacgcagctcatgccatactgagcgactctaagaagcggaaaatttacgaccagcatggctcattgggaatatatctgtatgatcactttggtgaagaaggcgtcagatactattttattctgaatagttgttggttcaagacacttgtcatcctgtgtactctgctcacttgttgctgtttctgttgttgctgctgtttttgctgtggagcacttaaaccaccacctgagcaggatagtgggagaaaatatcagcagaatgtccagagtcagcctccaaggtcaggagccaaatgtgattttagaagcgaggaaaatagcgaagatgatttttaagagatgaagaaggatgaggtgctgacccagtgagggtgccttctgctgcccagtcccctggacacattgaagagaggagcaagtagccctgtcctgacattgaccctgatttgacccctcttcttataaggatctcaagaatctcttcagaagcactgatgacgttgatcccagtaaggacatcacctctacccttggtaccacaactctgtatggggttgcccagctactcttcctttcagttgcagtcccaattttactccgtcagaaagcagccctcccctccctccccttatgaggtctcaggcagtggtggcagatttttcctgaagagtctttttcctgtgtctgccttgttattggaaccaatgccagctggtaggatccctgagccccttgcgatatcaccaccaagagcctgataactgagcagggtggatcctgtccctggagctgctgcacccattaattctcccttgttgcaactctgtgtaccaagaacccctagcatcagcctcattcctaagccaataacgcctgtatggagttggtttcatcttctggtgcccacggccattggcattgccagcctcattccatgccactatgagtcaactcaggaaaactgcgagtgcatttgaggcttaggggtagtcattccatctttagattatccttggacttcagctaccagcacagcatgcattagccttggtcctgtaggttaactgaagttcaaacatcagtgccagcttgcctccatccttttcacatattatgcaggccaattgacatataatttgttcttaaaaataggggcatgaaatatgtgatctggaaaagattgtactttctggactcttttcccactcttgcctctttgtgctgctgtttcgtatcctcctcacaccgtgtatttcccacccactcagggtcacagcctactaattcctcaaacttctctccctggactaggagaaaggctaaagaatgtcagtaaataaaagagctttcatccaa

SEQ ID NO: 8684 - DNA, 1904 bp, Homo sapiens
  source 1..1904: mol_type = unassigned DNA
aagcgcagtcaactgctggacccggccggtgtgaagtttcacacccaaaaggatgaagggcacccacctggcttaagagaacgactcccaggtaaagggccagacccaggaggtggaggttgcagtgagccgagatcgcgccattacacttcagcctgggcaacaagagcaaaaaactccgtcaaaaaaaaaaaaaagaagaagaagttgtggagctgtctgattcctgatcctgtccgttcaggctggggccgccctggtctttcaaacccagcagtgagcttggacagacccagaggtgtttactccagatcatgtctactgtgaaggaagcagcacaccggctgtccaaaagtgagatgagcctctatgcagtgctggatcttaagaagggcgcctcacctgaagacttcaaaaaatcctacagccattccgcattgcttccccaccctccttttgagtatcacctgggtaggaaactggccttgcggtatcatcccgacaagaatccagggaatgctcaagcagcagaaatattcaaagagatcaacgcagctcatgccatactgagcgactctaagaagcggaaaatttacgaccagcatggctcattgggaatatatctgtatgatcactttggtgaagaaggcgtcagatactattttattctgaatagttgttggttcaagacacttgtcatcctgtgtactctgctcacttgttgctgtttctgttgttgctgctgtttttgctgtggagcacttaaaccaccacctgagcaggatagtgggagaaaatatcagcagaatgtccagagtcagcctccaaggtcaggagccaaatgtgattttagaagcgaggaaaatagcgaagatgatttttaagagatgaagaaggatgaggtgctgacccagtgagggtgccttctgctgcccagtcccctggacacattgaagagaggagcaagtagccctgtcctgacattgaccctgatttgacccctcttcttataaggatctcaagaatctcttcagaagcactgatgacgttgatcccagtaaggacatcacctctacccttggtaccacaactctgtatggggttgcccagctactcttcctttcagttgcagtcccaattttactccgtcagaaagcagccctcccctccctccccttatgaggtctcaggcagtggtggcagatttttcctgaagagtctttttcctgtgtctgccttgttattggaaccaatgccagctggtaggatccctgagccccttgcgatatcaccaccaagagcctgataactgagcagggtggatcctgtccctggagctgctgcacccattaattctcccttgttgcaactctgtgtaccaagaacccctagcatcagcctcattcctaagccaataacgcctgtatggagttggtttcatcttctggtgcccacggccattggcattgccagcctcattccatgccactatgagtcaactcaggaaaactgcgagtgcatttgaggcttaggggtagtcattccatctttagattatccttggacttcagctaccagcacagcatgcattagccttggtcctgtaggttaactgaagttcaaacatcagtgccagcttgcctccatccttttcacatattatgcaggccaattgacatataatttgttcttaaaaataggggcatgaaatatgtgatctggaaaagattgtactttctggactcttttcccactcttgcctctttgtgctgctgtttcgtatcctcctcacaccgtgtatttcccacccactcagggtcacagcctactaattcctcaaacttctctccctggactaggagaaaggctaaagaatgtcagtaaataaaagagctttcatccaa

SEQ ID NO: 8685 - DNA, 3287 bp, Homo sapiens
  source 1..3287: mol_type = unassigned DNA
aaaattataaccccgcacaccgacttgcatgcaattatcatagcccgagtgctcctccgttgagagacttcgcccccgagaccgctgactgtgaatgacaaatcaaaagtcagggttgcagaatcagccggactttcctgctcatttgcagcagagggaggaagcagagaatgaaagattctgaaaataaaggagtggttattattgagtcgagaatttttgggaaaagtaacacgtggagagtcaatttttgagtggaaggagtctgaagagagggtaggaaccaacctcctactacccaccaggtgcctcatctccagacatggagcccagctatgggggaggtctctttgacatggtaaaaggaggtgcagggaggctctttagtaacctaaaggacaacttgaaagacaccctcaaagacacatcttctagagtgatacaatctgtgaccagctacacaaagggagatttagacttcacttatgttacctccagaattattgtgatgtcctttcctctggacaatgttgacataggattcaggaatcaggttgatgacattcgaagctttttggattccagacatcttgaccactacacagtatacaatctgtcacctaagtcttatcgaactgccaagtttcacagccgggtctcagaatgcagttggcccattaggcaggctcccagtctgcacaacctttttgctgtgtgtcggaatatgtataactggctactgcagaatcccaaaaatgtctgtgttgtccactgcttggatggacgggcggcatcatcaattctggttggtgctatgttcattttctgtaatctctactctactcctggcccagccattcgattgctatatgcaaagcgaccaggaattggactttcaccatcccataggagatacctgggctatatgtgtgacctactggcagacaagccctaccgccctcacttcaagcctctcacaattaagtcgatcactgtcagtccaataccctttttcaacaaacagaggaatggatgtcgcccttactgtgatgtactcattggagaaaccaaaatatattcgacttgcacagattttgaacgaatgaaagaatatcgtgtccaagatggaaaaatcttcattcccttgaacatcactgtgcaaggagacgtggttgtttccatgtatcacttgaggtcaaccattgggagccggctacaggctaaggtgaccaacacacagatattccagcttcagtttcacactggattcataccactggacacaacagttttaaagttcaccaagcctgagttagatgcatgtgatgtaccagaaaaatatcctcagctatttcaggtgacactggatgtagaactacagccccatgacaaagtaatagacttaactccaccatgggaacattactgcacaaaagatgtcaatcccagcatcctcttctcttctcaccaggaacatcaagatacgctggccttaggaggacaggctccaatagatatccctccagacaaccccaggcattacggacaaagtggtttctttgcctctctctgttggcaagatcagaaatcggagaagtcattctgtgaggaggaccacgctgccctagtgaatcaggaaagtgagcaatcagatgatgaacttctgacactttccagtccgcatggcaatgccaatggtgacaagcctcatggagtcaagaagcccagcaaaaagcagcaggagccagcagcccctccaccccctgaggatgtggaccttttgggcctggaagggtctgcaatgagtaacagcttctctccgccagcggctcctcccaccaattctgaactactgagtgacctgtttgggggtggaggtgcagctggtcccacccaggctggacagtcaggagtggaagatgtgtttcatcctagtggacctgcgtctacccagtcaacaccacgccgctctgccacctccacctctgcgtctccaaccctaagagtgggagaaggtgccacctttgacccatttggagcaccttctaaaccatcaggtcaggatttgctgggttcttttctgaacacatccagtgcttccagtgacccctttctccagccaacaagaagtccttcgcccacagtacatgcttctagtacgcctgctgtgaacattcagccagatgtttctggaggttgggactggcatgctaaaccaggaggctttggaatgggaagcaagtcagctgccaccagcccaaccggatcctcgcatggtactcccacccatcaaagcaaaccccagactctggatccttttgccgaccttgggacactaggtagttcttcctttgccagcaaacccaccacaccaactggattgggtggaggattcccgcctctcagctcgccacagaaggcgtctccccagcctatgggtggcgggtggcagcagggaggtgcctacaactggcagcagccacagcctaagcctcagcccagcatgccccactcctctccccagaaccgacccaactacaacgtgagcttctcagccatgcctgggggccagaacgaacgtgggaaaggatcaagtaatttggaagggaaacaaaaagcagctgattttgaagacctactctctggtcaaggtttcaatgctcacaaagacaaaaaggggcctcggacaatagctgagatgagaaaggaggaaatggccaaggaaatggatcctgagaaattaaagattctggaatggattgaaggcaaagaaagaaatatcagagcccttctttccacgatgcataccgtactatgggctggggagaccaagtggaaaccagttggcatggcagacctggtaacaccagagcaggtgaagaaggtgtacaggaaggctgtcctggtggtgcacccagataaagctactgggcaaccctatgaacaatacgcaaagatgattttcatggagctcaatgatgcctggtctgaatttgaaaaccaaggccaaaagcccttatattaatttatgagcttttccatctctgctgcagacctgtgctaatgcttagtgtgtgtcacaattctgaggttttcgcagatgaaccaaaaactccagtaacatgttttcagtactaaaccgttaagttactcatgaattaatttctcattgataaggaatgtggatgtttggtttctccaaagttcccaccataaaagatccaaagcatgagaggaacttctagtcagatgaccttgcagaaccaccgcattccaccctgcccttt

SEQ ID NO: 8686 - DNA, 5365 bp, Homo sapiens
  source 1..5365: mol_type = unassigned DNA
gccgagctcagcccagggcggcggcttcgcctcgcccggcgaagcttctctccggtggccgctccttcttttccctcctctttgcgtcatgtcgggcacttaatttttttttttttttaattccttcttcagccctttccaccttccatctcccttttcgcttcccaggttgattattttctcttttctccgggcttgcccatgagcctcctcgggagctaccggaaaaagaccagcaacgatggttatgaatctttgcagctggtggacagtaacggggacttaagtgcgggaagcggcggggttggcggcaagcagagagtgaacgccggggcagcggcgcggagtcccgcccgacagcctccggaccgcgccagcaccatggacagctcaggtgcctcatctccagacatggagcccagctatgggggaggtctctttgacatggtaaaaggaggtgcagggaggctctttagtaacctaaaggacaacttgaaagacaccctcaaagacacatcttctagagtgatacaatctgtgaccagctacacaaagggagatttagacttcacttatgttacctccagaattattgtgatgtcctttcctctggacaatgttgacataggattcaggaatcaggttgatgacattcgaagctttttggattccagacatcttgaccactacacagtatacaatctgtcacctaagtcttatcgaactgccaagtttcacagccgggtctcagaatgcagttggcccattaggcaggctcccagtctgcacaacctttttgctgtgtgtcggaatatgtataactggctactgcagaatcccaaaaatgtctgtgttgtccactgcttggatggacgggcggcatcatcaattctggttggtgctatgttcattttctgtaatctctactctactcctggcccagccattcgattgctatatgcaaagcgaccaggaattggactttcaccatcccataggagatacctgggctatatgtgtgacctactggcagacaagccctaccgccctcacttcaagcctctcacaattaagtcgatcactgtcagtccaataccctttttcaacaaacagaggaatggatgtcgcccttactgtgatgtactcattggagaaaccaaaatatattcgacttgcacagattttgaacgaatgaaagaatatcgtgtccaagatggaaaaatcttcattcccttgaacatcactgtgcaaggagacgtggttgtttccatgtatcacttgaggtcaaccattgggagccggctacaggctaaggtgaccaacacacagatattccagcttcagtttcacactggattcataccactggacacaacagttttaaagttcaccaagcctgagttagatgcatgtgatgtaccagaaaaatatcctcagctatttcaggtgacactggatgtagaactacagccccatgacaaagtaatagacttaactccaccatgggaacattactgcacaaaagatgtcaatcccagcatcctcttctcttctcaccaggaacatcaagatacgctggccttaggaggacaggctccaatagatatccctccagacaaccccaggcattacggacaaagtggtttctttgcctctctctgttggcaagatcagaaatcggagaagtcattctgtgaggaggaccacgctgccctagtgaatcaggaaagtgagcaatcagatgatgaacttctgacactttccagtccgcatggcaatgccaatggtgacaagcctcatggagtcaagaagcccagcaaaaagcagcaggagccagcagcccctccaccccctgaggatgtggaccttttgggcctggaagggtctgcaatgagtaacagcttctctccgccagcggctcctcccaccaattctgaactactgagtgacctgtttgggggtggaggtgcagctggtcccacccaggctggacagtcaggagtggaagatgtgtttcatcctagtggacctgcgtctacccagtcaacaccacgccgctctgccacctccacctctgcgtctccaaccctaagagtgggagaaggtgccacctttgacccatttggagcaccttctaaaccatcaggtcaggatttgctgggttcttttctgaacacatccagtgcttccagtgacccctttctccagccaacaagaagtccttcgcccacagtacatgcttctagtacgcctgctgtgaacattcagccagatgtttctggaggttgggactggcatgctaaaccaggaggctttggaatgggaagcaagtcagctgccaccagcccaaccggatcctcgcatggtactcccacccatcaaagcaaaccccagactctggatccttttgccgaccttgggacactaggtagttcttcctttgccagcaaacccaccacaccaactggattgggtggaggattcccgcctctcagctcgccacagaaggcgtctccccagcctatgggtggcgggtggcagcagggaggtgcctacaactggcagcagccacagcctaagcctcagcccagcatgccccactcctctccccagaaccgacccaactacaacgtgagcttctcagccatgcctgggggccagaacgaacgtgggaaaggatcaagtaatttggaagggaaacaaaaagcagctgattttgaagacctactctctggtcaaggtttcaatgctcacaaagacaaaaaggggcctcggacaatagctgagatgagaaaggaggaaatggccaaggaaatggatcctgagaaattaaagattctggaatggattgaaggcaaagaaagaaatatcagagcccttctttccacgatgcataccgtactatgggctggggagaccaagtggaaaccagttggcatggcagacctggtaacaccagagcaggtgaagaaggtgtacaggaaggctgtcctggtggtgcacccagataaagctactgggcaaccctatgaacaatacgcaaagatgattttcatggagctcaatgatgcctggtctgaatttgaaaaccaaggccaaaagcccttatattaatttatgagcttttccatctctgctgcagacctgtgctaatgcttagtgtgtgtcacaattctgaggttttcgcagatgaaccaaaaactccagtaacatgttttcagtactaaaccgttaagttactcatgaattaatttctcattgataaggaatgtggatgtttggtttctccaaagttcccaccataaaagatccaaagcatgagaggaacttctagtcagatgaccttgcagaaccaccgcattccaccctgccctttggggagcctactcagcattctacctggggaaatggaaaacagaggccaccacccatgaaggcataacacccatcacattgtctgagaataggattaatgagcaaaagttatgataatagagttatatgatggtttaatggtttctagatttttcttggaaagatataatttgagcagtggctttatgcagactccaagaacaaaaccaccaggtatttttttttaagtaaaaatttactaaggcctttagcataatactgtaaatgtcttttggtcaagagaactaacaaatataaaggaacttgaaatgtggggagtgataatagtccagtgattaaactacagtccagtgattaccaccaactttctgactaagctaaaaatgaatgaaaatggtggctaaagaaaatagggactctgaagatgtcgaaatctttattcctggttaggaaggtgggccgctacccttctttccctttagaaaactgtgattaattaaataaaaagtcttactactataacaactctaaacctggtttaaatgaaacatctaattttgctgtaaggcttaatgctcttcttttgtttagccaagaaaacattcttagttggaaacaggtggtaaagtagtttggcctgttcacaacttatcaggaccaatatctagtgtggactcagtgttctctaggtttgtgagcagttgtggtaagagaatggaaggcaacactgaataggagttaagggaatggcacgatcacagtgagagagctgcactcacctgcagacccagtcagatggcttgtcagtatctgctctgaggaaccaggtcccacctccccacaaggcaaatctagacccattaaattattacagtgggcttttttgttttaaaagtggttggggatccacaggaacgacattcatacagggacatttgtgaaagcaaagcaagaatgaatgctttcccgatctcagactggctggattcagatcagtgtgttggctggttctcattttaaggggtaagcagtttgctattctgtgactttagtagatctcttttgtgtgcacatatacaatgtgcattatacatatatattaaatatatccacaaagcagatgggcaaaaagattttcatgctaatcttcaaaggttcatgctcaatattgtgaaaagcttttaaaagttgttttgaaaagacaatcattttttgtttttgttttaactttcttgtggcaagctataccggaaaagcggcatgtcaaaaatactttaggttctacatagatctctttctctcttttgttttgtttgtttgtttgttaaagttcattatttattttaccttttactgacaatgtgaaactcgaagaaaatgttctctttttaaatatacagtcataaactgttcaaggtaaccataacaaactaggtgttatttattaacgtattataaaataatgtttgatccagtatgtgcttgtcttatttaaaattggaatgtgagacatgttgctgtgacctgtttttctttctcattcacatttgtagatattgtgtgaactacagtatataatgataacaattaaaaggatattctgtggatgtcacgtattttgaaatgatagaactacattagctttgtatcatgtttggataattcatcaatgttcacagtttaaaacatcattaaacattatgtaattacaatgagaaagaatcttacttaaatttggagattttcccccacatctcttttccggatacattataattctggacccctatttatctcaaaactcttaatatatgcagaccaacaggtctttgcattccttttaaataactggttgtgacaaagcttgttgttgatcagattcactgtttcatcatatttattgtaatatattttttgttttgtaaatatgttacaacaaaatgtgattggtctaaaatatttgtaatgtatattaaaaggttcaaaaata

SEQ ID NO: 8687 - DNA, 5743 bp, Homo sapiens
  source 1..5743: mol_type = unassigned DNA
cgcacaccgacttgcatgcaattatcatagcccgagtgctcctccgttgagagacttcgcccccgagaccgctgactgtgaatgacaaatcaaaagtcagggttgcagaatcagccggactttcctgctcatttgcagcagagggaggaagcagagaatgaaagattctgaaaataaaggtgcctcatctccagacatggagcccagctatgggggaggtctctttgacatggtaaaaggaggtgcagggaggctctttagtaacctaaaggacaacttgaaagacaccctcaaagacacatcttctagagtgatacaatctgtgaccagctacacaaagggagatttagacttcacttatgttacctccagaattattgtgatgtcctttcctctggacaatgttgacataggattcaggaatcaggttgatgacattcgaagctttttggattccagacatcttgaccactacacagtatacaatctgtcacctaagtcttatcgaactgccaagtttcacagccgggtctcagaatgcagttggcccattaggcaggctcccagtctgcacaacctttttgctgtgtgtcggaatatgtataactggctactgcagaatcccaaaaatgtctgtgttgtccactgcttggatggacgggcggcatcatcaattctggttggtgctatgttcattttctgtaatctctactctactcctggcccagccattcgattgctatatgcaaagcgaccaggaattggactttcaccatcccataggagatacctgggctatatgtgtgacctactggcagacaagccctaccgccctcacttcaagcctctcacaattaagtcgatcactgtcagtccaataccctttttcaacaaacagaggaatggatgtcgcccttactgtgatgtactcattggagaaaccaaaatatattcgacttgcacagattttgaacgaatgaaagaatatcgtgtccaagatggaaaaatcttcattcccttgaacatcactgtgcaaggagacgtggttgtttccatgtatcacttgaggtcaaccattgggagccggctacaggctaaggtgaccaacacacagatattccagcttcagtttcacactggattcataccactggacacaacagttttaaagttcaccaagcctgagttagatgcatgtgatgtaccagaaaaatatcctcagctatttcaggtgacactggatgtagaactacagccccatgacaaagtaatagacttaactccaccatgggaacattactgcacaaaagatgtcaatcccagcatcctcttctcttctcaccaggaacatcaagatacgctggccttaggaggacaggctccaatagatatccctccagacaaccccaggcattacggacaaagtggtttctttgcctctctctgttggcaagatcagaaatcggagaagtcattctgtgaggaggaccacgctgccctagtgaatcaggaaagtgagcaatcagatgatgaacttctgacactttccagtccgcatggcaatgccaatggtgacaagcctcatggagtcaagaagcccagcaaaaagcagcaggagccagcagcccctccaccccctgaggatgtggaccttttgggcctggaagggtctgcaatgagtaacagcttctctccgccagcggctcctcccaccaattctgaactactgagtgacctgtttgggggtggaggtgcagctggtcccacccaggctggacagtcaggagtggaagatgtgtttcatcctagtggacctgcgtctacccagtcaacaccacgccgctctgccacctccacctctgcgtctccaaccctaagagtgggagaaggtgccacctttgacccatttggagcaccttctaaaccatcaggtcaggatttgctgggttcttttctgaacacatccagtgcttccagtgacccctttctccagccaacaagaagtccttcgcccacagtacatgcttctagtacgcctgctgtgaacattcagccagatgtttctggaggttgggactggcatgctaaaccaggaggctttggaatgggaagcaagtcagctgccaccagcccaaccggatcctcgcatggtactcccacccatcaaagcaaaccccagactctggatccttttgccgaccttgggacactaggtagttcttcctttgccagcaaacccaccacaccaactggattgggtggaggattcccgcctctcagctcgccacagaaggcgtctccccagcctatgggtggcgggtggcagcagggaggtgcctacaactggcagcagccacagcctaagcctcagcccagcatgccccactcctctccccagaaccgacccaactacaacgtgagcttctcagccatgcctgggggccagaacgaacgtgggaaaggatcaagtaatttggaagggaaacaaaaagcagctgattttgaagacctactctctggtcaaggtttcaatgctcacaaagacaaaaaggggcctcggacaatagctgagatgagaaaggaggaaatggccaaggaaatggatcctgagaaattaaagattctggaatggattgaaggcaaagaaagaaatatcagagcccttctttccacgatgcataccgtactatgggctggggagaccaagtggaaaccagttggcatggcagacctggtaacaccagagcaggtgaagaaggtgtacaggaaggctgtcctggtggtgcacccagataaagctactgggcaaccctatgaacaatacgcaaagatgattttcatggagctcaatgatgcctggtctgaatttgaaaaccaaggccaaaagcccttatattaatttatgagcttttccatctctgctgcagacctgtgctaatgcttagtgtgtgtcacaattctgaggttttcgcagatgaaccaaaaactccagtaacatgttttcagtactaaaccgttaagttactcatgaattaatttctcattgataaggaatgtggatgtttggtttctccaaagttcccaccataaaagatccaaagcatgagaggaacttctagtcagatgaccttgcagaaccaccgcattccaccctgccctttggggagcctactcagcattctacctggggaaatggaaaacagaggccaccacccatgaaggcataacacccatcacattgtctgagaataggattaatgagcaaaagttatgataatagagttatatgatggtttaatggtttctagatttttcttggaaagatataatttgagcagtggctttatgcagactccaagaacaaaaccaccaggtatttttttttaagtaaaaatttactaaggcctttagcataatactgtaaatgtcttttggtcaagagaactaacaaatataaaggaacttgaaatgtggggagtgataatagtccagtgattaaactacagtccagtgattaccaccaactttctgactaagctaaaaatgaatgaaaatggtggctaaagaaaatagggactctgaagatgtcgaaatctttattcctggttaggaaggtgggccgctacccttctttccctttagaaaactgtgattaattaaataaaaagtcttactactataacaactctaaacctggtttaaatgaaacatctaattttgctgtaaggcttaatgctcttcttttgtttagccaagaaaacattcttagttggaaacaggtggtaaagtagtttggcctgttcacaacttatcaggaccaatatctagtgtggactcagtgttctctaggtttgtgagcagttgtggtaagagaatggaaggcaacactgaataggagttaagggaatggcacgatcacagtgagagagctgcactcacctgcagacccagtcagatggcttgtcagtatctgctctgaggaaccaggtcccacctccccacaaggcaaatctagacccattaaattattacagtgggcttttttgttttaaaagtggttggggatccacaggaacgacattcatacagggacatttgtgaaagcaaagcaagaatgaatgctttcccgatctcagactggctggattcagatcagtgtgttggctggttctcattttaaggggtaagcagtttgctattctgtgactttagtagatctcttttgtgtgcacatatacaatgtgcattatacatatatattaaatatatccacaaagcagatgggcaaaaagattttcatgctaatcttcaaaggttcatgctcaatattgtgaaaagcttttaaaagttgttttgaaaagacaatcattttttgtttttgttttaactttcttgtggcaagctataccggaaaagcggcatgtcaaaaatactttaggttctacatagatctctttctctcttttgttttgtttgtttgtttgttaaagttcattatttattttaccttttactgacaatgtgaaactcgaagaaaatgttctctttttaaatatacagtcataaactgttcaaggtaaccataacaaactaggtgttatttattaacgtattataaaataatgtttgatccagtatgtgcttgtcttatttaaaattggaatgtgagacatgttgctgtgacctgtttttctttctcattcacatttgtagatattgtgtgaactacagtatataatgataacaattaaaaggatattctgtggatgtcacgtattttgaaatgatagaactacattagctttgtatcatgtttggataattcatcaatgttcacagtttaaaacatcattaaacattatgtaattacaatgagaaagaatcttacttaaatttggagattttcccccacatctcttttccggatacattataattctggacccctatttatctcaaaactcttaatatatgcagaccaacaggtctttgcattccttttaaataactggttgtgacaaagcttgttgttgatcagattcactgtttcatcatatttattgtaatatattttttgttttgtaaatatgttacaacaaaatgtgattggtctaaaatatttgtaatgtatattaaaaggttcaaaaatatttgtataaatctaagttatttgggtacttgtaggaatacaatgaggagcttgaatgccaccttctgacatgatttacttttaaggaaagttatgaggagagaatacaaaaagcatgcaccaaaatgtaatctgacaggatttctggatttatacgtaatcactcctgccccaacacacacacacacacacacacacacacacacacacatgcacgcacacatgattttgattatgctacatgatatatgtttcaaaaagaattagcatagaaatcctggtctcctagccaaaaaaatcaaaggattttcaaaaaaacgaatctgtatgttgaggcaaaaggattgaacctggaagtctgggactttatcatagaaacaaagtctcagatattttagttctttggaaacaaatgctgtaattcaaaagcatttgacctgtcactgtactatctacatgtggaagaatgttcaagttgaatcctaatgccgtgaatgaaacacagtctgtgtagggaatgagcaaaaaagttgaattccaattgctttttggccttttggctaaaataaatgtagcatctaattttatcagttt

SEQ ID NO: 8688 - DNA, 3032 bp, Homo sapiens
  source 1..3032: mol_type = unassigned DNA
atttcagtgtgcgatttcaattttccgtagcaaatgtatatatagaaaaatgttaaaatagatgtatttgaataccttaaaaaatacaagaaactggaagaaagataatattgcaaagcatctacatatatcctaggccttttgtgtacaaggttatttgtgacaattgtaaggtattatgaaggcaggtaggattatctccgttttacagatagggaagctgaggcctagaggtggaaacttgcccagtgatgtaagattcatctcccggttatgccctcctggaaagcccttcccaacatattatgttgtccatagagggaaaaatgagcaaagacagatggcttaactctggtgtgtgactaagatataggaaatttatagaggaggttctatcaatgtgccgacttactttgtgttttatgttctgagaacgattaccagccatctcaaattctgtggttgtcaaagctcccctggggttgttgctggttggcccccacttgctttgagactttgatgccagggcaggttgagaggaactgacttcagctgagtttgatcttggatctgggaaagagaaatgctttgaaaatcacggcaactctgggaagtttaaaagatattaatgtatcctggagagtttgaggctttgcagaaacttattggcagagcagaatgattctgaaaaatgctacatcagtgaggggatatttgataaggtattttctgccaactcgggtattcacttagcattgtttatcctttaagatatgtatacacatacttcctctgtgagtttaccctactaacaaagttttatccccagcctcaaccttgctttgggtctccaggcccaagtttctcaccatctcttggatgattgctccagcccactctgctgccacctgggatccaacatgttcaaacccagctgtgaacttcacagagtattaaaagaaagagcctttgcttcagcagtttatgttattaagacggaggcttgggtcatgttatctctctccaccaatgtgtaaggtgaaagtcctattaggtaagagtttttggaagacccgtgttttgtgctttttgggtttcagtatagggttttttcctacagggctagagggaaagtaccccagcatttccaaccagtggggtgcaaaattatttgggtctacagctttacctattcctttcaagaacatttttgaaaaaacacatctgttaagttgaaccatgtgtaactgctgaatgctgatgtttggccgttttctacttaaaaaaataggccagcagtttgtaaattcaagctaatatatgaactttttgaaaaagttgttcttggacactaaaaggtaagacggacgccagatttccagagcaaggggaggagagacccgagcaacatcacttccctgaagacctagctcctgcgcgcggccggggactgtgactccacatgccggcgttacttacccgggcccgcgcctgactcgccacacctcattttgcggccgccgtaaagcgcggatgcgcggcgtggccacgccccttcagtgcttgtgacgcaggcgccctgggctttttgggcgcgaaaaagaagcagtcctgggttgtacccggcgcagctgggagcggctgcttcctccggggtcgtatctccgcccggcatggggctgctggacctttgcgaggaagtgttcggcaccgccgacctttaccgggtgctgggcgtgcgacgcgaggcctccgacggcgaggtccgacgaggctaccacaaggtgtccctgcaggtacacccggaccgggtgggtgagggcgacaaggaggacgccacccgccgcttccagatcctgggaaaagtctattccgttctcagtgacagagaacagagagcagtgtacgatgagcagggaacagtggacgaggactctcctgtgctcacccaagaccgagactgggaggcgtattggcggctactctttaaaaagatatctttagaggacattcaagcttttgaaaagacatacaaaggttcggaagaagagctggctgatattaagcaggcctatctggacttcaagggtgacatggatcagatcatggagtctgtgctttgcgtgcagtacacagaggaacccaggataaggaatatcattcagcaagctattgacgccggagaggtcccatcctataatgcctttgtcaaagaatcgaaacaaaagatgaatgcaaggaaaaggagggctcaggaagaggccaaagaagcagaaatgagcagaaaggagttggggcttgatgaaggcgtggatagcctgaaggcagccattcagagcagacaaaaggatcggcaaaaggaaatggacaattttctggctcagatggaagcaaagtactgcaaatcttccaaaggaggagggaaaaaatctgctctcaagaaagaaaagaaataatggaatttttctcttcaaaggtccttaggtgtaaattgatgccatcgtaggcaaggtgcaggcaggatttgaaggcaaaagtcaattcagctcttgagaaaaggtgtctttccagcctgaatttttcagattgactagaccaagcagaatctctcaacctgatcttagtatttcctagaaagcacttgacattgtgtgaggtctcacctgaaggaacttggtggtgacatttgggagggtggagggaggcagtgtccttcctgacagcacttgcctccatggatcttctgtacacagaactcttatctaggatgtggttctgttcatgctgctttctgcgatgtgcgtgtctgttagaataggctctctacccagctagaacaccttccagacacttgctggacagctatcttccacatacttcccagtttacatttggtcttaatgatcttgaatagatcctctcttcattttactcagccaggttttgtactgatgtacaggtgttaaattacttcaagcatttttgtaagaggtgtatataattcaataaaaaaggtaaaacatgatgattaa

SEQ ID NO: 8689 - DNA, 1955 bp, Homo sapiens
  source 1..1955: mol_type = unassigned DNA
cgctggccggcagcgccagcgctggaatcgcccccgcgcctgggagtggcctcgcgaggccggcgcgcgccccggggccgaggaatccgcctgcccgcccaggcgtcggccacgagagagcgggagcctcgctggtccccatttcagaggtggaggaagacctgggccgtgctctacccggccagtccccacggcgtagcgcggctcgagttctttgaccataaggggtcgagctctgggggtggccgagggagctcgcgccgcctggactgcaaagtgatccgtctggctgagtgtgtgagtgtggcccccgtcaccgtggagaccccccctgagcccggcgccactgccttccgcctggacactgctcagcgctcgcacctgctggcggccgacgcgccgtccagtgcagcctgggtgcagacgctgtgccgaaacgcctttccgaaaggcagctggactctggcgcctaccgataacccacctaagctttctgccctggagatgctggagaactccttgtacagccctacctgggaaggatcccaattctgggtaacggtgcagaggactgaggccgccgagcgctgtggcctgcatggctcctacgtgctgagggtggaggctgaaaggctgactctcctgaccgtgggggcccagagtcagatactggagccactcctgtcctggccctacactctgttgcgtcgctatggccgggacaaggtcatgttctctttcgaggccggccgccgctgcccctcaggccctggaaccttcaccttccagacggcacagggaaatgacatcttccaggcagttgagactgccatccaccggcagaaggcccagggaaaggccggacaggggcacgatgttctcagagctgactcccatgaaggggaggtggcagaggggaagttgccttccccacctggcccccaagagctcctcgacagtcccccagccctgtatgctgagcccttagactccctgcgcattgctccatgcccttcccaggactccctatactcagaccccttggacagcacgtctgctcaggcaggagagggagtacaacggaagaaacctctctattgggacttgtatgagcatgcgcagcagcagttgctgaaggccaagctgacagaccccaaagaggatcccatctatgatgaacctgagggcctggccccagtccctccccagggcctttatgatctgcctcgggagcccaaggatgcatggtggtgccaagctcgggtgaaggaggagggctatgagctcccctacaaccctgccactgatgactacgctgtgccaccccctcggagcacaaagcccctccttgctcccaagccccagggcccagccttccctgaacctggtactgcaactggcagtggcatcaaaagccacaactcagccctgtacagccaggtccagaagagcggggcctcagggagctgggactgtgggctctctagagtagggactgacaagactggggtcaagtcagagggctctacctgagaaggacggcaaggctgaggtggctaagggggaccatggggaggtggcactagggatcaaagaagatggttagaaccagcagaagccagagggtgggaggggccatgctgtgtgagaccaggggaccagagggatgggagagtcaagggaaggacaatcccaggaagtcctaagaagtggggcagatggcagggctgaggatgggctctgcatcccccaaagccatcccttccctacttccccaaatgaagggacggctgtgggaccaggtctgtggaaagtggtgcatggtcagaatgggtgcagtttgaggggcctgtgtggaggcctcagggagatgttggactgtgcctggatccttactcctgcattgttctttgccagagacctatttaaaaattttaaaattctcattaaagtca

SEQ ID NO: 8690 - DNA, 2555 bp, Homo sapiens
  source 1..2555: mol_type = unassigned DNA
ctctgggtcctccctccccgtggagctggccactgccgcgccccctccccctccctggccctcccggctcgttcaatgaagctttctcttcccgcggcatggaggccaggcctctgcggtcagggagctgacatgcaagcggcggccgggcggcggggcggccccggtggtggcgggaagcggttcaaccccagccctccctccgagtcccgggccagcggagtctaaacagcccggctcgggcggggctgggggcgggcccggccagggtaaataaagccccggaggcccgtgtgggtctctccggtgcccggggcgctttcggggtgatgtcatggctttcactctgacgtcaccttgggcatatgacgtcacgcgcagccaccacgcccagaggccagggccctcgcgccaaaaccgaggactttcggtggagccactggcgcgcccccacgacggcgggtaggggcctggggtgctgcagctcccggctaatccgggggtctccaccattccttctcgctcctctccctcaccccaccgcgacccccccagcggctgccggcgggggccggggaggggcggaaactcctccagggaacccggccccgcctcccgccccgcctcccgccgcagggccaggaagcgcggaaggaaccgccgggggccatggacggagcagtgatggaagggccgctttttttgcagagtcagcgctttgggaccaagaggtggaggaagacctgggccgtgctctacccggccagtccccacggcgtagcgcggctcgagttctttgaccataaggggtcgagctctgggggtggccgagggagctcgcgccgcctggactgcaaagtgatccgtctggctgagtgtgtgagtgtggcccccgtcaccgtggagaccccccctgagcccggcgccactgccttccgcctggacactgctcagcgctcgcacctgctggcggccgacgcgccgtccagtgcagcctgggtgcagacgctgtgccgaaacgcctttccgaaaggcagctggactctggcgcctaccgataacccacctaagctttctgccctggagatgctggagaactccttgtacagccctacctgggaaggatcccaattctgggtaacggtgcagaggactgaggccgccgagcgctgtggcctgcatggctcctacgtgctgagggtggaggctgaaaggctgactctcctgaccgtgggggcccagagtcagatactggagccactcctgtcctggccctacactctgttgcgtcgctatggccgggacaaggtcatgttctctttcgaggccggccgccgctgcccctcaggccctggaaccttcaccttccagacggcacagggaaatgacatcttccaggcagttgagactgccatccaccggcagaaggcccagggaaaggccggacaggggcacgatgttctcagagctgactcccatgaaggggaggtggcagaggggaagttgccttccccacctggcccccaagagctcctcgacagtcccccagccctgtatgctgagcccttagactccctgcgcattgctccatgcccttcccaggactccctatactcagaccccttggacagcacgtctgctcaggcaggagagggagtacaacggaagaaacctctctattgggacttgtatgagcatgcgcagcagcagttgctgaaggccaagctgacagaccccaaagaggatcccatctatgatgaacctgagggcctggccccagtccctccccagggcctttatgatctgcctcgggagcccaaggatgcatggtggtgccaagctcgggtgaaggaggagggctatgagctcccctacaaccctgccactgatgactacgctgtgccaccccctcggagcacaaagcccctccttgctcccaagccccagggcccagccttccctgaacctggtactgcaactggcagtggcatcaaaagccacaactcagccctgtacagccaggtccagaagagcggggcctcagggagctgggactgtgggctctctagagtagggactgacaagactggggtcaagtcagagggctctacctgagaaggacggcaaggctgaggtggctaagggggaccatggggaggtggcactagggatcaaagaagatggttagaaccagcagaagccagagggtgggaggggccatgctgtgtgagaccaggggaccagagggatgggagagtcaagggaaggacaatcccaggaagtcctaagaagtggggcagatggcagggctgaggatgggctctgcatcccccaaagccatcccttccctacttccccaaatgaagggacggctgtgggaccaggtctgtggaaagtggtgcatggtcagaatgggtgcagtttgaggggcctgtgtggaggcctcagggagatgttggactgtgcctggatccttactcctgcattgttctttgccagagacctatttaaaaattttaaaattctcattaaagtcagcttgggtttaagaagtt

SEQ ID NO: 8691 - DNA, 1936 bp, Homo sapiens
  source 1..1936: mol_type = unassigned DNA
ctaactcactggaaatgcaggaagcttgagtataaaactcactcagaaaaaaaaaaaaaaaagaaaaaaaagaacacacactcagaagaaaccgcagggcctatcagcctgtcgtcatcgagcagactagaatagtatagaaaaccctaggcagagaggaaatgaacttcagagaagggaaacacacggctaagaagagagaggcaagggcaggagtgaaggagagagctgaagcctggggctccgagatggtcagaggatgggagacggggcagtgaaacaaggcttcttgtatcttcagcagcagcagacgtttggaaagaaatggcgccgcttcggcgcctcactgtatggagggtcggactgcgccttggcccggctggagctgcaggagggcccggagaagcctcgtcggtgtgaggctgcccggaaggtcatccgcctcagtgactgcctgcgggtggccgaggccggcggagaggccagcagcccccgggacaccagtgccttcttcctggagaccaaggagcgcctgtacctcctggcggcccctgcagcggagcgcggcgactgggtgcaggccatctgcctcctggccttccccgggcagaggaaggagctctcggggccagagggaaagcagagccggccctgcatggaggaaaatgaattgtacagcagcgcagtcacagtcggcccccacaaggaatttgctgtgaccatgagacctacagaagccagtgagaggtgccacctgcgggggtcctataccctccgggctggggagagtgccctggagctgtggggtgggcccgagccagggacccagctgtacgactggccctacaggtttctgcggcgctttgggcgggacaaggtaaccttttcctttgaggcaggccgtcgctgcgtctctggagagggcaactttgagttcgaaacccggcaaggcaatgagatcttcttggccctggaagaggccatctctgcccagaagaatgctgcacccgctacaccccaaccgcagccagccacaatccccgcgtcgctgccccggcctgatagcccctactctcggccgcatgactcactgccgccgccttcacccaccacaccggtgcctgctccacggcctcggggccaggagggggagtatgccgtgcccttcgatgcggtggcccgttccttggggaagaacttcaggggcatcttggcagtccctcctcagctcctggccgaccctctgtacgacagcattgaggagaccctgccccctcgacctgaccacatatacgatgagcccgagggagtggctgccctgtccctctatgacagcccgcaggagccccggggtgaggcatggaggaggcaggcgacagctgacagggaccctgctggcctccagcatgtccagccagccgggcaggatttctctgcttctggctggcagccaggaactgagtatgacaatgttgtactaaagaaaggcccaaagtgacagaggcagcagagggatggtccaccgccccttggcttctgctggtgactcctcctggccactgcatcagaagaacctcctctgccccttctggagcccgaggcctggcctgtcttcgttggggctgataaattgcctctcccagggcctgctgggtgagtcaccatcccaaagcaggaagggtgccctggagagaaccaccctcctcctactctttttccacttcctcctctttctttccccagctgaggaggaacctggggcatttagggcagaggacaaaaggatgtcagcaattgcttgggctgcttggctatgcaagcctcctgcctgctgatggccacttcagggacagcctgggcccaggcacccagggggatggcggcagcttcctgcacctttcagatttcttggtggcattaaagcattttcagaaca

SEQ ID NO: 8692 - DNA, 1677 bp, Homo sapiens
  source 1..1677: mol_type = unassigned DNA
agagaagggaaacacacggctaagaagagagaggcaagggcaggagtgaaggagagagctgaagcctggggctccgagatggtcagaggatgggagacggggcagtgaaacaaggcttcttgtatcttcagcagcagcagacgtttggaaagaaatggcgccgcttcggcgcctcactgtatggagggtcggactgcgccttggcccggctggagctgcaggagggcccggagaagcctcgtcggtgtgaggctgcccggaaggtcatccgcctcagtgactgcctgcgggtggccgaggccggcggagaggccagcagcccccgggacaccagtgccttcttcctggagaccaaggagcgcctgtacctcctggcggcccctgcagcggagcgcggcgactgggtgcaggccatctgcctcctggccttcccctcggcccccacaaggaatttgctgtgaccatgagacctacagaagccagtgagaggtgccacctgcgggggtcctataccctccgggctggggagagtgccctggagctgtggggtgggcccgagccagggacccagctgtacgactggccctacaggtttctgcggcgctttgggcgggacaaggtaaccttttcctttgaggcaggccgtcgctgcgtctctggagagggcaactttgagttcgaaacccggcaaggcaatgagatcttcttggccctggaagaggccatctctgcccagaagaatgctgcacccgctacaccccaaccgcagccagccacaatccccgcgtcgctgccccggcctgatagcccctactctcggccgcatgactcactgccgccgccttcacccaccacaccggtgcctgctccacggcctcggggccaggagggggagtatgccgtgcccttcgatgcggtggcccgttccttggggaagaacttcaggggcatcttggcagtccctcctcagctcctggccgaccctctgtacgacagcattgaggagaccctgccccctcgacctgaccacatatacgatgagcccgagggagtggctgccctgtccctctatgacagcccgcaggagccccggggtgaggcatggaggaggcaggcgacagctgacagggaccctgctggcctccagcatgtccagccagccgggcaggatttctctgcttctggctggcagccaggaactgagtatgacaatgttgtactaaagaaaggcccaaagtgacagaggcagcagagggatggtccaccgccccttggcttctgctggtgactcctcctggccactgcatcagaagaacctcctctgccccttctggagcccgaggcctggcctgtcttcgttggggctgataaattgcctctcccagggcctgctgggtgagtcaccatcccaaagcaggaagggtgccctggagagaaccaccctcctcctactctttttccacttcctcctctttctttccccagctgaggaggaacctggggcatttagggcagaggacaaaaggatgtcagcaattgcttgggctgcttggctatgcaagcctcctgcctgctgatggccacttcagggacagcctgggcccaggcacccagggggatggcggcagcttcctgcacctttcagatttcttggtggcattaaagcattttcagaac

SEQ ID NO: 8693 - DNA, 2292 bp, Homo sapiens
  source 1..2292: mol_type = unassigned DNA
cccatgtggactggatgcccagcgtgagtgtataccgtgagggcctttgagctctcggacagcgtggagtggtcaagggaggcctccaggaggaagaggtggccaaccgccccaggcagcacagtggtcttgaagcggcggccctgctcctggccgtgaccatggaccctctggagacccctatcaaggatggcatcctctaccagcagcatgtcaagtttggcaagaagtgctggcggaaggtgtgggctctgctgtatgcaggaggcccatcaggcgtggcacggctggagagctgggaggtccgggatggtggcctgggagcagcgggtgacaggtcggcagggcctggccggcgaggggagcgacgggtcatccgcctggctgactgtgtgtccgtgctgccggctgacggcgagagctgcccccgggacaccggtgccttcctgctcaccaccaccgagcgaagccatctactggctgctcagcaccgccaggcctggatgggccccatctgccagctggccttcccggggacaggggaggcctcctcaggatccacagatgcccagtctcccaagaggggcctggtccccatggaggaaaactccatctactcctcctggcaggaagtgggcgagtttcccgtggtggtgcagaggactgaggccgccacccgctgccagctgaaggggccggccctgctggtgctgggcccagacgccatccagctgagggaggccaagggcacccaggccctctacagctggccctaccacttcctgcgcaagttcggctccgacaagatacttctgggaaccccaggcgtcagtctcctcatctgtaaaggagagagaaccgatgacgtatcaggcataatccttgatgagagtttgctgcgtgcctactcagtgccaggcgctgggggacacagccgtgttcaggacagccttggtcctgttctccgggagccgacattccagggggagagaagtttcctgaagacttccatgctgcgttccctcctctgctcctgctcctggcgccatcctaggagccagccacgcacgcaagcgtcatgcctccagggctctgactgcccagcccctcaccgcaactccacctcagctgcacacacccttggcacatcctgaacctcattttcatgacggacacacaatttttgctctctcctgtccaagcctcatcctctggccgccacctccttccagctcacttcctttagtgcggccagtaccgcccctgcctaggcatgtcgacctgcagggacccttttctggctcttcgaggcctctgcccaccatcccctctttgttctccatagtcccttccccctgttctctctcgtttcatcttactggtctggcaaagtccccggccttgggcgagcccagacctcctcagtgcctgcacacagctgcccacagccagagaaatccatttaagcagactgcctgcatccttcttaacagtgcaaggcaggcactccctgccacaagagaccctgttccctagtagggcagcttttctcctccccagaacctcctgtctatccccacccaatgtctcctcacaggcatattggggaaacaggtcgggctctcccaccgtatctgcaagtgtactggcatccatctgtcttcttcctacccctacagtagaaacagtgtctgtccccagctgtgctctgatcccggctcctttcacctcagagcttggaaaattgagctgtccccactctctcctgcgcccattcatcctaccagcagcttttccagccacacgcaaacatgctctgtaatttcacattttaaaccttcccttgacctcacattcctcttcggccacctctgtttctctgttcctcttcacagcaaaaactgttcaaaagagttgttgattactttcatttccactttctcacccccattctcccctcaattaactctccttcatccccatgatgccattatgtggcttttattagagtcaccaaccttattctccaaaacaaaagcaacaaggactttgacttctcagcagcactcggctctggttcttgaaacacccccgttacttgctattcctcctacctcataacaatctccttcccagcctctactgctgccttctctgagttcttcccagggtcctaggctcagatgtagtgtagctcaaccctgctacacaaagaatctcctgaaagcctgtaaaaatgtccatgcatgttctgtgagtgatctaccaagaaaataaaaaattttaaaaatc

SEQ ID NO: 8694 - DNA, 1729 bp, Homo sapiens
  source 1..1729: mol_type = unassigned DNA
aactcatgactcggggagccagactgcgatcagacgcgcgtgcccagctgaaccagctgtctctagacggagggacgggaagtggccagaaggggaagtgtgaggagttcccgtccagcctgtcatcagtctccccaggtcttgaagcggcggccctgctcctggccgtgaccatggaccctctggagacccctatcaaggatggcatcctctaccagcagcatgtcaagtttggcaagaagtgctggcggaaggtgtgggctctgctgtatgcaggaggcccatcaggcgtggcacggctggagagctgggaggtccgggatggtggcctgggagcagcgggtgacaggtcggcagggcctggccggcgaggggagcgacgggtcatccgcctggctgactgtgtgtccgtgctgccggctgacggcgagagctgcccccgggacaccggtgccttcctgctcaccaccaccgagcgaagccatctactggctgctcagcaccgccaggcctggatgggccccatctgccagctggccttcccggggacaggggaggcctcctcaggatccacagatgcccagtctcccaagaggggcctggtccccatggaggaaaactccatctactcctcctggcaggaagtgggcgagtttcccgtggtggtgcagaggactgaggccgccacccgctgccagctgaaggggccggccctgctggtgctgggcccagacgccatccagctgagggaggccaagggcacccaggccctctacagctggccctaccacttcctgcgcaagttcggctccgacaagggcgtgttctcctttgaggccggccgtcgctgccactcgggtgagggcctctttgccttcagcaccccctgtgcccctgacctgtgcagggctgtggccggggccatcgcccgccagcgggagcggctgccagagctgaccaggccccagccctgccccctgccacgggccacctctctgccctccctggacacccccggagagcttcgggagatgccaccaggacctgagccacccacgtccaggaaaatgcacctggccgagcccggaccccagagcctgccgctactgctaggcccggagcccaacgatctggcgtccgggctctacgcttcagtgtgcaagcgtgccagtgggcccccaggcaatgagcacctctatgagaacctgtgtgtgctggaggccagccccacgctgcacggtggggaacctgagccgcacgagggccccggcagccgcagccccacaaccagtcccatctaccacaacggccaggacttgagctggcccggcccggccaacgacagtaccctggaggcccagtaccggcggctgctggagctggatcaggtggagggcacaggccgccctgaccctcaggcaggtttcaaggccaagctggtgaccctgctgagtcgtgagcggaggaagggcccagccccttgtgaccggccctgaacgcccagcagagtggtggccagaggggagaggtgctccccctgggacaggagggtgggctggtgggcaaacattgggcccatgcagacacacgcctgtgtccaccctggcctgcaggaacaaggcaggccgcctgtggaggacctcagccctgccctgccctcctcatgaatagtgtgcagactcacagataataaagctcagagcagctcccggcaggggcactcacggca

SEQ ID NO: 8695 - DNA, 1884 bp, Homo sapiens
  source 1..1884: mol_type = unassigned DNA
atgtggactggatgcccagcgtgagtgtataccgtgagggcctttgagctctcggacagcgtggagtggtcaagggaggcctccaggaggaagaggtggccaaccgccccaggcagcacagtgctgtctctagacggagggacgggaagtggccagaaggggaagtgtgaggagttcccgtccagcctgtcatcagtctccccaggtcttgaagcggcggccctgctcctggccgtgaccatggaccctctggagacccctatcaaggatggcatcctctaccagcagcatgtcaagtttggcaaggggacaggggaggcctcctcaggatccacagatgcccagtctcccaagaggggcctggtccccatggaggaaaactccatctactcctcctggcaggaagtgggcgagtttcccgtggtggtgcagaggactgaggccgccacccgctgccagctgaaggggccggccctgctggtgctgggcccagacgccatccagctgagggaggccaagggcacccaggccctctacagctggccctaccacttcctgcgcaagttcggctccgacaagatacttctgggaaccccaggcgtcagtctcctcatctgtaaaggagagagaaccgatgacgtatcaggcataatccttgatgagagtttgctgcgtgcctactcagtgccaggcgctgggggacacagccgtgttcaggacagccttggtcctgttctccgggagccgacattccagggggagagaagtttcctgaagacttccatgctgcgttccctcctctgctcctgctcctggcgccatcctaggagccagccacgcacgcaagcgtcatgcctccagggctctgactgcccagcccctcaccgcaactccacctcagctgcacacacccttggcacatcctgaacctcattttcatgacggacacacaatttttgctctctcctgtccaagcctcatcctctggccgccacctccttccagctcacttcctttagtgcggccagtaccgcccctgcctaggcatgtcgacctgcagggacccttttctggctcttcgaggcctctgcccaccatcccctctttgttctccatagtcccttccccctgttctctctcgtttcatcttactggtctggcaaagtccccggccttgggcgagcccagacctcctcagtgcctgcacacagctgcccacagccagagaaatccatttaagcagactgcctgcatccttcttaacagtgcaaggcaggcactccctgccacaagagaccctgttccctagtagggcagcttttctcctccccagaacctcctgtctatccccacccaatgtctcctcacaggcatattggggaaacaggtcgggctctcccaccgtatctgcaagtgtactggcatccatctgtcttcttcctacccctacagtagaaacagtgtctgtccccagctgtgctctgatcccggctcctttcacctcagagcttggaaaattgagctgtccccactctctcctgcgcccattcatcctaccagcagcttttccagccacacgcaaacatgctctgtaatttcacattttaaaccttcccttgacctcacattcctcttcggccacctctgtttctctgttcctcttcacagcaaaaactgttcaaaagagttgttgattactttcatttccactttctcacccccattctcccctcaattaactctccttcatccccatgatgccattatgtggcttttattagagtcaccaaccttattctccaaaacaaaagcaacaaggactttgacttctcagcagcactcggctctggttcttgaaacacccccgttacttgctattcctcc

SEQ ID NO: 8696 - DNA, 545 bp, Homo sapiens
  source 1..545: mol_type = unassigned DNA
agacgcgcgtgcccagctgaaccaggtgcgtgagaaggctgccttcaggtggccgggggctccctccagtctccccaggtcttgaagcggcggccctgctcctggccgtgaccatggaccctctggagacccctatcaaggatggcatcctctaccagcagcatgtcaagtttggcaagaagtgctggcggaaggtgtgggctctgctgtatgcaggaggcccatcaggcgtggcacggctggagagctgggaggtccgggatggtggcctgggagcagcgggtgacaggtcggcagggcctggccggcgaggggagcgacgggtcatccgcctggctgactgtgtgtccgtgctgccggctgacggcgagagctgcccccgggacaccggtgccttcctgctcaccaccaccgagcgaagccatctactggctgctcagcaccgccaggcctggatgggccccatctgccagctggccttcccggggacaggggaggcctcctcaggatccacagatgcccagtctcccaagaggggcctggtc

SEQ ID NO: 8697 - DNA, 577 bp, Homo sapiens
  source 1..577: mol_type = unassigned DNA
atcagacgcgcgtgcccagctgaaccaggtgcgtgagaaggctgccttcaggtggccgggggctccctccaggtcttgaagcggcggccctgctcctggccgtgaccatggaccctctggagacccctatcaaggatggcatcctctaccagcagcatgtcaagtttggcaagaagtgctggcggaaggtgtgggctctgctgtatgcaggaggcccatcaggcgtggcacggctggagagctgggaggtccgggatggtggcctgggagcagcgggtgacaggtcggcagggcctggccggcgaggggagcgacgggtcatccgcctggctgactgtgtgtccgtgctgccggctgacggcgagagctgcccccgggacaccggtgccttcctgctcaccaccaccgagcgaagccatctactggctgctcagcaccgccaggcctggatgggccccatctgccagctggccttcccggggacaggggaggcctcctcaggatccacagatgcccagtctcccaagaggggcctggtccccatggaggaaaactccatctactcctcctggcagga

SEQ ID NO: 8698 - DNA, 603 bp, Homo sapiens
  source 1..603: mol_type = unassigned DNA
actcttcctgtcagggctgtgatgtttcagggacttctcctgaagccccttgggaggctgcttcttgcctcaggacccccacccactgcctgcctgtgccagccacctggagggagccctccattccgttgactgaggaggcagcagatgtcatagaactgccatttaggccacaagctctccctaagcctgctctgtgcccagctctgctgagctgtgaggacctagatgggccagggagatggctgcctgggaagccgtcaggcgaggggagagaaagacgcacacgcagaaacgtggacggcagtcacaagaccgctagcagatgaggcaggatctcagcatctggtgagagctgtctctagacggagggacgggaagtggccagaaggggaagtgtgaggagttcccgtccagcctgtcatcagtctccccaggtcttgaagcggcggccctgctcctggccgtgaccatggaccctctggagacccctatcaaggatggcatcctctaccagcagcatgtcaagtttggcaagaagtgctggcggaaggtgtgggctctgctgtatgcaggaggcccatcaggcgtggcacggctgga

SEQ ID NO: 8699 - DNA, 721 bp, Homo sapiens
  source 1..721: mol_type = unassigned DNA
cggggagccagactgcgatcagacgcgcgtgcccagctgaaccaggtcttgaagcggcggccctgctcctggccgtgaccatggaccctctggagacccctatcaaggatggcatcctctaccagcagcatgtcaagtttggcaagaagtgctggcggaaggtgtgggctctgctgtatgcaggaggcccatcaggcgtggcacggctggagagctgggaggtccgggatggtggcctgggagcagcgggtgacaggtcggcagggcctggccggcgaggggagcgacgggtcatccgcctggctgactgtgtgtccgtgctgccggctgacggcgagagctgcccccgggacaccggtgccttcctgctcaccaccaccgagcgaagccatctactggctgctcagcaccgccaggcctggatgggccccatctgccagctggccttcccggggacaggggaggcctcctcaggatccacagatgcccagtctcccaagaggggcctggtccccatggaggaaaactccatctactcctcctggcaggaagtgggcgagtttcccgtggtggtgcagaggactgaggccgccacccgctgccagctgaaggggccggccctgctggtgctgggcccagacgccatccagctgagggaggccaagggcacccaggccctctacagctggccctaccacttcctgcgcaagttcggctccga

SEQ ID NO: 8700 - DNA, 543 bp, Homo sapiens
  source 1..543: mol_type = unassigned DNA
ctgtcagggctgtgatgtttcagggacttctcctgaagccccttgggaggctgcttcttgcctcaggacccccacccactgcctgcctgtgccagccacctggagggagccctccattccgttgactgaggaggcagcagatgtcatagaactgccatttaggccacaagctctccctaagcctgctctgtgcccagctctgctgagctgtgaggacctagatgggccagggagatggctgcctgggaagccgtcaggcgaggggagagaaagacgcacacgcagaaacgtggacggcagtcacaagaccgctagcagatgaggcaggatctcagcatctggtgagagaggtggtgctgaatgacctgaggctgttccagaataaagctgtctctagacggagggacgggaagtggccagaaggggaagtgtgaggagttcccgtccagcctgtcatcagtctccccaggtcttgaagcggcggccctgctcctggccgtgaccatggaccctctggagacccctatcaaggatggcatcctc

SEQ ID NO: 8701 - DNA, 467 bp, Homo sapiens
  source 1..467: mol_type = unassigned DNA
atgactcggggagccagactgcgatcagacgcgcgtgcccagctgaaccaggtgcgtgagaaggctgccttcaggtggccgggggctccctccagctgtctctagacggagggacgggaagtggccagaaggggaagtgtgaggagttcccgtccagcctgtcatcagtctccccaggtcttgaagcggcggccctgctcctggccgtgaccatggaccctctggagacccctatcaaggatggcatcctctaccagcagcatgtcaagtttggcaagaagtgctggcggaaggtgtgggctctgctgtatgcaggaggcccatcaggcgtggcacggctggagagctgggaggtccgggatggtggcctgggagcagcgggtgacaggtcggcagggcctggccggcgaggggagcgacgggtcatccgcctggctgactgtgtgtccgtgctgccggctgacggc

SEQ ID NO: 8702 - DNA, 2803 bp, Homo sapiens
  source 1..2803: mol_type = unassigned DNA
gtcccagccggagccccagccggagcccgatccctagccctgcggccgcgcctccctcgccgtccccgcctggagcccggcgccgccgccgccctgccgcccccgccagccgcgccgtgacgcgggcatgagcctgctccgcggcgccgctgagcaggcgctcctggcccgggcctcggcgcccagcaggcgcggggcgaaggagctgctagaacaatgctgaggcgggtgaggtgaggagcagcccctcgcggcagccccgacagagtgtctggaacaggtgattggaggagccggagacccaggcacctgggcatccttcccctcgcctctgccaggccccgcgcccctaaaaggtgggaaaaccatggcgaccaatttcagtgacatcgtcaagcaaggctacgtgaagatgaagagcaggaagctcgggatctaccggaggtgctggctggtgttccggaaatcctccagcaaggggccccagcggctggagaagtatccagatgagaagtcggtgtgcctccggggctgccccaaggtgactgagatcagcaacgtcaagtgtgttacgcggctccccaaggagaccaagcggcaggcggtggccatcatattcactgatgactcggcacgtaccttcacctgcgactcagagctagaggcagaggagtggtacaagacactatctgtggagtgtctggggtcccgcctcaacgacatcagtctgggagaacctgacctcctggccccaggggtgcagtgtgaacagacagatcgcttcaatgtcttcctgctgccctgccccaacctggacgtgtatggcgagtgcaagctgcagatcacccacgagaacatctacctctgggacatccacaacccccgtgtgaagctcgtctcgtggcccctctgctcactgcgccgctatggccgggatgccacacgctttaccttcgaggctggccggatgtgtgatgctggggaaggactctataccttccagacacaagagggggagcagatttaccagcgcgtccacagtgccaccctggccatcgcagagcagcacaagcgggtcctgctggaaatggagaagaacgtgaggctgctgaacaagggcacggaacattactcgtatccctgcacacccacgaccatgctgccgcgcagtgcctactggcaccacatcactggttcccagaacatcgccgaagcctccagctatgctggtgaggggtatggggcagcccaggccagctcggaaacagacctcctcaacagattcatcctgctaaagccaaagcccagccagggggacagcagtgaggccaagaccccatcccagtgaccacagtgctggcgagcaccgatgactgctgggggctgcctgctgcggggctggctgcagtgtaccgtggacagcctcagggggctgtcggccaagagcctggagaaagggagcaagctgccccctccttgcccccaaggatgaggctggactgaggcaaagggctggccacaccacctgagcatgtgtgaggggttggagctaccgtgggactatatactgttaatgattttaatatatatggcttatgacatactctgtatcaatgagatcccctcaccctcaccccatccttccccaccaatacacacaaattttttaatcccatgaccaggccacggtcaaggctgtttttgagtatgagtgcagtcgtgtccatcctccatggcacagccctcctgctgccaggacctgcttgaactaccagggccacaggagggggataatcagagcttgaggctggcactctgactgctggcttttcccagacagcccaagggccggaacagcaggtggcttctcagttcctctgggcctggagtgacacaggaaggatctgcacttcctctgtgctgcttgccagccttgcagttggagttttaagcagaggtgacatctggttgacgcctcaggtgaaaatctggttttaaaatgtaacttctgcacaggctccttcctgctttgtaggctgggaagatgcccctggggtaggggtgctgattacctcagccatgtggaggaaggctggagcttgttcctgccccaggaataggccaggagggaaggccgcagcaggactgccgtggggagcacccctgctgcccccctctcactgaccaggggtggacaatgcccaagcagagggagcccccttgccctgtttggccaccctctggccagccaaaagcactctgaaaccaagaccttcccatttcctcctccccacatggtgctgaggctccctgctgcaatgcaattaaagcaattgattttctagtgctggtatttgttgactaccatgcagaagggctatctttctattcacgtcaaacttttggttgtgtggggttttttgttgttttttgggttttgttttttaatactttagggtcctgatttgtgggaacagaccttcttgtaaataaccactatttgagttgtggcaggaggatgataaagcacgcggcccctcccaaaggagcccttgagctagggaggtggtgcagtcagcctcgctctcaacgtgacccggggaatgaccacccagagggatgagctagcctgtagaggggaactggggtccaaaggtctttggggagggaggcagagctggctggctcagctaagtggcacgatgacgcatgaaggagattatgttgtgctctttattgccaaaaataaacacttttaaaaagacaacttctgttaatcaataaatatcctttcctttctgta

SEQ ID NO: 8703 - DNA, 1963 bp, Homo sapiens
  source 1..1963: mol_type = unassigned DNA
ttctcctccttctcggccgggaggaggcagggctggatccctcagccgccgccgctcctcctcctggcaggccggccgcggagtcagctgacgccggcgctccagcctcgcctccccgcgccgcgctctgcgctccccgaaagtggctgcaagccggccgcccactgtcagggttggggggacagagaaagtgatgtgcgccttctaaagcctcgcccagcgccgccgaagcagcttcacctctccaactttctcccaccgactgcttgtcttgaccctgccctccaccctccccagagccacttcgggtgcgcgctcttgggtaaagggggggtcaccggctgtctgggatggcttccaattttaatgacatagtgaagcaagggtacgtgaggatccggagcagacgcctcgggatttatcagcgatgctggttagtattcaagaaagcttcaagcaaaggtccaaaaagactggagaaattttctgatgaacgtgctgcatatttcaggtgttatcataaggttacagaactcaataatgtgaagaacgtagctcgattgccaaaaagcaccaagaaacatgccatagggatttatttcaatgacgatacctccaagacttttgcttgcgaatcagatcttgaggctgatgagtggtgcaaagtactccagatggagtgtgtaggaacacggatcaatgacatcagccttggagagcctgacttactggccactggggttgagagagaacagagtgagagattcaatgtgtatttgatgccatctcctaacttagatgtacatggcgaatgtgccttgcagattacatatgagtatatctgtctttgggacgtccagaatcccagagtcaaactcatctcttggccgctaagcgccctgcggcggtatggacgtgatactacgtggttcacttttgaggcagggaggatgtgtgagactggtgaagggctgtttatctttcagacccgagacggggaggccatctatcagaaagtccactctgctgccttggccatagccgagcagcacgagcgcttgctacagagtgtgaaaaactcgatgctccagatgaagatgagtgagcgggccgcctcgctgagcaccatggtgcccctgcctcgcagcgcctactggcagcacatcacacggcagcacagcacgggacagctctaccgcttgcaagatgtttccagccctctgaagcttcatcgaacagagacttttccagcctacagatctgagcactgacagtaactgccaagaattgttaacacacttgtgatgtgtcagccacagattcacccaggaggtcacagaatgacagcaagggaaatgacgaccaagagaagaagcttaaagtcctggctaattgtgtggtcattggaaaactctgcaatacaataattttctttattttctttttcttttttaaattcttagtgtaattgaaacgtgctctatagatattgactctgtgttccctcttttacagctggacagaaagaagtcaatgtcacgaaatgattttctattgtagatactttgtcccttgcacttctctgaatctgtccttttgtggattcttgtgattttccttccaagtgtttcagttgtatgacagtcagtattgacaataaaatggcttttaattatttgttatttgtttacaccctattcctcagttattattactgtggttctgattaactactggaaattatatttgattatatcaccaattagttaaatcagtgcttcgactcactcttatctgttctgttcaaaactatttgttcaaagaacccgttagtgttgtttacagggttacagtttctctcacatgctttcctcacccctttacccccctttttgaaagcctttattttgttcggagtctcttcataaaacatttgaaaataaaagatcattcttcacccata

SEQ ID NO: 8704 - DNA, 2562 bp, Homo sapiens
  source 1..2562: mol_type = unassigned DNA
attttgaaagtgaccctgggctggggcgccggggcgagcgcggcggcgcggaaccatgacagaagatgaccgaggcggcgctggtggagggccaggtcaagctgcgggacggcaagaagtggaagagtaggtggctggtgctgcggaagccgtcgcccgtggcagactgcctgctgatgctggtctacaaggacaagtcggagcgtatcaagggcctgcgggagcgcagcagcctgacgctagaggacatctgcgggctggagcccggcctgccctacgagggcttggtccacacgctggccattgtctgcctgtcccaggccatcatgctgggctttgacagccacgaggccatgtgtgcgtgggatgcccggatccgctatgcgctcggcgaggtgcataggttccatgtgacagtggctccaggcaccaagttggagagcggcccggctaccctgcacctctgcaatgatgtcctcgtcttggccagggacatccccccggctgtcacggggcagtggaagctgtctgacctccggcgctacggggccgtgccaagcggattcatctttgaaggcgggaccaggtgtgggtactgggctggcgtcttcttcctgtcctcggccgagggggagcagatcagcttcctgttcgactgcatcgtccgaggcatctcccccaccaagggcccctttgggctgcggccggttctaccagacccaagtcccccgggaccctcgactgtggaggagcgtgtggcccaggaagccctggaaaccctacagctggagaagcggctgagcctcctctcacatgcgggcaggccgggcagtggaggggatgaccgcagcctgtccagctcatcctcagaggccagtcacttggacgtcagcgccagcagccggctcaccgcatggccagagcaatcctcgtcgtcagccagcacgtcacaggaggggcctagaccagcagctgcccaggccgccggggaagccatggtgggtgcctcaaggccaccccccaagccgctgcgtccgcggcagctgcaggaggttggccgccagagctcctcggacagcggcatcgccactggcagccactcctcttactccagcagcctctcgtcctacgcgggcagcagcctggacgtgtggcgggccacagatgaactgggctcactgctcagcctgccagcagcgggggcccccgagcccagcctgtgcacctgcctgcccgggacagtcgagtaccaggtgcccacctccctgcgggcccactatgacacaccacgcagcctttgcctggctcctagagaccacagccccccctcacagggcagccccggcaacagtgcggccagggactcaggcggccagacgtccgccgggtgtccctctggctggctgggcacgagacggcggggcctggtgatggaggccccccagggcagcgaggccacactgcctggccctgcccctggcgagccctgggaagcaggcggcccccacgcggggccacccccggctttcttttcggcatgtccagtctgtggaggactcaaggtaaacccccctccttgagagccgcagatcccgccccgcggctgcaaaggggctgaatttgcccccagatggcagaggaagtggcgccagcctccttgcagactggtgctctgtgttctgtgggagggaccgggggtctcccggagaggggagctggagggcgcgccctgtggctgccaccggaggaaggggctgacttggggaggtgagttctggaaggcaggggctctgggtccggcaggtcggggtcaccagagccccaatgctcagctgcttcactccgtgtcccccacccctgaggatcaggtgagtgctgcacctctgttggctcgtgccttgcactggggtgccaagggctggaggccctgccgctggccttgtcctccttgggcctcacgcccccttcgggggtggccggttctccccatcacctctctggggcagtcacaccacctgttaagcatcaagctaccacagaggctccggccacctgggctccaccagcccagcccccctgggctccgtgtgcgctgggcctcatccccatctatgggaggaaactgaagctcaggaggctgtgtggcttgcggggtctctgggttctgggccccactgttccccagtgaagcccttgtgggaaggttccgggagcaggtggtgtcctcagagcagcctcgcctgctgaccccactgggagaggcgccgtgcctcgggcccctggtgggagctctgctggctcctgtctgaacctcctcgcagggccaaaggctggcttggcctgtgtttcccctggcccaggcctcagcccctgcgtcggaggtggggctgtgttgggcccattgtcccccgccctgggtggcttcctcttgcacagcctggagcctgccctgaccacagcccagcagctccctgtgaacacctctttgtcccttcactgtcagctgtttctaaacccagacactgtttgtaatagactggaaataaaatgttctttccttac

SEQ ID NO: 8705 - DNA, 1897 bp, Homo sapiens
  source 1..1897: mol_type = unassigned DNA
gagctattttgaaagtgaccctgggctggggcgccggggcgagcgcggcggcgcggaaccatgacagaagatgaccgaggcggcgctggtggagggccaggtcaagctgcgggacggcaagaagtggaagagtaggtggctggtgctgcggaagccgtcgcccgtggcagactgcctgctgatgctggtctacaaggacaagtcggagcgtatcaagggcctgcgggagcgcagcagcctgacgctagaggacatctgcgggctggagcccggcctgccctacgagggcttggtccacacgctggccattgtctgcctgtcccaggccatcatgctgggctttgacagccacgaggccatgtgtgcgtgggatgcccggatccgctatgcgctcggcgaggtgcataggttccatgtgacagtggctccaggcaccaagttggagagcggcccggctaccctgcacctctgcaatgatgtcctcgtcttggccagggacatccccccggctgtcacggggcagtggaagctgtctgacctccggcgctacggggccgtgccaagcggattcatctttgaaggcgggaccaggtgtgggtactgggctggcgtcttcttcctgtcctcggccgagggggagcagatcagcttcctgttcgactgcatcgtccgaggcatctcccccaccaagggcccctttgggctgcggccggttctaccagacccaagtcccccgggaccctcgactgtggaggagcgtgtggcccaggaagccctggaaaccctacagctggagaagcggctgagcctcctctcacatgcgggcaggccgggcagtggaggggatgaccgcagcctgtccagctcatcctcagaggccagtcacttggacgtcagcgccagcagccggctcaccgcatggccagagcaatcctcgtcgtcagccagcacgtcacaggaggggcctagaccagcagctgcccaggccgccggggaagccatggtgggtgcctcaaggccaccccccaagccgctgcgtccgcggcagctgcaggaggttggccgccagagctcctcggacagcggcatcgccactggcagccactcctcttactccagcagcctctcgtcctacgcgggcagcagcctggacgtgtggcgggccacagatgaactgggctcactgctcagcctgccagcagcgggggcccccgagcccagcctgtgcacctgcctgcccgggacagtcgagtaccaggtgcccacctccctgcgggcccactatgacacaccacgcagcctttgcctggctcctagagaccacagccccccctcacagggcagccccggcaacagtgcggccagggactcaggcggccagacgtccgccgggtgtccctctggctggctgggcacgagacggcggggcctggtgatggaggccccccagggcagcgaggccacactgcctggccctgcccctggcgagccctgggaagcaggcggcccccacgcggggccacccccggctttcttttcggcatgtccagtctgtggaggactcaagggagcggcagcctcagccccaggacctgcgacagcacattcaggatccccaggacccgtggctgtggacagcccaggaccagagaggccgcgcggcgagtcgcccacttacgtgaacatccccgtcagcccatcctccagaaagcagctgcactacatgggcctggagctccaggaggccagcgagggtgtccgaggggctggcgcctccctctacgcccagatcgacatcatggccaccgagacggcgcacagagtgggggtgcggcacgcacgggcccgggaggagcagctgtcggagctggagcagaggaaggcagccccgcagtga

SEQ ID NO: 8706 - DNA, 2551 bp, Homo sapiens
  source 1..2551: mol_type = unassigned DNA
attttgaaagtgaccctgggctggggcgccggggcgagcgcggcggcgcggaaccatgacagaagatgaccgaggcggcgctggtggagggccaggtcaagctgcgggacggcaagaagtggaagagtaggtggctggtgctgcggaagccgtcgcccgtggcagactgcctgctgatgctggtctacaaggacaagtcggagcgtatcaagggcctgcgggagcgcagcagcctgacgctagaggacatctgcgggctggagcccggcctgccctacgagggcttggtccacacgctggccattgtctgcctgtcccaggccatcatgctgggctttgacagccacgaggccatgtgtgcgtgggatgcccggatccgctatgcgctcggcgaggtgcataggttccatgtgacagtggctccaggcaccaagttggagagcggcccggctaccctgcacctctgcaatgatgtcctcgtcttggccagggacatccccccggctgtcacggggcagtggaagctgtctgacctccggcgctacggggccgtgccaagcggattcatctttgaaggcgggaccaggggctggcgtcttcttcctgtcctcggccgagggggagcagatcagcttcctgttcgactgcatcgtccgaggcatctcccccaccaagggcccctttgggctgcggccggttctaccagacccaagtcccccgggaccctcgactgtggaggagcgtgtggcccaggaagccctggaaaccctacagctggagaagcggctgagcctcctctcacatgcgggcaggccgggcagtggaggggatgaccgcagcctgtccagctcatcctcagaggccagtcacttggacgtcagcgccagcagccggctcaccgcatggccagagcaatcctcgtcgtcagccagcacgtcacaggaggggcctagaccagcagctgcccaggccgccggggaagccatggtgggtgcctcaaggccaccccccaagccgctgcgtccgcggcagctgcaggaggttggccgccagagctcctcggacagcggcatcgccactggcagccactcctcttactccagcagcctctcgtcctacgcgggcagcagcctggacgtgtggcgggccacagatgaactgggctcactgctcagcctgccagcagcgggggcccccgagcccagcctgtgcacctgcctgcccgggacagtcgagtaccaggtgcccacctccctgcgggcccactatgacacaccacgcagcctttgcctggctcctagagaccacagccccccctcacagggcagccccggcaacagtgcggccagggactcaggcggccagacgtccgccgggtgtccctctggctggctgggcacgagacggcggggcctggtgatggaggccccccagggcagcgaggccacactgcctggccctgcccctggcgagccctgggaagcaggcggcccccacgcggggccacccccggctttcttttcggcatgtccagtctgtggaggactcaaggtaaacccccctccttgagagccgcagatcccgccccgcggctgcaaaggggctgaatttgcccccagatggcagaggaagtggcgccagcctccttgcagactggtgctctgtgttctgtgggagggaccgggggtctcccggagaggggagctggagggcgcgccctgtggctgccaccggaggaaggggctgacttggggaggtgagttctggaaggcaggggctctgggtccggcaggtcggggtcaccagagccccaatgctcagctgcttcactccgtgtcccccacccctgaggatcaggtgagtgctgcacctctgttggctcgtgccttgcactggggtgccaagggctggaggccctgccgctggccttgtcctccttgggcctcacgcccccttcgggggtggccggttctccccatcacctctctggggcagtcacaccacctgttaagcatcaagctaccacagaggctccggccacctgggctccaccagcccagcccccctgggctccgtgtgcgctgggcctcatccccatctatgggaggaaactgaagctcaggaggctgtgtggcttgcggggtctctgggttctgggccccactgttccccagtgaagcccttgtgggaaggttccgggagcaggtggtgtcctcagagcagcctcgcctgctgaccccactgggagaggcgccgtgcctcgggcccctggtgggagctctgctggctcctgtctgaacctcctcgcagggccaaaggctggcttggcctgtgtttcccctggcccaggcctcagcccctgcgtcggaggtggggctgtgttgggcccattgtcccccgccctgggtggcttcctcttgcacagcctggagcctgccctgaccacagcccagcagctccctgtgaacacctctttgtcccttcactgtcagctgtttctaaacccagacactgtttgtaatagactggaaataaaatgttctttccttac

SEQ ID NO: 8707 - DNA, 2079 bp, Homo sapiens
  source 1..2079: mol_type = unassigned DNA
ccgcgccttatcgccaaagctgcggctctggacgcccagccgcggcgtatcccgatcacttccgggtagtgctccacgggcacgagccgcgattgggctaccgtagatggggtacttccggtgtgcacgtgctgggtccttcggcaggaggaggaagatggagcccagcaccgcggcccgggcttgggccctcttttggttgctgctgcccttgcttggcgcggtttgcgccagcggaccccgcaccttagtgctgctggacaacctcaacgtgcgggagactcattcgcttttcttccggagcctgaaggaccggggctttgagctcacattcaagaccgctgatgaccccagcctgtctctcataaagtatggggaattcctctatgacaatctcatcattttctccccttcggtagaagattttggaggcaacatcaacgtggagaccatcagtgcctttattgacggcggaggcagtgtgctggtagctgccagctccgacattggtgaccctcttcgagagctgggcagtgagtgcgggattgagtttgacgaggagaaaacggctgtcattgaccatcacaactatgacatctcagaccttggccagcatacgctcatcgtggctgacactgagaacctgctgaaggccccaaccatcgttgggaaatcatctctaaatcccatcctctttcgaggtgttgggatggtggccgatcctgataaccctttggtgctggacatcctgacgggctcttccacctcttactccttcttcccggacaagcctatcacccagtatccacatgcggtggggaagaacaccctcctcattgctgggctccaggccaggaacaatgcccgcgtcatcttcagcggctccctcgacttcttcagcgactccttcttcaactcagcagtgcagaaggcggcgcccggctcccagaggtattcccagacaggcaactatgaactagctgtggccctctcccgctgggtgttcaaggaggagggtgtcctccgtgtggggcctgtgtcccatcatcgggtgggcgagacagccccacccaatgcctacactgtcactgacctagtggagtatagcatcgtgatccagcagctctcaaatggcaaatgggtcccctttgatggcgatgacattcagctggagtttgtccgcattgatccttttgtgaggaccttcctgaagaagaaaggtggcaaatacagtgttcagttcaagttgcccgacgtgtatggtgtattccagtttaaagtggattacaaccggctaggctacacacacctgtactcttccactcaggtatccgtgcggccactccagcacacgcagtatgagcgcttcatcccctcggcctacccctactacgccagcgccttctccatgatgctggggctcttcatcttcagcatcgtcttcttgcacatgaaggagaaggagaagtccgactgaggggctagagccctctccgcacagcgtggagacggggcaaggaggggggttattaggattggtggttttgttttgctttgtttaaagccgtgggaaaatggcacaactttacctctgtgggagatgcaacactgagagccaaggggtgggagttgggataatttttatataaaagaagtttttccactttgaattgctaaaagtggcatttttcctatgtgcagtcactcctctcatttctaaaatagggacgtggccaggcacggtggctcatgcctgtaatcccagcactttgggaggccgaggcaggcggctcacgaggtcaggagatcgagactatcctggctaacacggtaaaaccctgtctctactaaaagtacaaaaaattagctgggcgtggtggtgggcacctgtagtcccagctactcgggaggctgaggcaggagaaaggcatgaatccaagaggcagagcttgcagtgagctgagatcacgccattgcactccagcctgggcaacagtgttaagactctgtctcaaatataaataaataaataaataaataaataaataaataaaaataaagcgagatgttgccctcaaa

SEQ ID NO: 8708 - DNA, 1589 bp, Homo sapiens
  source 1..1589: mol_type = unassigned DNA
gtagatggggtacttccggtgtgcacgtgctgggtccttcggcaggaggaggaagatggagcccagcaccgcggcccgggcttgggccctcttttggttgctgctgcccttgcttggcgcggtttgcgccagcggaccccgcaccttagtgctgctggacaacctcaacgtgcgggagactcattcgcttttcttccggagcctgaaggattttggaggcaacatcaacgtggagaccatcagtgcctttattgacggcggaggcagtgtgctggtagctgccagctccgacattggtgaccctcttcgagagctgggcagtgagtgcgggattgagtttgacgaggagaaaacggctgtcattgaccatcacaactatgacatctcagaccttggccagcatacgctcatcgtggctgacactgagaacctgctgaaggccccaaccatcgttgggaaatcatctctaaatcccatcctctttcgaggtgttgggatggtggccgatcctgataaccctttggtgctggacatcctgacgggctcttccacctcttactccttcttcccggacaagcctatcacccagtatccacatgcggtggggaagaacaccctcctcattgctgggctccaggccaggaacaatgcccgcgtcatcttcagcggctccctcgacttcttcagcgactccttcttcaactcagcagtgcagaaggcggcgcccggctcccagaggtattcccagacaggcaactatgaactagctgtggccctctcccgctgggtgttcaaggaggagggtgtcctccgtgtggggcctgtgtcccatcatcgggtgggcgagacagccccacccaatgcctacactgtcactgacctagtggagtatagcatcgtgatccagcagctctcaaatggcaaatgggtcccctttgatggcgatgacattcagctggagtttgtccgcattgatccttttgtgaggaccttcctgaagaagaaaggtggcaaatacagtgttcagttcaagttgcccgacgtgtatggtgtattccagtttaaagtggattacaaccggctaggctacacacacctgtactcttccactcaggtatccgtgcggccactccagcacacgcagtatgagcgcttcatcccctcggcctacccctactacgccagcgccttctccatgatgctggggctcttcatcttcagcatcgtcttcttgcacatgaaggagaaggagaagtccgactgaggggctagagccctctccgcacagcgtggagacggggcaaggaggggggttattaggattggtggttttgttttgctttgtttaaagccgtgggaaaatggcacaactttacctctgtgggagatgcaacactgagagccaaggggtgggagttgggataatttttatataaaagaagtttttccactttgaattgctaaaagtggcatttttcctatgtgcagtcactcctctcatttctaaaatagggacgtggccaggcacggtggctcatgcctgtaatcccagcactttgggaggccgaggcaggcggctcacgaggtca

SEQ ID NO: 8709 - DNA, 486 bp, Homo sapiens
  source 1..486: mol_type = unassigned DNA
gaactacaactcccagaaggccgcgcggaagcggaacgtgaaccagggaggacttccggacgccaacatccgggccgcgcggggaaggggagacgtggggtagaggggagcattgcttccttctctcgcagtgaccatgacgaaattagcgcagtggctttggggactagcgatcctgggctccacctgggtggccctgaccacgggagccttgggcctggagctgcccttgtcctgccaggaagtcctgtggccactgcccgcctacttgctggtgtccgccggctgctatgccctgggcactgtgggctatcgtgtggccacttttcatgactgcgaggacgccgcacgcgagctgcagagccagatacaggaggcccgagccgacttagcccgcagggggctgcgcttctgacagcctaaccccattcctgtgcggacagcccttcctcccatttcccattaaagagccagtttattttctaa

SEQ ID NO: 8710 - DNA, 517 bp, Homo sapiens
  source 1..517: mol_type = unassigned DNA
ggcccttccaccttttgtgggcactcaagttcggacctctgggatcggcgattcccctctggccagggctggttttaatgctctccgtgggcgggcttcggttgagtttggtccgcttttcctttctgctcctcaggggagcattgcttccttctctcgcagtgaccatgacgaaattagcgcagtggctttggggactagcgatcctgggctccacctgggtggccctgaccacgggagccttgggcctggagctgcccttgtcctgccaggaagtcctgtggccactgcccgcctacttgctggtgtccgccggctgctatgccctgggcactgtgggctatcgtgtggccacttttcatgactgcgaggacgccgcacgcgagctgcagagccagatacaggaggcccgagccgacttagcccgcagggggctgcgcttctgacagcctaaccccattcctgtgcggacagcccttcctcccatttcccattaaagagccagtttattttctaa

SEQ ID NO: 8711 - DNA, 409 bp, Homo sapiens
  source 1..409: mol_type = unassigned DNA
acttccggacgccaacatccgggccgcgcggggaaggggagacgtggggtagagtgaccatgacgaaattagcgcagtggctttggggactagcgatcctgggctccacctgggtggccctgaccacgggagccttgggcctggagctgcccttgtcctgccaggaagtcctgtggccactgcccgcctacttgctggtgtccgccggctgctatgccctgggcactgtgggctatcgtgtggccacttttcatgactgcgaggacgccgcacgcgagctgcagagccagatacaggaggcccgagccgacttagcccgcagggggctgcgcttctgacagcctaaccccattcctgtgcggacagcccttcctcccatttcccattaaagagccagtttattttctaa

SEQ ID NO: 8712 - DNA, 1628 bp, Homo sapiens
  source 1..1628: mol_type = unassigned DNA
gtgatgacgaaaggagcgtcaacttgtcgtccctcaggcccgtcagtgctgggaggggcggtggcgacgcacataccagcatcacctccgccaggccgggccccacgccggccgcggattggctccctccaagggcacgcacgcccggggactcgttggcggcgtggaggggcgccggtggccacgttggtgtcaacctccttcgtgaagctcacacctcccccgccccgggaggggtttgcccgccactgtcgctgaatgattgcatcatcgaaagcagaaaaccacttttgcatccttcggcctctggcgtgcctgccatgacgtcatagctctgcggaggtggaagttggggagctttgaggacctcatggatcccagggggaccaagagaggagctgagaagacagaggtagctgagcctcggaacaaactacctcgtccagcaccttctctgcccacagaccctgccctctactctgggccctttcctttctaccggcgcccttcggaactgggctgcttctccctggatgctcaacgccagtaccatggagatgcccgagccctgcgctactatagcccaccccccactaacggtccaggccccaactttgacctcagagacggatacccggatcgataccagccccgggacgaggaggtccaggaaaggctggaccacctgctgtgctggctcctggaacaccgaggccggttggaggggggtccaggctggctggcagaggccatagtgacgtggcgggggcacctgacaaaactgctgacgacaccgtatgagcggcaggagggctggcagctggcagcctcccggttccagggaacactatacctgagtgaagtggagacaccgaacgctcgggcccagaggcttgctcggccaccgctcctccgggagcttatgtacatgggatacaaatttgagcagtacatgtgtgcagacaaacctggaagctccccagacccctctggggaggttaacaccaacgtggccttctgctctgtgctacgcagccgcctgggaagccaccctctgctcttctcaggggaggtagactgcacagacccccaagccccatccacacagcccccaacctgctatgtggagctcaagacctccaaggagatgcacagccctggccaatggaggagtttctacagacacaagctcctgaaatggtgggctcagtcattcctcccaggggtcccgaatgttgttgctggcttccgtaacccagacggttttgtctcttccctcaagacctttcctaccatgaagatgtttgaatatgtcaggaatgaccgtgacggctggaatccctctgtgtgcatgaacttctgtgccgccttccttagctttgcccagagcacggttgtccaggatgaccccaggctcgttcatctcttctcttgggagcctggcggcccagtcaccgtgtctgtacaccaagatgcaccttacgccttcctgcccatatggtatgtggaagctatgactcaggacctcccatcaccccccaagactccctctcccaaatagtaatgctttagagggaggcagtcatatctctgtgtgcagataataaaagcatatttctaagaggttc

SEQ ID NO: 8713 - DNA, 1667 bp, Homo sapiens
  source 1..1667: mol_type = unassigned DNA
gatgacgaaaggagcgtcaacttgtcgtccctcaggcccgtcagtgctgggaggggcggtggcgacgcacataccagcatcacctccgccaggccgggccccacgccggccgcggattggctccctccaagggcacgcacgcccggggactcgttggcggcgtggaggggcgccggtggccacgttggtgtcaacctccttcgtgaagctcacacctcccccgccccgggaggggtttgcccgccactgtcgctgaatgattgcatcatcgaaagcagaaaaccacttttgcatccttcggcctctggcgtgcctgccatgacgtcatagctctgcggaggtggaagttggggagctttgaggcctcctctgtagaatggaaactctgtacccctgcttgtcttaggacctcatggatcccagggggaccaagagaggagctgagaagacagaggtagctgagcctcggaacaaactacctcgtccagcaccttctctgcccacagaccctgccctctactctgggccctttcctttctaccggcgcccttcggaactgggctgcttctccctggatgctcaacgccagtaccatggagatgcccgagccctgcgctactatagcccaccccccactaacggtccaggccccaactttgacctcagagacggatacccggatcgataccagccccgggacgaggaggtccaggaaaggctggaccacctgctgtgctggctcctggaacaccgaggccggttggaggggggtccaggctggctggcagaggccatagtgacgtggcgggggcacctgacaaaactgctgacgacaccgtatgagcggcaggagggctggcagctggcagcctcccggttccagggaacactatacctgagtgaagtggagacaccgaacgctcgggcccagaggcttgctcggccaccgctcctccgggagcttatgtacatgggatacaaatttgagcagtacatgtgtgcagacaaacctggaagctccccagacccctctggggaggttaacaccaacgtggccttctgctctgtgctacgcagccgcctgggaagccaccctctgctcttctcaggggaggtagactgcacagacccccaagccccatccacacagcccccaacctgctatgtggagctcaagacctccaaggagatgcacagccctggccaatggaggagtttctacagacacaagctcctgaaatggtgggctcagtcattcctcccaggggtcccgaatgttgttgctggcttccgtaacccagacggttttgtctcttccctcaagacctttcctaccatgaagatgtttgaatatgtcaggaatgaccgtgacggctggaatccctctgtgtgcatgaacttctgtgccgccttccttagctttgcccagagcacggttgtccaggatgaccccaggctcgttcatctcttctcttgggagcctggcggcccagtcaccgtgtctgtacaccaagatgcaccttacgccttcctgcccatatggtatgtggaagctatgactcaggacctcccatcaccccccaagactccctctcccaaatagtaatgctttagagggaggcagtcatatctctgtgtgcagataataaaagcatatttctaagagg

SEQ ID NO: 8714 - DNA, 1533 bp, Homo sapiens
  source 1..1533: mol_type = unassigned DNA
ggcgtgcctgccatgacgtcatagctctgcggaggtggaagttggggagctttgaggtaactggattcttgatctgagcgcagacgtccttcctaacctcactgcatttggaggacctggagggagggtgggtgaagggcaaggaaagaggcaggatgagagcttggccgcggtggcgtctgaggggcctgaatgtttcaaggccagagcctggcgatcaggtggctcgcttagtcctaaaccagtcatccttctccaggcctcctctgtagaatggaaactctgtacccctgcttgtcttaggacctcatggatcccagggggaccaagagaggagctgagaagacagaggtagctgagcctcggaacaaactacctcgtccagcaccttctctgcccacagaccctgccctctactctgggccctttcctttctaccggcgcccttcggaactgggctgcttctccctggatgctcaacgccagtaccatggagatgcccgagccctgcgctactatagcccaccccccactaacggtccaggccccaactttgacctcagagacggatacccggatcgataccagccccgggacgaggaggtccaggaaaggctggaccacctgctgtgctggctcctggaacaccgaggccggttggaggggggtccaggctggctggcagaggccatagtgacgtggcgggggcacctgacaaaactgctgacgacaccgtatgagcggcaggagggctggcagctggcagcctcccggttccagggaacactatacctgagtgaagtggagacaccgaacgctcgggcccagaggcttgctcggccaccgctcctccgggagcttatgtacatgggatacaaatttgagcagtacatgtgtgcagacaaacctggaagctccccagacccctctggggaggttaacaccaacgtggccttctgctctgtgctacgcagccgcctgggaagccaccctctgctcttctcaggggaggtagactgcacagacccccaagccccatccacacagcccccaacctgctatgtggagctcaagacctccaaggagatgcacagccctggccaatggaggagtttctacagacacaagctcctgaaatggtgggctcagtcattcctcccaggggtcccgaatgttgttgctggcttccgtaacccagacggttttgtctcttccctcaagacctttcctaccatgaagatgtttgaatatgtcaggaatgaccgtgacggctggaatccctctgtgtgcatgaacttctgtgccgccttccttagctttgcccagagcacggttgtccaggatgaccccaggctcgttcatctcttctcttgggagcctggcggcccagtcaccgtgtctgtacaccaagatgcaccttacgccttcctgcccatatggtatgtggaagctatgactcaggacctcccatcaccccccaagactccctctcccaaatagtaatgctttagagggaggcagtcatatctctgt

SEQ ID NO: 8715 - DNA, 1628 bp, Homo sapiens; identical to SEQ ID NO: 8712
  source 1..1628: mol_type = unassigned DNA

SEQ ID NO: 8716 - DNA, 1554 bp, Homo sapiens
  source 1..1554: mol_type = unassigned DNA
tgacgtcatagctctgcggaggtggaagttggggagctttgaggtaactggattcttgatctgagcgcagacgtccttcctaacctcactgcatttggaggacctggagggagggtgggtgaagggcaaggaaagaggcaggatgagagcttggccgcggtggcgtctgaggggcctgaatgtttcaaggccagagcctggcgatcaggtggctcgcttagtcctaaaccagtcatccttctccaggcctcctctgtagaatggaaactctgtacccctgcttgtcttaggacctcatggatcccagggggaccaagagaggagctgagaagacagaggtagctgagcctcggaacaaactacctcgtccagcaccttctctgcccacagaccctgccctctactctgggccctttcctttctaccggcgcccttcggaactgggctgcttctccctggatgctcaacgccagtaccatggagatgcccgagccctgcgctactatagcccaccccccactaacggtccaggccccaactttgacctcagagacggatacccggatcgataccagccccgggacgaggaggtccaggaaaggctggaccacctgctgtgctggctcctggaacaccgaggccggttggaggggggtccaggctggctggcagaggccatagtgacgtggcgggggcacctgacaaaactgctgacgacaccgtatgagcggcaggagggctggcagctggcagcctcccggttccagggaacactatacctgagtgaagtggagacaccgaacgctcgggcccagaggcttgctcggccaccgctcctccgggagcttatgtacatgggatacaaatttgagcagtacatgtgtgcagacaaacctggaagctccccagacccctctggggaggttaacaccaacgtggccttctgctctgtgctacgcagccgcctgggaagccaccctctgctcttctcaggggaggtagactgcacagacccccaagccccatccacacagcccccaacctgctatgtggagctcaagacctccaaggagatgcacagccctggccaatggaggagtttctacagacacaagctcctgaaatggtgggctcagtcattcctcccaggggtcccgaatgttgttgctggcttccgtaacccagacggttttgtctcttccctcaagacctttcctaccatgaagatgtttgaatatgtcaggaatgaccgtgacggctggaatccctctgtgtgcatgaacttctgtgccgccttccttagctttgcccagagcacggttgtccaggatgaccccaggctcgttcatctcttctcttgggagcctggcggcccagtcaccgtgtctgtacaccaagatgcaccttacgccttcctgcccatatggtatgtggaagctatgactcaggacctcccatcaccccccaagactccctctcccaaatagtaatgctttagagggaggcagtcatatctctgtgtgcagataataaaagcatatttctaagaggttc

SEQ ID NO: 8717 - DNA, 1516 bp, Homo sapiens
  source 1..1516: mol_type = unassigned DNA
tggcggcgtggaggggcgccggtggccacgttggtgtcaacctccttcgtgaagctcacacctcccccgccccgggaggggtttgcccgccactgtcgctgaatgattgcatcatcgaaagcagaaaaccacttttgcatccttcggcctctggcgtgcctgccatgacgtcatagctctgcggaggtggaagttggggagctttgaggcctcctctgtagaatggaaactctgtacccctgcttgtcttaggacctcatggatcccagggggaccaagagaggagctgagaagacagaggtagctgagcctcggaacaaactacctcgtccagcaccttctctgcccacagaccctgccctctactctgggccctttcctttctaccggcgcccttcggaactgggctgcttctccctggatgctcaacgccagtaccatggagatgcccgagccctgcgctactatagcccaccccccactaacggtccaggccccaactttgacctcagagacggatacccggatcgataccagccccgggacgaggaggtccaggaaaggctggaccacctgctgtgctggctcctggaacaccgaggccggttggaggggggtccaggctggctggcagaggccatagtgacgtggcgggggcacctgacaaaactgctgacgacaccgtatgagcggcaggagggctggcagctggcagcctcccggttccagggaacactatacctgagtgaagtggagacaccgaacgctcgggcccagaggcttgctcggccaccgctcctccgggagcttatgtacatgggatacaaatttgagcagtacatgtgtgcagacaaacctggaagctccccagacccctctggggaggttaacaccaacgtggccttctgctctgtgctacgcagccgcctgggaagccaccctctgctcttctcaggggaggtagactgcacagacccccaagccccatccacacagcccccaacctgctatgtggagctcaagacctccaaggagatgcacagccctggccaatggaggagtttctacagacacaagctcctgaaatggtgggctcagtcattcctcccaggggtcccgaatgttgttgctggcttccgtaacccagacggttttgtctcttccctcaagacctttcctaccatgaagatgtttgaatatgtcaggaatgaccgtgacggctggaatccctctgtgtgcatgaacttctgtgccgccttccttagctttgcccagagcacggttgtccaggatgaccccaggctcgttcatctcttctcttgggagcctggcggcccagtcaccgtgtctgtacaccaagatgcaccttacgccttcctgcccatatggtatgtggaagctatgactcaggacctcccatcaccccccaagactccctctcccaaatagtaatgctttagagggaggcagtcatatctctgtgtgcagataataaaagcatatttctaagaggttc

SEQ ID NO: 8718 - DNA, 1628 bp, Homo sapiens
  source 1..1628: mol_type = unassigned DNA
gtgatgacgaaaggagcgtcaacttgtcgtccctcaggcccgtcagtgctgggaggggcggtggcgacgcacataccagcatcacctccgccaggccgggccccacgccggccgcggattggctccctccaagggcacgcacgcccggggactcgttggcggcgtggaggggcgccggtggccacgttggtgtcaacctccttcgtgaagctcacacctcccccgccccgggaggggtttgcccgccactgtcgctgaatgattgcatcatcgaaagcagaaaaccacttttgcatccttcggcctctggcgtgcctgccatgacgtcatagctctgcggaggtggaagttggggagctttgaggacctcatggatcccagggggaccaagagaggagctgagaagacagaggtagctgagcctcggaacaaactacctcgtccagcaccttctctgcccacagaccctgccctctactctgggccctttcctttctaccggcgcccttcggaactgggctgcttctccctggatgctcaacgccagtaccatggagatgcccgagccctgcgctactatagcccaccccccactaacggtccaggccccaactttgacctcagagacggatacccggatcgataccagccccgggacgaggaggtccaggaaaggctggaccacctgctgtgctggctcctggaacaccgaggccggttggaggggggtccaggctggctggcagaggccatagtgacgtggcgggggcacctgacaaaactgctgacgacaccgtatgagcggcaggagggctggcagctggcagcctcccggttccagggaacactatacctgagtgaagtggagacaccgaacgctcgggcccagaggcttgctcggccaccgctcctccgggagcttatgtacatgggatacaaatttgagcagtacatgtgtgcagacaaacctggaagctccccagacccctctggggaggttaacaccaacgtggccttctgctctgtgctacgcagccgcctgggaagccaccctctgctcttctcaggggaggtagactgcacagacccccaagccccatccacacagcccccgacctgctatgtggagctcaagacctccaaggagatgcaaagccctggccaatggaggagtttctacagacacaagctcctgaaatggtgggctcagtcattcctcccaggggtcccgaatgttgttgctggcttccgtaacccagacggttttgtctcttccctcaagacctttcctaccatgaagatgtttgaatatgtcaggaatgaccgtgacggctggaatccctctgtgtgcatgaacttctgtgccgccttccttagctttgcccagagcacggttgtccaggatgaccccaggctcgttcatctcttctcttgggagcctggcggcccagtcaccgtgtctgtacaccaagatgcaccttacgccttcctgcccatatggtatgtggaagctatgactcaggacctcccatcaccccccaagactccctctcccaaatagtaatgctttagagggaggcagtcatatctctgtgtgcagataataaaagcatatttctaagaggttc

SEQ ID NO: 8719 - DNA, 1628 bp, Homo sapiens; identical to SEQ ID NO: 8712
  source 1..1628: mol_type = unassigned DNA

SEQ ID NO: 8720 - DNA, 1516 bp, Homo sapiens; identical to SEQ ID NO: 8717
  source 1..1516: mol_type = unassigned DNA

SEQ ID NO: 8721 - DNA, 1554 bp, Homo sapiens; identical to SEQ ID NO: 8716
  source 1..1554: mol_type = unassigned DNA

SEQ ID NO: 8722 - DNA, 1554 bp, Homo sapiens; identical to SEQ ID NO: 8716
  source 1..1554: mol_type = unassigned DNA

SEQ ID NO: 8723 - DNA, 1516 bp, Homo sapiens
  source 1..1516: mol_type = unassigned DNA
tggcggcgtggaggggcgccggtggccacgttggtgtcaacctccttcgtgaagctcacacctcccccgccccgggaggggtttgcccgccactgtcgctgaatgattgcatcatcgaaagcagaaaaccacttttgcatccttcggcctctggcgtgcctgccatgacgtcatagctctgcggaggtggaagttggggagctttgaggcctcctctgtagaatggaaactctgtacccctgcttgtcttaggacctcatggatcccagggggaccaagagaggagctgagaagacagaggtagctgagcctcggaacaaactacctcgtccagcaccttctctgcccacagaccctgccctctactctgggccctttcctttctaccggcgcccttcggaactgggctgcttctccctggatgctcaacgccagtaccatggagatgcccgagccctgcgctactatagcccaccccccactaacggtccaggccccaactttgacctcagagacggatacccggatcgataccagccccgggacgaggaggtccaggaaaggctggaccacctgctgtgctggctcctggaacaccgaggccggttggaggggggtccaggctggctggcagaggccatagtgacgtggcgggggcacctgacaaaactgctgacgacaccgtatgagcggcaggagggctggcagctggcagcctcccggttccagggaacactatacctgagtgaagtggagacaccgaacgctcgggcccagaggcttgctcggccaccgctcctccgggagcttatgtacatgggatacaaatttgagcagtacatgtgtgcagacaaacctggaagctccccagacccctctggggaggttaacaccaacgtggccttctgctctgtgctacgcagccgcctgggaagccaccctctgctcttctcaggggaggtagactgcacagacccccaagccccatccacacagcccccgacctgctatgtggagctcaagacctccaaggagatgcaaagccctggccaatggaggagtttctacagacacaagctcctgaaatggtgggctcagtcattcctcccaggggtcccgaatgttgttgctggcttccgtaacccagacggttttgtctcttccctcaagacctttcctaccatgaagatgtttgaatatgtcaggaatgaccgtgacggctggaatccctctgtgtgcatgaacttctgtgccgccttccttagctttgcccagagcacggttgtccaggatgaccccaggctcgttcatctcttctcttgggagcctggcggcccagtcaccgtgtctgtacaccaagatgcaccttacgccttcctgcccatatggtatgtggaagctatgactcaggacctcccatcaccccccaagactccctctcccaaatagtaatgctttagagggaggcagtcatatctctgtgtgcagataataaaagcatatttctaagaggttc

SEQ ID NO: 8724 - DNA, 1516 bp, Homo sapiens; identical to SEQ ID NO: 8717
  source 1..1516: mol_type = unassigned DNA

SEQ ID NO: 8725 - DNA, 1554 bp, Homo sapiens; identical to SEQ ID NO: 8716
  source 1..1554: mol_type = unassigned DNA

SEQ ID NO: 8726 - DNA, 1516 bp, Homo sapiens; identical to SEQ ID NO: 8717
  source 1..1516: mol_type = unassigned DNA

SEQ ID NO: 8727 - DNA, 1628 bp, Homo sapiens; identical to SEQ ID NO: 8712
  source 1..1628: mol_type = unassigned DNA

SEQ ID NO: 8728 - DNA, 1628 bp, Homo sapiens; identical to SEQ ID NO: 8712
  source 1..1628: mol_type = unassigned DNA

SEQ ID NO: 8729 - DNA, 1554 bp, Homo sapiens
  source 1..1554: mol_type = unassigned DNA
tgacgtcatagctctgcggaggtggaagttggggagctttgaggtaactggattcttgatctgagcgcagacgtccttcctaacctcactgcatttggaggacctggagggagggtgggtgaagggcaaggaaagaggcaggatgagagcttggccgcggtggcgtctgaggggcctgaatgtttcaaggccagagcctggcgatcaggtggctcgcttagtcctaaaccagtcatccttctccaggcctcctctgtagaatggaaactctgtacccctgcttgtcttaggacctcatggatcccagggggaccaagagaggagctgagaagacagaggtagctgagcctcggaacaaactacctcgtccagcaccttctctgcccacagaccctgccctctactctgggccctttcctttctaccggcgcccttcggaactgggctgcttctccctggatgctcaacgccagtaccatggagatgcccgagccctgcgctactatagcccaccccccactaacggtccaggccccaactttgacctcagagacggatacccggatcgataccagccccgggacgaggaggtccaggaaaggctggaccacctgctgtgctggctcctggaacaccgaggccggttggaggggggtccaggctggctggcagaggccatagtgacgtggcgggggcacctgacaaaactgctgacgacaccgtatgagcggcaggagggctggcagctggcagcctcccggttccagggaacactatacctgagtgaagtggagacaccgaacgctcgggcccagaggcttgctcggccaccgctcctccgggagcttatgtacatgggatacaaatttgagcagtacatgtgtgcagacaaacctggaagctccccagacccctctggggaggttaacaccaacgtggccttctgctctgtgctacgcagccgcctgggaagccaccctctgctcttctcaggggaggtagactgcacagacccccaagccccatccacacagcccccgacctgctatgtggagctcaagacctccaaggagatgcaaagccctggccaatggaggagtttctacagacacaagctcctgaaatggtgggctcagtcattcctcccaggggtcccgaatgttgttgctggcttccgtaacccagacggttttgtctcttccctcaagacctttcctaccatgaagatgtttgaatatgtcaggaatgaccgtgacggctggaatccctctgtgtgcatgaacttctgtgccgccttccttagctttgcccagagcacggttgtccaggatgaccccaggctcgttcatctcttctcttgggagcctggcggcccagtcaccgtgtctgtacaccaagatgcaccttacgccttcctgcccatatggtatgtggaagctatgactcaggacctcccatcaccccccaagactccctctcccaaatagtaatgctttagagggaggcagtcatatctctgtgtgcagataataaaagcatatttctaagaggttc

SEQ ID NO: 8730 - DNA, 1938 bp, Homo sapiens
  source 1..1938: mol_type = unassigned DNA
ggagagagagaggacagagagcaagtcactcccggctgcctttttcacctctgacagagcccagacaccatgaacgcaagtgaattccgaaggagagggaaggagatggtggattacatggccaactacatggaaggcattgagggacgccaggtctaccctgacgtggagcccgggtacctgcggccgctgatccctgccgctgcccctcaggagccagacacgtttgaggacatcatcaacgacgttgagaagataatcatgcctggggtgacgcactggcacagcccctacttcttcgcctacttccccactgccagctcgtacccggccatgcttgcggacatgctgtgcggggccattggctgcatcggcttctcctgggcggcaagcccagcatgcacagagctggagactgtgatgatggactggctcgggaagatgctggaactaccaaaggcatttttgaatgagaaagctggagaagggggaggagtgatccagggaagtgccagtgaagccaccctggtggccctgctggccgctcggaccaaagtgatccatcggctgcaggcagcgtccccagagctcacacaggccgctatcatggagaagctggtggcttactcatccgatcaggcacactcctcagtggaaagagctgggttaattggtggagtgaaattaaaagccatcccctcagatggcaacttcgccatgcgtgcgtctgccctgcaggaagccctggagagagacaaagcggctggcctgattcctttctttatggttgccaccctggggaccacaacatgctgctcctttgacaatctcttagaagtcggtcctatctgcaacaaggaagacatatggctgcacgttgatgcagcctacgcaggcagtgcattcatctgccctgagttccggcaccttctgaatggagtggagtttgcagattcattcaactttaatccccacaaatggctattggtgaattttgactgttctgccatgtgggtgaaaaagagaacagacttaacgggagcctttagactggaccccacttacctgaagcacagccatcaggattcagggcttatcactgactaccggcattggcagataccactgggcagaagatttcgctctttgaaaatgtggtttgtatttaggatgtatggagtcaaaggactgcaggcttatatccgcaagcatgtccagctgtcccatgagtttgagtcactggtgcgccaggatccccgctttgaaatctgtgtggaagtcattctggggcttgtctgctttcggctaaagggttccaacaaagtgaatgaagctcttctgcaaagaataaacagtgccaaaaaaatccacttggttccatgtcacctcagggacaagtttgtcctgcgctttgccatctgttctcgcacggtggaatctgcccatgtgcagcgggcctgggaacacatcaaagagctggcggccgacgtgctgcgagcagagagggagtaggagtgaagccagctgcaggaatcaaaaattgaagagagatatatctgaaaactggaataagaagcaaataaatatcatcctgccttcatggaactcagctgtctgtggcttcccatgtctttctccaaagttatccagagggttgtgattttgtctgcttagtatctcatcaacaaagaaatattatttgctaattaaaaagttaatcttcatggccatagcttttattcattagctgtgatttttgttgattaaaacattatagattttcatgttcttgcagtcatcagaagtggtaggaaagcctcactgatatattttccagggcaatcaatgttcacgcaacttgaaattatatctgtggtcttcaaattgtcttttgtcatgtggctaaatgcctaataaacaattcaagtgaaatactaa

SEQ ID NO: 8731 - DNA, 460 bp, Homo sapiens
  source 1..460: mol_type = unassigned DNA
gcaatccagtgtgtaggtccagggcgacaagcgctgctcccatggctggggtaagtccctccagcattcagccttgctccctgtgcttatctggatgcggtgtaggatgaagatgaccctatagaactctaccctggaagtcctggcaaagtggatatgtgacatttttgaaaccagggacatgttggtgctgcttaatatttaaatcataattttcagactcttaaaaattactaaataagtttgaagagacacagccatctgcctacagtgccacccctgagcttcacgccaccctggtctccaggaaaggggagagtctcaggaatattgaatgcagttttcacctctgacagagcccagacaccatgaacgcaagtgaattccgaaggagagggaaggagatggtggattacatggccaactacatggaaggcattgagggacgccaggtctaccc

SEQ ID NO: 8732 - DNA, 251 bp, Homo sapiens
  source 1..251: mol_type = unassigned DNA
gcactcatggcatgttctgctgcctggaaggccgctgcctctgtcccagttccatggggatctctgctctagaggggtagcttcttccttgaaaagatgctgcttaaagtcagaggatggatggctctccttggggcatttctagctctggactgtgccacaagccctggatgtgttttcacctctgacagagcccagacaccatgaacgcaagtgaattccgaaggagagggaaggagatggtggattac

SEQ ID NO: 8733 - DNA, 2041 bp, Homo sapiens
  source 1..2041: mol_type = unassigned DNA
ggcacatgtggctggaaatgcaagaagagggaaacgtgtggcttggagtttcaagaagagtgactgtctcagtgccgagtgcctcagcagcttctccacatgctcttcagtccccaaagttggagaatcccatcaaggagagtagccctgtaaggaattcgaatttccagcatttttcacctctgacagagcccagacaccatgaacgcaagtgaattccgaaggagagggaaggagatggtggattacatggccaactacatggaaggcattgagggacgccaggtctaccctgacgtggagcccgggtacctgcggccgctgatccctgccgctgcccctcaggagccagacacgtttgaggacatcatcaacgacgttgagaagataatcatgcctggggtgacgcactggcacagcccctacttcttcgcctacttccccactgccagctcgtacccggccatgcttgcggacatgctgtgcggggccattggctgcatcggcttctcctgggcggcaagcccagcatgcacagagctggagactgtgatgatggactggctcgggaagatgctggaactaccaaaggcatttttgaatgagaaagctggagaagggggaggagtgatccagggaagtgccagtgaagccaccctggtggccctgctggccgctcggaccaaagtgatccatcggctgcaggcagcgtccccagagctcacacaggccgctatcatggagaagctggtggcttactcatccgatcaggcacactcctcagtggaaagagctgggttaattggtggagtgaaattaaaagccatcccctcagatggcaacttcgccatgcgtgcgtctgccctgcaggaagccctggagagagacaaagcggctggcctgattcctttctttatggttgccaccctggggaccacaacatgctgctcctttgacaatctcttagaagtcggtcctatctgcaacaaggaagacatatggctgcacgttgatgcagcctacgcaggcagtgcattcatctgccctgagttccggcaccttctgaatggagtggagtttgcagattcattcaactttaatccccacaaatggctattggtgaattttgactgttctgccatgtgggtgaaaaagagaacagacttaacgggagcctttagactggaccccacttacctgaagcacagccatcaggattcagggcttatcactgactaccggcattggcagataccactgggcagaagatttcgctctttgaaaatgtggtttgtatttaggatgtatggagtcaaaggactgcaggcttatatccgcaagcatgtccagctgtcccatgagtttgagtcactggtgcgccaggatccccgctttgaaatctgtgtggaagtcattctggggcttgtctgctttcggctaaagggttccaacaaagtgaatgaagctcttctgcaaagaataaacagtgccaaaaaaatccacttggttccatgtcacctcagggacaagtttgtcctgcgctttgccatctgttctcgcacggtggaatctgcccatgtgcagcgggcctgggaacacatcaaagagctggcggccgacgtgctgcgagcagagagggagtaggagtgaagccagctgcaggaatcaaaaattgaagagagatatatctgaaaactggaataagaagcaaataaatatcatcctgccttcatggaactcagctgtctgtggcttcccatgtctttctccaaagttatccagagggttgtgattttgtctgcttagtatctcatcaacaaagaaatattatttgctaattaaaaagttaatcttcatggccatagcttttattcattagctgtgatttttgttgattaaaacattatagattttcatgttcttgcagtcatcagaagtggtaggaaagcctcactgatatattttccagggcaatcaatgttcacgcaacttgaaattatatctgtggtcttcaaattgtcttttgtcatgtggctaaatg

SEQ ID NO: 8734 - DNA, 1366 bp, Homo sapiens
  source 1..1366: mol_type = unassigned DNA
agagaggacagagagcaagtcactcccggctgcctttttcacctctgacagagcccagacaccatgaacgcaagtgaattccgaaggagagggaaggagatggtggattacatggccaactacatggaaggcattgagggacgccaggtctaccctgacgtggagcccgggtacctgcggccgctgatccctgccgctgcccctcaggagccagacacgtttgaggacatcatcaacgacgttgagaagataatcatgcctggggtgacgcactggcacagcccctacttcttcgcctacttccccactgccagctcgtacccggccatgcttgcggacatgctgtgcggggccattggctgcatcggcttctcctgggcggcaagcccagcatgcacagagctggagactgtgatgatggactggctcgggaagatgctggaactaccaaaggcatttttgaatgagaaagctggagaagggggaggagtgatccagggaagtgccagtgaagccaccctggtggccctgctggccgctcggaccaaagtgatccatcggctgcaggcagcgtccccagagctcacacaggccgctatcatggagaagctggtggcttactcatccgatcaggcacactcctcagtggaaagagctgggttaattggtggagtgaaattaaaagccatcccctcagatggcaacttcgccatgcgtgcgtctgccctgcaggaagccctggagagagacaaagcggctggcctgattcctttctttatggttgccaccctggggaccacaacatgctgctcctttgacaatctcttagaagtcggtcctatctgcaacaaggaagacatatggctgcacgttgatgcagcctacgcaggcagtgcattcatctgccctgagttccggcaccttctgaatggagtggagtttgcagattcattcaactttaatccccacaaatggctattggtgaattttgactgttctgccatgtggtccagacaaccagtgcgtatgttaaggctgaagaaaacctgcttagtcagtgcggtggtgagaaggagttgagcctttcgggacgtggagtgcctgccgcagagctgatgccccgaggctgccgcagacgctgcagagctgatgccagcaagttggcggctgtgcgctcatctctcccggacaactcttccccggcgctcggggttcagttcagccaccagcctgtgaggggaaatttgacaaagtggaggtgatgtagggaagagacacaggacacacagggatgaggccaggccatttggaaaaggccatttggaaaatttccttgtagaaggaattaaacgtaagccctaagaca

SEQ ID NO: 8735 - DNA, 1700 bp, Homo sapiens
  source 1..1700: mol_type = unassigned DNA
ggagagagagaggacagagagcaagtcactcccggctgcctttttcacctctgacagagcccagacaccatgaacgcaagtgaattccgaaggagagggaaggagatggtggattacatggccaactacatggaaggcattgagggacgccaggtctaccctgacgtggagcccgggtacctgcggccgctgatccctgccgctgcccctcaggagccagacacgtttgaggacatcatcaacgacgttgagaagataatcatgcctgggggaagtgccagtgaagccaccctggtggccctgctggccgctcggaccaaagtgatccatcggctgcaggcagcgtccccagagctcacacaggccgctatcatggagaagctggtggcttactcatccgatcaggcacactcctcagtggaaagagctgggttaattggtggagtgaaattaaaagccatcccctcagatggcaacttcgccatgcgtgcgtctgccctgcaggaagccctggagagagacaaagcggctggcctgattcctttctttatggttgccaccctggggaccacaacatgctgctcctttgacaatctcttagaagtcggtcctatctgcaacaaggaagacatatggctgcacgttgatgcagcctacgcaggcagtgcattcatctgccctgagttccggcaccttctgaatggagtggagtttgcagattcattcaactttaatccccacaaatggctattggtgaattttgactgttctgccatgtgggtgaaaaagagaacagacttaacgggagcctttagactggaccccacttacctgaagcacagccatcaggattcagggcttatcactgactaccggcattggcagataccactgggcagaagatttcgctctttgaaaatgtggtttgtatttaggatgtatggagtcaaaggactgcaggcttatatccgcaagcatgtccagctgtcccatgagtttgagtcactggtgcgccaggatccccgctttgaaatctgtgtggaagtcattctggggcttgtctgctttcggctaaagggttccaacaaagtgaatgaagctcttctgcaaagaataaacagtgccaaaaaaatccacttggttccatgtcacctcagggacaagtttgtcctgcgctttgccatctgttctcgcacggtggaatctgcccatgtgcagcgggcctgggaacacatcaaagagctggcggccgacgtgctgcgagcagagagggagtaggagtgaagccagctgcaggaatcaaaaattgaagagagatatatctgaaaactggaataagaagcaaataaatatcatcctgccttcatggaactcagctgtctgtggcttcccatgtctttctccaaagttatccagagggttgtgattttgtctgcttagtatctcatcaacaaagaaatattatttgctaattaaaaagttaatcttcatggccatagcttttattcattagctgtgatttttgttgattaaaacattatagattttcatgttcttgcagtcatcagaagtggtaggaaagcctcactgatatattttccagggcaatcaatgttcacgcaacttgaaattatatctgtggtcttcaaattgtcttttgtcatgtggctaaatgcctaataaacaattcaagtgaaata

SEQ ID NO: 8736 - DNA, 1620 bp, Homo sapiens
  source 1..1620: mol_type = unassigned DNA
ctgcagttttcacctctgacagagcccagacaccatgaacgcaagtgaattccgaaggagagggaaggagatggtggattacatggccaactacatggaaggcattgagggacgccaggtctaccctgacgtggagcccgggtacctgcggccgctgatccctgccgctgcccctcaggagccagacacgtttgaggacatcatcaacgacgttgagaagataatcatgcctggggtgacgcactggcacagcccctacttcttcgcctacttccccactgccagctcgtacccggccatgcttgcggacatgctgtgcggggccattggctgcatcggcttctcctgggcggcaagcccagcatgcacagagctggagactgtgatgatggactggctcgggaagatgctggaactaccaaaggcatttttgaatgagaaagctggagaagggggaggagtgatccagatggttgccaccctggggaccacaacatgctgctcctttgacaatctcttagaagtcggtcctatctgcaacaaggaagacatatggctgcacgttgatgcagcctacgcaggcagtgcattcatctgccctgagttccggcaccttctgaatggagtggagtttgcagattcattcaactttaatccccacaaatggctattggtgaattttgactgttctgccatgtgggtgaaaaagagaacagacttaacgggagcctttagactggaccccacttacctgaagcacagccatcaggattcagggcttatcactgactaccggcattggcagataccactgggcagaagatttcgctctttgaaaatgtggtttgtatttaggatgtatggagtcaaaggactgcaggcttatatccgcaagcatgtccagctgtcccatgagtttgagtcactggtgcgccaggatccccgctttgaaatctgtgtggaagtcattctggggcttgtctgctttcggctaaagggttccaacaaagtgaatgaagctcttctgcaaagaataaacagtgccaaaaaaatccacttggttccatgtcacctcagggacaagtttgtcctgcgctttgccatctgttctcgcacggtggaatctgcccatgtgcagcgggcctgggaacacatcaaagagctggcggccgacgtgctgcgagcagagagggagtaggagtgaagccagctgcaggaatcaaaaattgaagagagatatatctgaaaactggaataagaagcaaataaatatcatcctgccttcatggaactcagctgtctgtggcttcccatgtctttctccaaagttatccagagggttgtgattttgtctgcttagtatctcatcaacaaagaaatattatttgctaattaaaaagttaatcttcatggccatagcttttattcattagctgtgatttttgttgattaaaacattatagattttcatgttcttgcagtcatcagaagtggtaggaaagcctcactgatatattttccagggcaatcaatgttcacgcaacttgaaattatatctgtggtcttcaaattgtcttttgtcatgtggctaaatgcctaataaacaattcaagtgaaata

SEQ ID NO: 8737 - DNA, 2613 bp, Homo sapiens
  source 1..2613: mol_type = unassigned DNA
accccagccatgcccgccctcagtcgctgggccagcctgcccggccccagcatgcgggaggcagccttcatgtacagcacagcagtggccatcttcctggtcatcctggtggccgcactgcagggctcggctccccgtgagagccccctcccctatcacatccccctggacccggaggggtccctggagctctcatggaatgtcagctacacccaggaggccatccatttccagctcctggtgcggaggctcaaggctggcgtcctgtttgggatgtccgaccgtggcgagcttgagaacgcagatctcgtggtgctctggaccgatggggacactgcctattttgcggacggcactgtccacttggtctacgggatcctggaggagccgttccggtcactggaggccatcaacggctcgggcctgcagatggggctgcagagggtgcagctcctgaagcccaatatccccgaaccggagttgccctcagacgcgtgcaccatggaggtccaagctcccaatatccagatccccagccaggagaccacgtactggtgctacattaaggagcttccaaagggcttctctcggcaccacattatcaagtacgagcccatcgtcaccaagggcaatgaggcccttgtccaccacatggaagtcttccagtgcgcccccgagatggacagcgtcccccacttcagcgggccctgcgactccaagatgaaacccgaccgcctcaactactgccgccacgtgctggccgcctgggccctgggtgccaaggcattttactacccagaggaagccggccttgccttcgggggtccagggtcctccagatatctccgcctggaagttcactaccacaacccactggtgatagaaggacgaaacgactcctcaggcatccgcttgtactacacagccaagctgcggcgcttcaacgcggggatcatggagctgggactggtgtacacgccagtgatggccattccaccacgggagaccgccttcatcctcactggctactgcacggacaagtgcacccagctggcactgcctccctccgggatccacatcttcgcctctcagctccacacacacctgactgggagaaaggtggtcacagtgctggtccgggacggccgggagtgggagatcgtgaaccaggacaatcactacagccctcacttccaggagatccgcatgttgaagaaggtcgtgtcggtccatccgggagatgtgctcatcacctcctgcacgtacaacacagaagaccgggagctggccacagtggggggcttcgggatcctggaggagatgtgtgtcaactacgtgcactactacccccagacgcagctggagctctgcaagagcgctgtggacgccggcttcctgcagaagtacttccacctcatcaacaggttcaacaacgaggatgtctgcacctgccctcaggcgtccgtgtctcagcagttcacctctgttccctggaactccttcaaccgcgacgtactgaaggccctgtacagcttcgcgcccatctccatgcactgcaacaagtcctcagccgtccgcttccagggtgaatggaacctgcagcccctgcccaaggtcatctccacactggaagagcccaccccacagtgccccaccagccagggccgaagccctgctggccccaccgttgtcagcattggtgggggcaaaggctgaggggggacctactcctccccctcctccatgctgtccctgtgggctcacaccggcactgtgcactctactctgcgacgatccccatggaacagccctgcacgcccaggatgaaggggccagaccacgcccctgcctgagaccacggtccaatccagccttcttcccccagggtcccctgcatggctgagagggtgtgggtgccctgttgacctaccctggaccgagtggaccacgacctcgtccatttaaacccggctgactcagtgcagggacagcctgcacagtggtccagggtccagccctccgccagccctgttccgcctcactgggtgtggcctggcttctgggacaggcaccatgctgggccggggtgtggaatcaccgggaacgcccccgcccccgccccgctgctcccggtgtgcagcgggtgcgggtgccgcttaaacatttccctgctgagtggctcgtgtttcacagtgggcggcttccctgcgacggaggcaggaccaggcatttagctagttagagactcgcctgggaaattgctccattcctgagtaaacagatattttcgcccacctaaagggaagccctgacaacaactatcaccaaaagacgaggcggcaaagatccagcggggcttctgggcgccggttccacgtggggtggaattattagcaccagcttgcttctctgccggtggggccagcgctgaacagaccggggtggagtcagggctgtgctttccgcgtggttctgccacttagggagtgtgccttgggcgggccatttcacattcctgaccctcacttttctcatctgtaaaaccaggctgatgccgtgcgggctaatgagccaataaagctcacacttgggctggcacccactggaggtggg

SEQ ID NO: 8738 - DNA, 2763 bp, Homo sapiens
  source 1..2763: mol_type = unassigned DNA
ctcaccccagccatgcccgccctcagtcgctgggccagcctgcccggccccagcatgcgggaggcagccttcatgtacagcacagcagtggccatcttcctggtcatcctggtggccgcactgcagggctcggctccccgtgagagccccctcccctatcacatccccctggacccggaggggtccctggagctctcatggaatgtcagctacacccaggaggccatccatttccagctcctggtgcggaggctcaaggctggcgtcctgtttgggatgtccgaccgtggcgagcttgagaacgcagatctcgtggtgctctggaccgatggggacactgcctattttgcggacgcctggagtgaccagaaggggcagatccacctggatccccagcaggactaccagctgctgcaggtgcagaggaccccagaaggcctgaccctgcttttcaagaggccctttggcacctgcgaccccaaggattacctcattgaagacggcactgtccacttggtctacgggatcctggaggagccgttccggtcactggaggccatcaacggctcgggcctgcagatggggctgcagagggtgcagctcctgaagcccaatatccccgaaccggagttgccctcagacgcgtgcaccatggaggtccaagctcccaatatccagatccccagccaggagaccacgtactggtgctacattaaggagcttccaaagggcttctctcggcaccacattatcaagtacgagcccatcgtcaccaagggcaatgaggcccttgtccaccacatggaagtcttccagtgcgcccccgagatggacagcgtcccccacttcagcgggccctgcgactccaagatgaaacccgaccgcctcaactactgccgccacgtgctggccgcctgggccctgggtgccaaggcattttactacccagaggaagccggccttgccttcgggggtccagggtcctccagatatctccgcctggaagttcactaccacaacccactggtgatagaaggacgaaacgactcctcaggcatccgcttgtactacacagccaagctgcggcgcttcaacgcggggatcatggagctgggactggtgtacacgccagtgatggccattccaccacgggagaccgccttcatcctcactggctactgcacggacaagtgcacccagctggcactgcctccctccgggatccacatcttcgcctctcagctccacacacacctgactgggagaaaggtggtcacagtgctggtccgggacggccgggagtgggagatcgtgaaccaggacaatcactacagccctcacttccaggagatccgcatgttgaagaaggtcgtgtcggtccatccgggagatgtgctcatcacctcctgcacgtacaacacagaagaccgggagctggccacagtggggggcttcgggatcctggaggagatgtgtgtcaactacgtgcactactacccccagacgcagctggagctctgcaagagcgctgtggacgccggcttcctgcagaagtacttccacctcatcaacaggttcaacaacgaggatgtctgcacctgccctcaggcgtccgtgtctcagcagttcacctctgttccctggaactccttcaaccgcgacgtactgaaggccctgtacagcttcgcgcccatctccatgcactgcaacaagtcctcagccgtccgcttccagggtgaatggaacctgcagcccctgcccaaggtcatctccacactggaagagcccaccccacagtgccccaccagccagggccgaagccctgctggccccaccgttgtcagcattggtgggggcaaaggctgaggggggacctactcctccccctcctccatgctgtccctgtgggctcacaccggcactgtgcactctactctgcgacgatccccatggaacagccctgcacgcccaggatgaaggggccagaccacgcccctgcctgagaccacggtccaatccagccttcttcccccagggtcccctgcatggctgagagggtgtgggtgccctgttgacctaccctggaccgagtggaccacgacctcgtccatttaaacccggctgactcagtgcagggacagcctgcacagtggtccagggtccagccctccgccagccctgttccgcctcactgggtgtggcctggcttctgggacaggcaccatgctgggccggggtgtggaatcaccgggaacgcccccgcccccgccccgctgctcccggtgtgcagcgggtgcgggtgccgcttaaacatttccctgctgagtggctcgtgtttcacagtgggcggcttccctgcgacggaggcaggaccaggcatttagctagttagagactcgcctgggaaattgctccattcctgagtaaacagatattttcgcccacctaaagggaagccctgacaacaactatcaccaaaagacgaggcggcaaagatccagcggggcttctgggcgccggttccacgtggggtggaattattagcaccagcttgcttctctgccggtggggccagcgctgaacagaccggggtggagtcagggctgtgctttccgcgtggttctgccacttagggagtgtgccttgggcgggccatttcacattcctgaccctcacttttctcatctgtaaaaccaggctgatgccgtgcgggctaatgagccaataaagctcacacttgggctggcacccactggaggtggg

SEQ ID NO: 8739 - DNA, 2342 bp, Homo sapiens
  source 1..2342: mol_type = unassigned DNA
gaattcaggggctttctggtgcccaagacagtgacctgcagcaagggagtcagaagacagatgtagaaatcaagagtgaccatccacgggattgacttggattgccactcaagcggtcctctcatggaatgttggtgaggccctctgccagggaagcaatctggctgtgcaaagtgctgcctggtggggaggactcctggaaatctgactgacccctattccctgcttgggaacttgaggggtgtcagagcccctgatgtgctttctcttaggaagatgaggactctgaacacctctgccatggacgggactgggctggtggtggagagggacttctctgttcgtatcctcactgcctgtttcctgtcgctgctcatcctgtccacgctcctggggaacacgctggtctgtgctgccgttatcaggttccgacacctgcggtccaaggtgaccaacttctttgtcatctccttggctgtgtcagatctcttggtggccgtcctggtcatgccctggaaggcagtggctgagattgctggcttctggccctttgggtccttctgtaacatctgggtggcctttgacatcatgtgctccactgcatccatcctcaacctctgtgtgatcagcgtggacaggtattgggctatctccagccctttccggtatgagagaaagatgacccccaaggcagccttcatcctgatcagtgtggcatggaccttgtctgtactcatctccttcatcccagtgcagctcagctggcacaaggcaaaacccacaagcccctctgatggaaatgccacttccctggctgagaccatagacaactgtgactccagcctcagcaggacatatgccatctcatcctctgtaataagcttttacatccctgtggccatcatgattgtcacctacaccaggatctacaggattgctcagaaacaaatacggcgcattgcggccttggagagggcagcagtccacgccaagaattgccagaccaccacaggtaatggaaagcctgtcgaatgttctcaaccggaaagttcttttaagatgtccttcaaaagagaaactaaagtcctgaagactctgtcggtgatcatgggtgtgtttgtgtgctgttggctacctttcttcatcttgaactgcattttgcccttctgtgggtctggggagacgcagcccttctgcattgattccaacacctttgacgtgtttgtgtggtttgggtgggctaattcatccttgaaccccatcatttatgcctttaatgctgattttcggaaggcattttcaaccctcttaggatgctacagactttgccctgcgacgaataatgccatagagacggtgagtatcaataacaatggggccgcgatgttttccagccatcatgagccacgaggctccatctccaaggagtgcaatctggtttacctgatcccacatgctgtgggctcctctgaggacctgaaaaaggaggaggcagctggcatcgccagacccttggagaagctgtccccagccctatcagtcatattggactatgacactgacgtctctctggagaagatccaacccatcacacaaaacggtcagcacccaacctgaactcgcagatgaatcctgccacacatgctcatcccaaaagctagaggagattgctctggggcttgctattaagaaactaaggtacggtgagactctgaggtgtcaggagagccctctgctgctttccaacacacaattaactccgtttccaaatacattccagtgtattttctgtgttgttcatagtcaatcaaacagggacactacaaacatggggagccataagggacatgtctttggcttcagaattgtttttagaaatttattcttatcttaggatttaccaaatagggcaaagaatcaacagtgaacagcttcacttaaaatcaaatttttctgggaagaaaatgagatgggttgagtttgctgtatacaaacaggtgctaacactgttcccagcaaagttttcagattgtaaaggtaggtgcatgccttcataaattatttctaaaacattaattgaggcttacagtaggagtgagaaatttttttccagaattgagagatgttttgttgatattggttctatttatttattgtatatatggatatttttaatttatgatataataaatatatatttatcatatttaataggataaattaatgagttttatccaagaccttacaaccacatttctggccatttaactagcactttataagccaatgaagcaaacacacagactctgtgagattctaaatgttcatgtgtaacttctaga

SEQ ID NO: 8740 - DNA, 3373 bp, Homo sapiens
  source 1..3373: mol_type = unassigned DNA
ggctcgctgcctcgcattgccacaggctcctgagaggtcgcgggcagtgcctgcggggaggcgcggggccctgctctgtagggctgaaggccgcccgaggttcgccaaggctctgggctctcgaaaggaagccaagaaaagaagctgcccaggtgaccagtcctgggagtgctctctcccaaggaagctccgagcgcccaggagcccttagccggggtctagtgccctttgaacaatctccagctcttcaaggaagtgggctgccgccgcctctcttgggacctggcctgggatcctttccccaaacgcaccccggcgatttttgcgcaccgggagccgaacccctgctgcgcgcagctggctgggctcaggcgcgcttcctcaacgtttcggagccgctgcccccagcgaagtccacattccaagctccaggggctttgagagagacgaccccaaggcaaggcgtttggagagctgctgaggagccaggggcttggaggagcgagaagacatgtattttcagctgagtctcagaaggggagaatctcctgtcaccaccagaaaagcaacagccccgaaatgtgattgcaactgactagcagagcagaggcccaggagtcactggattgatgatttagaatatgctaaaaagccagtgctttatttggggaattcaggggctttctggtgcccaagacagtgacctgcagcaagggagtcagaagacagatgtagaaatcaagagtgaccatccacgggattgacttggattgccactcaagcggtcctctcatggaatgttggtgaggccctctgccagggaagcaatctggctgtgcaaagtgctgcctggtggggaggactcctggaaatctgactgacccctattccctgcttgggaacttgaggggtgtcagagcccctgatgtgctttctcttaggaagatgaggactctgaacacctctgccatggacgggactgggctggtggtggagagggacttctctgttcgtatcctcactgcctgtttcctgtcgctgctcatcctgtccacgctcctggggaacacgctggtctgtgctgccgttatcaggttccgacacctgcggtccaaggtgaccaacttctttgtcatctccttggctgtgtcagatctcttggtggccgtcctggtcatgccctggaaggcagtggctgagattgctggcttctggccctttgggtccttctgtaacatctgggtggcctttgacatcatgtgctccactgcatccatcctcaacctctgtgtgatcagcgtggacaggtattgggctatctccagccctttccggtatgagagaaagatgacccccaaggcagccttcatcctgatcagtgtggcatggaccttgtctgtactcatctccttcatcccagtgcagctcagctggcacaaggcaaaacccacaagcccctctgatggaaatgccacttccctggctgagaccatagacaactgtgactccagcctcagcaggacatatgccatctcatcctctgtaataagcttttacatccctgtggccatcatgattgtcacctacaccaggatctacaggattgctcagaaacaaatacggcgcattgcggccttggagagggcagcagtccacgccaagaattgccagaccaccacaggtaatggaaagcctgtcgaatgttctcaaccggaaagttcttttaagatgtccttcaaaagagaaactaaagtcctgaagactctgtcggtgatcatgggtgtgtttgtgtgctgttggctacctttcttcatcttgaactgcattttgcccttctgtgggtctggggagacgcagcccttctgcattgattccaacacctttgacgtgtttgtgtggtttgggtgggctaattcatccttgaaccccatcatttatgcctttaatgctgattttcggaaggcattttcaaccctcttaggatgctacagactttgccctgcgacgaataatgccatagagacggtgagtatcaataacaatggggccgcgatgttttccagccatcatgagccacgaggctccatctccaaggagtgcaatctggtttacctgatcccacatgctgtgggctcctctgaggacctgaaaaaggaggaggcagctggcatcgccagacccttggagaagctgtccccagccctatcagtcatattggactatgacactgacgtctctctggagaagatccaacccatcacacaaaacggtcagcacccaacctgaactcgcagatgaatcctgccacacatgctcatcccaaaagctagaggagattgctctggggcttgctattaagaaactaaggtacggtgagactctgaggtgtcaggagagccctctgctgctttccaacacacaattaactccgtttccaaatacattccagtgtattttctgtgttgttcatagtcaatcaaacagggacactacaaacatggggagccataagggacatgtctttggcttcagaattgtttttagaaatttattcttatcttaggatttaccaaatagggcaaagaatcaacagtgaacagcttcacttaaaatcaaatttttctgggaagaaaatgagatgggttgagtttgctgtatacaaacaggtgctaacactgttcccagcaaagttttcagattgtaaaggtaggtgcatgccttcataaattatttctaaaacattaattgaggcttacagtaggagtgagaaatttttttccagaattgagagatgttttgttgatattggttctatttatttattgtatatatggatatttttaatttatgatataataaatatatatttatcatatttaataggataaattaatgagttttatccaagaccttacaaccacatttctggccatttaactagcactttataagccaatgaagcaaacacacagactctgtgagattctaaatgttcatgtgtaacttctagaaacacagcagaaactgatagataagggaataaagttgaaatgattccttaaaattcatggacacagataaatgcaaggtgagaattgacaaatgctataaatgctttctttttctgaaaagattttgaaaaatttaaaaaagtatagctactactgtgttcaaaacgttttaaatgacaaatgactttcccaggggaatttgcagttctgtaaatatcttaaataaaagccaacttaagaagagcccagcattaaatttacgatcttaggtggtaatgaaaagtatatgctgctttgtatttatgtaaaataattggccctctccatcttttctcatttcatgtgtcaggtagtttttctga

SEQ ID NO: 8741 - DNA, 2433 bp, Homo sapiens
  source 1..2433: mol_type = unassigned DNA
agcagccggcgccgtctctgcccccgggcgccctatggcttgaagagcctggccacccagtggctccaccgccctgatggatccactgaatctgtcctggtatgatgatgatctggagaggcagaactggagccggcccttcaacgggtcagacgggaaggcggacagaccccactacaactactatgccacactgctcaccctgctcatcgctgtcatcgtcttcggcaacgtgctggtgtgcatggctgtgtcccgcgagaaggcgctgcagaccaccaccaactacctgatcgtcagcctcgcagtggccgacctcctcgtcgccacactggtcatgccctgggttgtctacctggaggtggtaggtgagtggaaattcagcaggattcactgtgacatcttcgtcactctggacgtcatgatgtgcacggcgagcatcctgaacttgtgtgccatcagcatcgacaggtacacagctgtggccatgcccatgctgtacaatacgcgctacagctccaagcgccgggtcaccgtcatgatctccatcgtctgggtcctgtccttcaccatctcctgcccactcctcttcggactcaataacgcagaccagaacgagtgcatcattgccaacccggccttcgtggtctactcctccatcgtctccttctacgtgcccttcattgtcaccctgctggtctacatcaagatctacattgtcctccgcagacgccgcaagcgagtcaacaccaaacgcagcagccgagctttcagggcccacctgagggctccactaaaggaggctgcccggcgagcccaggagctggagatggagatgctctccagcaccagcccacccgagaggacccggtacagccccatcccacccagccaccaccagctgactctccccgacccgtcccaccatggtctccacagcactcccgacagccccgccaaaccagagaagaatgggcatgccaaagaccaccccaagattgccaagatctttgagatccagaccatgcccaatggcaaaacccggacctccctcaagaccatgagccgtaggaagctctcccagcagaaggagaagaaagccactcagatgctcgccattgttctcggcgtgttcatcatctgctggctgcccttcttcatcacacacatcctgaacatacactgtgactgcaacatcccgcctgtcctgtacagcgccttcacgtggctgggctatgtcaacagcgccgtgaaccccatcatctacaccaccttcaacattgagttccgcaaggccttcctgaagatcctccactgctgactctgctgcctgcccgcacagcagcctgcttcccacctccctgcccaggccggccagcctcacccttgcgaaccgtgagcaggaaggcctgggtggatcggcctcctcttcaccccggcaggccctgcagtgttcgcttggctccatgctcctcactgcccgcacaccctcactctgccagggcagtgctagtgagctgggcatggtaccagccctggggctgggccccccagctcaggggcagctcatagagtcccccctcccacctccagtccccctatccttggcaccaaagatgcagccgccttccttgaccttcctctggggctctagggttgctggagcctgagtcagggcccagaggctgagttttctctttgtggggcttggcgtggagcaggcggtggggagagatggacagttcacaccctgcaaggcccacaggaggcaagcaagctctcttgccgaggagccaggcaacttcagtcctgggagacccatgtaaataccagactgcaggttggaccccagagattcccaagccaaaaaccttagctccctcccgcaccccgatgtggacctctactttccaggctagtccggacccacctcaccccgttacagctccccaagtggtttccacatgctctgagaagaggagccctcatcttgaagggcccaggagggtctatggggagaggaactccttggcctagcccaccctgctgccttctgacggccctgcaatgtatcccttctcacagcacatgctggccagcctggggcctggcagggaggtcaggccctggaactctatctgggcctgggctaggggacatcagaggttctttgagggactgcctctgccacactctgacgcaaaaccactttccttttctattccttctggcctttcctctctcctgtttcccttcccttccactgcctctgccttagaggagcccacggctaagaggctgctgaaaaccatctggcctggcctggccctgccctgaggaaggaggggaagctgcagcttgggagagcccctggggcctagactctgtaacatcactatccatgcaccaaactaataaaactttgacgagtca

SEQ ID NO: 8742 - DNA, 2704 bp, Homo sapiens
  source 1..2704: mol_type = unassigned DNA
actgctccccgcgggccagagccggccgagctgctgcccgccggggctctgaacggcgcggcggggccgggagccagggaccggccgaggagagtggcggccccggacggctgccggaggggcggccgcgcgtggatgcggcgggagctggaagcctcaagcagccggcgccgtctctgcccccgggcgccctatggcttgaagagcctggccacccagtggctccaccgccctgatggatccactgaatctgtcctggtatgatgatgatctggagaggcagaactggagccggcccttcaacgggtcagacgggaaggcggacagaccccactacaactactatgccacactgctcaccctgctcatcgctgtcatcgtcttcggcaacgtgctggtgtgcatggctgtgtcccgcgagaaggcgctgcagaccaccaccaactacctgatcgtcagcctcgcagtggccgacctcctcgtcgccacactggtcatgccctgggttgtctacctggaggtggtaggtgagtggaaattcagcaggattcactgtgacatcttcgtcactctggacgtcatgatgtgcacggcgagcatcctgaacttgtgtgccatcagcatcgacaggtacacagctgtggccatgcccatgctgtacaatacgcgctacagctccaagcgccgggtcaccgtcatgatctccatcgtctgggtcctgtccttcaccatctcctgcccactcctcttcggactcaataacgcagaccagaacgagtgcatcattgccaacccggccttcgtggtctactcctccatcgtctccttctacgtgcccttcattgtcaccctgctggtctacatcaagatctacattgtcctccgcagacgccgcaagcgagtcaacaccaaacgcagcagccgagctttcagggcccacctgagggctccactaaagggcaactgtactcaccccgaggacatgaaactctgcaccgttatcatgaagtctaatgggagtttcccagtgaacaggcggagagtggtgcaggaggctgcccggcgagcccaggagctggagatggagatgctctccagcaccagcccacccgagaggacccggtacagccccatcccacccagccaccaccagctgactctccccgacccgtcccaccatggtctccacagcactcccgacagccccgccaaaccagagaagaatgggcatgccaaagaccaccccaagattgccaagatctttgagatccagaccatgcccaatggcaaaacccggacctccctcaagaccatgagccgtaggaagctctcccagcagaaggagaagaaagccactcagatgctcgccattgttctcggcgtgttcatcatctgctggctgcccttcttcatcacacacatcctgaacatacactgtgactgcaacatcccgcctgtcctgtacagcgccttcacgtggctgggctatgtcaacagcgccgtgaaccccatcatctacaccaccttcaacattgagttccgcaaggccttcctgaagatcctccactgctgactctgctgcctgcccgcacagcagcctgcttcccacctccctgcccaggccggccagcctcacccttgcgaaccgtgagcaggaaggcctgggtggatcggcctcctcttcaccccggcaggccctgcagtgttcgcttggctccatgctcctcactgcccgcacaccctcactctgccagggcagtgctagtgagctgggcatggtaccagccctggggctgggccccccagctcaggggcagctcatagagtcccccctcccacctccagtccccctatccttggcaccaaagatgcagccgccttccttgaccttcctctggggctctagggttgctggagcctgagtcagggcccagaggctgagttttctctttgtggggcttggcgtggagcaggcggtggggagagatggacagttcacaccctgcaaggcccacaggaggcaagcaagctctcttgccgaggagccaggcaacttcagtcctgggagacccatgtaaataccagactgcaggttggaccccagagattcccaagccaaaaaccttagctccctcccgcaccccgatgtggacctctactttccaggctagtccggacccacctcaccccgttacagctccccaagtggtttccacatgctctgagaagaggagccctcatcttgaagggcccaggagggtctatggggagaggaactccttggcctagcccaccctgctgccttctgacggccctgcaatgtatcccttctcacagcacatgctggccagcctggggcctggcagggaggtcaggccctggaactctatctgggcctgggctaggggacatcagaggttctttgagggactgcctctgccacactctgacgcaaaaccactttccttttctattccttctggcctttcctctctcctgtttcccttcccttccactgcctctgccttagaggagcccacggctaagaggctgctgaaaaccatctggcctggcctggccctgccctgaggaaggaggggaagctgcagcttgggagagcccctggggcctagactctgtaacatcactatccatgcaccaaactaataaaactttgacgagtcaccttccaggacccctgggt

SEQ ID NO: 8743 - DNA, 2789 bp, Homo sapiens
  source 1..2789: mol_type = unassigned DNA
ccggcagcctcacgcgcgcaccgcgccgcctccgccccgtccccgcgctccctcctgcccgcccgccccgcgcccggccccgccccgccccgccccgccgcggcccgtccactgctccccgcgggccagagccggccgagctgctgcccgccggggctctgaacggcgcggcggggccgggagccagggaccggccgaggagagtggcggccccggacggctgccggaggggcggccgcgcgtggatgcggcgggagctggaagcctcaagcagccggcgccgtctctgcccccgggcgccctatggcttgaagagcctggccacccagtggctccaccgccctgatggatccactgaatctgtcctggtatgatgatgatctggagaggcagaactggagccggcccttcaacgggtcagacgggaaggcggacagaccccactacaactactatgccacactgctcaccctgctcatcgctgtcatcgtcttcggcaacgtgctggtgtgcatggctgtgtcccgcgagaaggcgctgcagaccaccaccaactacctgatcgtcagcctcgcagtggccgacctcctcgtcgccacactggtcatgccctgggttgtctacctggaggtggtaggtgagtggaaattcagcaggattcactgtgacatcttcgtcactctggacgtcatgatgtgcacggcgagcatcctgaacttgtgtgccatcagcatcgacaggtacacagctgtggccatgcccatgctgtacaatacgcgctacagctccaagcgccgggtcaccgtcatgatctccatcgtctgggtcctgtccttcaccatctcctgcccactcctcttcggactcaataacgcagaccagaacgagtgcatcattgccaacccggccttcgtggtctactcctccatcgtctccttctacgtgcccttcattgtcaccctgctggtctacatcaagatctacattgtcctccgcagacgccgcaagcgagtcaacaccaaacgcagcagccgagctttcagggcccacctgagggctccactaaagggcaactgtactcaccccgaggacatgaaactctgcaccgttatcatgaagtctaatgggagtttcccagtgaacaggcggagagtggaggctgcccggcgagcccaggagctggagatggagatgctctccagcaccagcccacccgagaggacccggtacagccccatcccacccagccaccaccagctgactctccccgacccgtcccaccatggtctccacagcactcccgacagccccgccaaaccagagaagaatgggcatgccaaagaccaccccaagattgccaagatctttgagatccagaccatgcccaatggcaaaacccggacctccctcaagaccatgagccgtaggaagctctcccagcagaaggagaagaaagccactcagatgctcgccattgttctcggcgtgttcatcatctgctggctgcccttcttcatcacacacatcctgaacatacactgtgactgcaacatcccgcctgtcctgtacagcgccttcacgtggctgggctatgtcaacagcgccgtgaaccccatcatctacaccaccttcaacattgagttccgcaaggccttcctgaagatcctccactgctgactctgctgcctgcccgcacagcagcctgcttcccacctccctgcccaggccggccagcctcacccttgcgaaccgtgagcaggaaggcctgggtggatcggcctcctcttcaccccggcaggccctgcagtgttcgcttggctccatgctcctcactgcccgcacaccctcactctgccagggcagtgctagtgagctgggcatggtaccagccctggggctgggccccccagctcaggggcagctcatagagtcccccctcccacctccagtccccctatccttggcaccaaagatgcagccgccttccttgaccttcctctggggctctagggttgctggagcctgagtcagggcccagaggctgagttttctctttgtggggcttggcgtggagcaggcggtggggagagatggacagttcacaccctgcaaggcccacaggaggcaagcaagctctcttgccgaggagccaggcaacttcagtcctgggagacccatgtaaataccagactgcaggttggaccccagagattcccaagccaaaaaccttagctccctcccgcaccccgatgtggacctctactttccaggctagtccggacccacctcaccccgttacagctccccaagtggtttccacatgctctgagaagaggagccctcatcttgaagggcccaggagggtctatggggagaggaactccttggcctagcccaccctgctgccttctgacggccctgcaatgtatcccttctcacagcacatgctggccagcctggggcctggcagggaggtcaggccctggaactctatctgggcctgggctaggggacatcagaggttctttgagggactgcctctgccacactctgacgcaaaaccactttccttttctattccttctggcctttcctctctcctgtttcccttcccttccactgcctctgccttagaggagcccacggctaagaggctgctgaaaaccatctggcctggcctggccctgccctgaggaaggaggggaagctgcagcttgggagagcccctggggcctagactctgtaacatcactatccatgcaccaaactaataaaactttgacgagtca

SEQ ID NO: 8744 - DNA, 1493 bp, Homo sapiens
  source 1..1493: mol_type = unassigned DNA
atggatccactgaatctgtcctggtatgatgatgatctggagaggcagaactggagccggcccttcaacgggtcagacgggaaggcggacagaccccactacaactactatgccacactgctcaccctgctcatcgctgtcatcgtcttcggcaacgtgctggtgtgcatggctgtgtcccgcgagaaggcgctgcagaccaccaccaactacctgatcgtcagcctcgcagtggccgacctcctcgtcgccacactggtcatgccctgggttgtctacctggaggtggtaggtgagtggaaattcagcaggattcactgtgacatcttcgtcactctggacgtcatgatgtgcacggcgagcatcctgaacttgtgtgccatcagcatcgacaggtacacagctgtggccatgcccatgctgtacaatacgcgctacagctccaagcgccgggtcaccgtcatgatctccatcgtctgggtcctgtccttcaccatctcctgcccactcctcttcggactcaataacgcagaccagaacgagtgcatcattgccaacccggccttcgtggtctactcctccatcgtctccttctacgtgcccttcattgtcaccctgctggtctacatcaagatctacattgtcctccgcagacgccgcaagcgagtcaacaccaaacgcagcagccgagctttcagggcccacctgagggctccactaaagggcaactgtactcaccccgaggacatgaaactctgcaccgttatcatgaagtctaatgggagtttcccagtgaacaggcggagagtggtgcaggaggctgcccggcgagcccaggagctggagatggagatgctctccagcaccagcccacccgagaggacccggtacagccccatcccacccagccaccaccagctgactctccccgacccgtcccaccatggtctccacagcactcccgacagccccgccaaaccagagaagaatgggcatgccaaagaccaccccaagattgccaagatctttgagatccagaccatgcccaatggcaaaacccggacctccctcaagaccatgagccgtaggaagctctcccagcagaaggagaagaaagccactcagatgctcgccattgttctcggcgtgttcatcatctgctggctgcccttcttcatcacacacatcctgaacatacactgtgactgcaacatcccgcctgtcctgtacagcgccttcacgtggctgggctatgtcaacagcgccgtgaaccccatcatctacaccaccttcaacattgagttccgcaaggccttcctgaagatcctccactgctgactctgctgcctgcccgcacagcagcctgcttcccacctccctgcccaggccggccagcctcacccttgcgaaccgtgagcaggaaggcctgggtggatcggcctcctcttcaccccggcaggccctgcagtgttcgcttggctccatgctcctca

SEQ ID NO: 8745 - DNA, 443 bp, Homo sapiens
  source 1..443: mol_type = unassigned DNA
actgctccccgcgggccagagccggccgagctgctgcccgccggggctctgaacggcgcggcggggccgggagccagggaccggccgaggagagtggcggccccggacggctgccggaggggcggccgcgcgtggatgcggcgggagctggaagcctcaagcagccggcgccgtctctgcccccgggcgccctatggcttgaagtgcaggcgacggtggcggcagtagcggagggtgaccgcccggctctcggcccggctctatgatggaccgagagcccctctagggtggtatgcggagacaagagacacctctaagcaccagacagagcgcttccctatccctgtctgaggcgggcagcccttgagtgcttcctcttgaagagcagagagcctggccacccagtggctccaccgccctgatggatccactgaatctgtcct

SEQ ID NO: 8746 - DNA, 2467 bp, Homo sapiens
  source 1..2467: mol_type = unassigned DNA
ttaagaagtgtttgttgaatgaataaataaatgatggatcagctctgttcaagctcatcttattatgcatttttaaaaaattgtgtttgctcatttgtcctaccagctgtaaaaacttgctagcaaaagagtggcagaaggcccaacatttttagaaaattcttagccgtaaaccttaaaatcccgagttggaaaattctcattattaaatgccaggagttggtcttcttcctggagacctctgcaagaggccctctcactgacaccttgtgtccatttttcctggccagagcctggccacccagtggctccaccgccctgatggatccactgaatctgtcctggtatgatgatgatctggagaggcagaactggagccggcccttcaacgggtcagacgggaaggcggacagaccccactacaactactatgccacactgctcaccctgctcatcgctgtcatcgtcttcggcaacgtgctggtgtgcatggctgtgtcccgcgagaaggcgctgcagaccaccaccaactacctgatcgtcagcctcgcagtggccgacctcctcgtcgccacactggtcatgccctgggttgtctacctggaggtggtaggtgagtggaaattcagcaggattcactgtgacatcttcgtcactctggacgtcatgatgtgcacggcgagcatcctgaacttgtgtgccatcagcatcgacaggtacacagctgtggccatgcccatgctgtacaatacgcgctacagctccaagcgccgggtcaccgtcatgatctccatcgtctgggtcctgtccttcaccatctcctgcccactcctcttcggactcaataacgcagaccagaacgagtgcatcattgccaacccggccttcgtggtctactcctccatcgtctccttctacgtgcccttcattgtcaccctgctggtctacatcaagatctacattgtcctccgcagacgccgcaagcgagtcaacaccaaacgcagcagccgagctttcagggcccacctgagggctccactaaagggcaactgtactcaccccgaggacatgaaactctgcaccgttatcatgaagtctaatgggagtttcccagtgaacaggcggagagtggaggctgcccggcgagcccaggagctggagatggagatgctctccagcaccagcccacccgagaggacccggtacagccccatcccacccagccaccaccagctgactctccccgacccgtcccaccatggtctccacagcactcccgacagccccgccaaaccagagaagaatgggcatgccaaagaccaccccaagattgccaagatctttgagatccagaccatgcccaatggcaaaacccggacctccctcaagaccatgagccgtaggaagctctcccagcagaaggagaagaaagccactcagatgctcgccattgttctcggcgtgttcatcatctgctggctgcccttcttcatcacacacatcctgaacatacactgtgactgcaacatcccgcctgtcctgtacagcgccttcacgtggctgggctatgtcaacagcgccgtgaaccccatcatctacaccaccttcaacattgagttccgcaaggccttcctgaagatcctccactgctgactctgctgcctgcccgcacagcagcctgcttcccacctccctgcccaggccggccagcctcacccttgcgaaccgtgagcaggaaggcctgggtggatcggcctcctcttcaccccggcaggccctgcagtgttcgcttggctccatgctcctcactgcccgcacaccctcactctgccagggcagtgctagtgagctgggcatggtaccagccctggggctgggccccccagctcaggggcagctcatagagtcccccctcccacctccagtccccctatccttggcaccaaagatgcagccgccttccttgaccttcctctggggctctagggttgctggagcctgagtcagggcccagaggctgagttttctctttgtggggcttggcgtggagcaggcggtggggagagatggacagttcacaccctgcaaggcccacaggaggcaagcaagctctcttgccgaggagccaggcaacttcagtcctgggagacccatgtaaataccagactgcaggttggaccccagagattcccaagccaaaaaccttagctccctcccgcaccccgatgtggacctctactttccaggctagtccggacccacctcaccccgttacagctccccaagtggtttccacatgctctgagaagaggagccctcatcttgaagggcccaggagggtctatggggagaggaactccttggcctagcccaccctgctgccttctgacggccctgcaatgtatcccttctcacagcacatgctggccagcctggggcctggcagggaggtcaggccctggaactc

SEQ ID NO: 8747 - DNA, 714 bp, Homo sapiens
  source 1..714: mol_type = unassigned DNA
gccagatgctgactgcctgtcagaattcagtccctacacaccccgccccatgtctgtctgtcttgcttcatggaccactcacaccccagagttccgcctgccttctctgttgcccaccaaacccgtgtgtgtttgttcgttcatatgcaagagcctggccacccagtggctccaccgccctgatggatccactgaatctgtcctggtatgatgatgatctggagaggcagaactggagccggcccttcaacgggtcagacgggaaggcggacagaccccactacaactactatgccacactgctcaccctgctcatcgctgtcatcgtcttcggcaacgtgctggtgtgcatggctgtgtcccgcgagaaggcgctgcagaccaccaccaactacctgatcgtcagcctcgcagtggccgacctcctcgtcgccacactggtcatgccctgggttgtctacctggaggtggtaggtgagtggaaattcagcaggattcactgtgacatcttcgtcactctggacgtcatgatgtgcacggcgagcatcctgaacttgtgtgccatcagcatcgacaggtacacagctgtggccatgcccatgctgtacaatacgcgctacagctccaagcgccgggtcaccgtcatgatctccatcgtctgggtcctgtccttcaccatctcctgcccactcctcttcggactcaataacgcag

SEQ ID NO: 8748 - DNA, 2473 bp, Homo sapiens
  source 1..2473: mol_type = unassigned DNA
agagcctggccacccagtggctccaccgccctgatggatccactgaatctgtcctggtatgatgatgatctggagaggcagaactggagccggcccttcaacgggtcagacgggaaggcggacagaccccactacaactactatgccacactgctcaccctgctcatcgctgtcatcgtcttcggcaacgtgctggtgtgcatggctgtgtcccgcgagaaggcgctgcagaccaccaccaactacctgatcgtcagcctcgcagtggccgacctcctcgtcgccacactggtcatgccctgggttgtctacctggaggtaggtgagtggaaattcagcaggattcactgtgacatcttcgtcactctggacgtcatgatgtgcacggcgagcatcctgaacttgtgtgccatcagcatcgacaggtacacagctgtggccatgcccatgctgtacaatacgcgctacagctccaagcgccgggtcaccgtcatgatctccatcgtctgggtcctgtccttcaccatctcctgcccactcctcttcggactcaataacgcagaccagaacgagtgcatcattgccaacccggccttcgtggtctactcctccatcgtctccttctacgtgcccttcattgtcaccctgctggtctacatcaagatctacattgtcctccgcagacgccgcaagcgagtcaacaccaaacgcagcagccgagctttcagggcccacctgagggctccactaaagggcaactgtactcaccccgaggacatgaaactctgcaccgttatcatgaagtctaatgggagtttcccagtgaacaggcggagagtggaggctgcccggcgagcccaggagctggagatggagatgctctccagcaccagcccacccgagaggacccggtacagccccatcccacccagccaccaccagctgactctccccgacccgtcccaccatggtctccacagcactcccgacagccccgccaaaccagagaagaatgggcatgccaaagaccaccccaagattgccaagatctttgagatccagaccatgcccaatggcaaaacccggacctccctcaagaccatgagccgtaggaagctctcccagcagaaggagaagaaagccactcagatgctcgccattgttctcggcgtgttcatcatctgctggctgcccttcttcatcacacacatcctgaacatacactgtgactgcaacatcccgcctgtcctgtacagcgccttcacgtggctgggctatgtcaacagcgccgtgaaccccatcatctacaccaccttcaacattgagttccgcaaggccttcctgaagatcctccactgctgactctgctgcctgcccgcacagcagcctgcttcccacctccctgcccaggccggccagcctcacccttgcgaaccgtgagcaggaaggcctgggtggatcggcctcctcttcaccccggcaggccctgcagtgttcgcttggctccatgctcctcactgcccgcacaccctcactctgccagggcagtgctagtgagctgggcatggtaccagccctggggctgggccccccagctcaggggcagctcatagagtcccccctcccacctccagtccccctatccttggcaccaaagatgcagccgccttccttgaccttcctctggggctctagggttgctggagcctgagtcagggcccagaggctgagttttctctttgtggggcttggcgtggagcaggcggtggggagagatggacagttcacaccctgcaaggcccacaggaggcaagcaagctctcttgccgaggagccaggcaacttcagtcctgggagacccatgtaaataccagactgcaggttggaccccagagattcccaagccaaaaaccttagctccctcccgcaccccgatgtggacctctactttccaggctagtccggacccacctcaccccgttacagctccccaagtggtttccacatgctctgagaagaggagccctcatcttgaagggcccaggagggtctatggggagaggaactccttggcctagcccaccctgctgccttctgacggccctgcaatgtatcccttctcacagcacatgctggccagcctggggcctggcagggaggtcaggccctggaactctatctgggcctgggctaggggacatcagaggttctttgagggactgcctctgccacactctgacgcaaaaccactttccttttctattccttctggcctttcctctctcctgtttcccttcccttccactgcctctgccttagaggagcccacggctaagaggctgctgaaaaccatctggcctggcctggccctgccctgaggaaggaggggaagctgcagcttgggagagcccctggggcctagactctgtaacatcactatccatgcaccaaactaataaaactttgacgagtc

SEQ ID NO: 8749 - DNA, 1542 bp, Homo sapiens
  source 1..1542: mol_type = unassigned DNA
gatagagagacaaagaggaaaagagagcgaggtagaaaacggatactgcctatgcctactccatccctctttcagcaccaaggacagaacctctgagcggctgacccaagcaacgctcagtttagggtccctcccaaatcctctaaagaaaacggatacattcgaaagcagctatgaaacatgcactaaggtctaatagggaagctggaaaagcagcactcaagtaatttcaccttagaggcaaaaatgggtgatttctttctgttcatttcatagtttctgagtcctgagaaaggcaaagtttgctttgcttgggtatgtctgctgtcagtaaatggctgcaggagccgaagtggtaaactcctcggtctccagaaatcagaagaaaattttagggaagccccttggcatcacgcacctccctctgggctatggcatctctgagccagctgagtggccacctgaactacacctgtggggcagagaactccacaggtgccagccaggcccgcccacatgcctactatgccctctcctactgcgcgctcatcctggccatcgtcttcggcaatggcctggtgtgcatggctgtgctgaaggagcgggccctgcagactaccaccaactacttagtagtgagcctggctgtggcagacttgctggtggccaccttggtgatgccctgggtggtatacctggaggtgacaggtggagtctggaatttcagccgcatttgctgtgatgtttttgtcaccctggatgtcatgatgtgtacagccagcatccttaatctctgtgccatcagcatagacaggtacactgcagtggtcatgcccgttcactaccagcatggcacgggacagagctcctgtcggcgcgtggccctcatgatcacggccgtctgggtactggcctttgctgtgtcctgccctcttctgtttggctttaataccacaggggaccccactgtctgctccatctccaaccctgattttgtcatctactcttcagtggtgtccttctacctgccctttggagtgactgtccttgtctatgccagaatctatgtggtgctgaaacaaaggagacggaaaaggatcctcactcgacagaacagtcagtgcaacagtgtcaggcctggcttcccccagcaaaccctctctcctgacccggcacatctggagctgaagcgttactacagcatctgccaggacactgccttgggtggaccaggcttccaagaaagaggaggagagttgaaaagagaggagaagactcggaattccctgagtgccacttcgggagaagaaggcaacccaaatggtggccattgtgcttggggccttcattgtctgctggctgcccttcttcttgacccatgttctcaatacccactgccagacatgccacgtgtccccagagctttacagtgccacgacatggctgggctacgtgaatagcgccctcaaccctgtgatctataccaccttcaatatcgagttccggaaagccttcctcaagatcctgtcttgctgagggagc

SEQ ID NO: 8750 - DNA, 1535 bp, Homo sapiens
  source 1..1535: mol_type = unassigned DNA
gatagagagacaaagaggaaaagagagcgaggtagaaaacggatactgcctatgcctactccatccctctttcagcaccaaggacagaacctctgagcggctgacccaagcaacgctcagtttagggtccctcccaaatcctctaaagaaaacggatacattcgaaagcagctatgaaacatgcactaaggtctaatagggaagctggaaaagcagcactcaagtaatttcaccttagaggcaaaaatgggtgatttctttctgttcatttcatagtttctgagtcctgagaaaggcaaagtttgctttgcttgggtatgtctgctgtcagtaaatggctgcaggagccgaagtggtaaactcctcggtctccagaaatcagaagaaaattttagggaagccccttggcatcacgcacctccctctgggctatggcatctctgagccagctgagtggccacctgaactacacctgtggggcagagaactccacaggtgccagccaggcccgcccacatgcctactatgccctctcctactgcgcgctcatcctggccatcgtcttcggcaatggcctggtgtgcatggctgtgctgaaggagcgggccctgcagactaccaccaactacttagtagtgagcctggctgtggcagacttgctggtggccaccttggtgatgccctgggtggtatacctggaggtgacaggtggagtctggaatttcagccgcatttgctgtgatgtttttgtcaccctggatgtcatgatgtgtacagccagcatccttaatctctgtgccatcagcatagacaggtacactgcagtggtcatgcccgttcactaccagcatggcacgggacagagctcctgtcggcgcgtggccctcatgatcacggccgtctgggtactggcctttgctgtgtcctgccctcttctgtttggctttaataccacaggggaccccactgtctgctccatctccaaccctgattttgtcatctactcttcagtggtgtccttctacctgccctttggagtgactgtccttgtctatgccagaatctatgtggtgctgaaacaaaggagacggaaaaggatcctcactcgacagaacagtcagtgcaacagtgtcaggcctggcttcccccagcaaaccctctctcctgacccggcacatctggagctgaagcgttactacagcatctgccaggacactgccttgggtggaccaggcttccaagaaagaggaggagagttgaaaagagaggagaagactcggaattccctgatgccacttcgggagaagaaggcaacccaaatggtggccattgtgcttggggccttcattgtctgctggctgcccttcttcttgacccatgttctcaatacccactgccagacatgccacgtgtccccagagctttacagtgccacgacatggctgggctacgtgaatagcgccctcaaccctgtgatctataccaccttcaatatcgagttccggaaagccttcctcaagatcctgtcttgctga

SEQ ID NO: 8751 - DNA, 1640 bp, Homo sapiens
  source 1..1640: mol_type = unassigned DNA
gatagagagacaaagaggaaaagagagcgaggtagaaaacggatactgcctatgcctactccatccctctttcagcaccaaggacagaacctctgagcggctgacccaagcaacgctcagtttagggtccctcccaaatcctctaaagaaaacggatacattcgaaagcagctatgaaacatgcactaaggtctaatagggaagctggaaaagcagcactcaagtaatttcaccttagaggcaaaaatgggtgatttctttctgttcatttcatagtttctgagtcctgagaaaggcaaagtttgctttgcttgggtatgtctgctgtcagtaaatggctgcaggagccgaagtggtaaactcctcggtctccagaaatcagaagaaaattttagggaagccccttggcatcacgcacctccctctgggctatggcatctctgagccagctgagtggccacctgaactacacctgtggggcagagaactccacaggtgccagccaggcccgcccacatgcctactatgccctctcctactgcgcgctcatcctggccatcgtcttcggcaatggcctggtgtgcatggctgtgctgaaggagcgggccctgcagactaccaccaactacttagtagtgagcctggctgtggcagacttgctggtggccaccttggtgatgccctgggtggtatacctggaggtgacaggtggagtctggaatttcagccgcatttgctgtgatgtttttgtcaccctggatgtcatgatgtgtacagccagcatccttaatctctgtgccatcagcatagacaggtacactgcagtggtcatgcccgttcactaccagcatggcacgggacagagctcctgtcggcgcgtggccctcatgatcacggccgtctgggtactggcctttgctgtgtcctgccctcttctgtttggctttaataccacaggggaccccactgtctgctccatctccaaccctgattttgtcatctactcttcagtggtgtccttctacctgccctttggagtgactgtccttgtctatgccagaatctatgtggtgctgaaacaaaggagacggaaaaggatcctcactcgacagaacagtcagtgcaacagtgtcaggcctggcttcccccagcaaaccctctctcctgacccggcacatctggagctgaagcgttactacagcatctgccaggacactgccttgggtggaccaggcttccaagaaagaggaggagagttgaaaagagaggagaagactcggaattccctgagtcccaccatagcgcccaagctcagcttagaagttcgaaaactcagcaatggcagattatcgacatctttgaagctggggcccctgcaacctcggggagtgccacttcgggagaagaaggcaacccaaatggtggccattgtgcttggggccttcattgtctgctggctgcccttcttcttgacccatgttctcaatacccactgccagacatgccacgtgtccccagagctttacagtgccacgacatggctgggctacgtgaatagcgccctcaaccctgtgatctataccaccttcaatatcgagttccggaaagccttcctcaagatcctgtcttgctgagggagc

SEQ ID NO: 8752 - DNA, 1557 bp, Homo sapiens
  source 1..1557: mol_type = unassigned DNA
attataaaagcaagttcaacctcctcttgctctcaccctttcttgctcttctgccttccgccatgagatgacacagcacaaaggtctttgccagatgtctgtgccacactcttggacttcccggactccagaacttttctgagtcctgagaaaggcaaagtttgctttgcttgggtatgtctgctgtcagtaaatggctgcaggagccgaagtggtaaactcctcggtctccagaaatcagaagaaaattttagggaagccccttggcatcacgcacctccctctgggctatggcatctctgagccagctgagtggccacctgaactacacctgtggggcagagaactccacaggtgccagccaggcccgcccacatgcctactatgccctctcctactgcgcgctcatcctggccatcgtcttcggcaatggcctggtgtgcatggctgtgctgaaggagcgggccctgcagactaccaccaactacttagtagtgagcctggctgtggcagacttgctggtggccaccttggtgatgccctgggtggtatacctggaggtgacaggtggagtctggaatttcagccgcatttgctgtgatgtttttgtcaccctggatgtcatgatgtgtacagccagcatccttaatctctgtgccatcagcatagacaggtacactgcagtggtcatgcccgttcactaccagcatggcacgggacagagctcctgtcggcgcgtggccctcatgatcacggccgtctgggtactggcctttgctgtgtcctgccctcttctgtttggctttaataccacaggggaccccactgtctgctccatctccaaccctgattttgtcatctactcttcagtggtgtccttctacctgccctttggagtgactgtccttgtctatgccagaatctatgtggtgctgaaacaaaggagacggaaaaggatcctcactcgacagaacagtcagtgcaacagtgtcaggcctggcttcccccagcaaaccctctctcctgacccggcacatctggagctgaagcgttactacagcatctgccaggacactgccttgggtggaccaggcttccaagaaagaggaggagagttgaaaagagaggagaagactcggaattccctgagtcccaccatagcgcccaagctcagcttagaagttcgaaaactcagcaatggcagattatcgacatctttgaagctggggcccctgcaacctcggggagtgccacttcgggagaagaaggcaacccaaatggtggccattgtgcttggggccttcattgtctgctggctgcccttcttcttgacccatgttctcaatacccactgccagacatgccacgtgtccccagagctttacagtgccacgacatggctgggctacgtgaatagcgccctcaaccctgtgatctataccaccttcaatatcgagttccggaaagccttcctcaagatcctgtcttgctgagggagcagaagagggaacactctttgtacccatttctagctgccaggctgttggcccactcaga

SEQ ID NO: 8753 - DNA, 1554 bp, Homo sapiens
  source 1..1554: mol_type = unassigned DNA
ggtaaactcctcggtctccagaaatcagaagaaaattttaggaaagagaacaaataattaaaactctgtaagtcttaatgaggtgctaaggaggaaccccacgaatgtttcaggaagactgttattcagcactgagggattgaacatcagcaaagcaggacaaatgtcataactgatggggacctgacaactctctgttcccctgcctttttaaataggttatgcactcactctaagagatgccagaacaaactataaagaccaagataaatcaatactttgtaaggcatttaaaagctcattaaaatgtgaagccccttggcatcacgcacctccctctgggctatggcatctctgagccagctgagtggccacctgaactacacctgtggggcagagaactccacaggtgccagccaggcccgcccacatgcctactatgccctctcctactgcgcgctcatcctggccatcgtcttcggcaatggcctggtgtgcatggctgtgctgaaggagcgggccctgcagactaccaccaactacttagtagtgagcctggctgtggcagacttgctggtggccaccttggtgatgccctgggtggtatacctggaggtgacaggtggagtctggaatttcagccgcatttgctgtgatgtttttgtcaccctggatgtcatgatgtgtacagccagcatccttaatctctgtgccatcagcatagacaggtacactgcagtggtcatgcccgttcactaccagcatggcacgggacagagctcctgtcggcgcgtggccctcatgatcacggccgtctgggtactggcctttgctgtgtcctgccctcttctgtttggctttaataccacaggggaccccactgtctgctccatctccaaccctgattttgtcatctactcttcagtggtgtccttctacctgccctttggagtgactgtccttgtctatgccagaatctatgtggtgctgaaacaaaggagacggaaaaggatcctcactcgacagaacagtcagtgcaacagtgtcaggcctggcttcccccagcaaaccctctctcctgacccggcacatctggagctgaagcgttactacagcatctgccaggacactgccttgggtggaccaggcttccaagaaagaggaggagagttgaaaagagaggagaagactcggaattccctgagtcccaccatagcgcccaagctcagcttagaagttcgaaaactcagcaatggcagattatcgacatctttgaagctggggcccctgcaacctcggggagtgccacttcgggagaagaaggcaacccaaatggtggccattgtgcttggggccttcattgtctgctggctgcccttcttcttgacccatgttctcaatacccactgccagacatgccacgtgtccccagagctttacagtgccacgacatggctgggctacgtgaatagcgccctcaaccctgtgatctataccaccttcaatatcgagttccggaaagccttcctcaagatcctgtcttgctgagggagc

SEQ ID NO: 8754 - DNA, 1375 bp, Homo sapiens
  source 1..1375: mol_type = unassigned DNA
cccgggcgcgccatggggaaccgcagcaccgcggacgcggacgggctgctggctgggcgcgggccggccgcgggggcatctgcgggggcatctgcggggctggctgggcagggcgcggcggcgctggtggggggcgtgctgctcatcggcgcggtgctcgcggggaactcgctcgtgtgcgtgagcgtggccaccgagcgcgccctgcagacgcccaccaactccttcatcgtgagcctggcggccgccgacctcctcctcgctctcctggtgctgccgctcttcgtctactccgaggtccagggtggcgcgtggctgctgagcccccgcctgtgcgacgccctcatggccatggacgtcatgctgtgcaccgcctccatcttcaacctgtgcgccatcagcgtggacaggttcgtggccgtggccgtgccgctgcgctacaaccggcagggtgggagccgccggcagctgctgctcatcggcgccacgtggctgctgtccgcggcggtggcggcgcccgtactgtgcggcctcaacgacgtgcgcggccgcgaccccgccgtgtgccgcctggaggaccgcgactacgtggtctactcgtccgtgtgctccttcttcctaccctgcccgctcatgctgctgctctactgggccacgttccgcggcctgcagcgctgggaggtggcacgtcgcgccaagctgcacggccgcgcgccccgccgacccagcggccctggcccgccttcccccacgccacccgcgccccgcctcccccaggacccctgcggccccgactgtgcgccccccgcgcccggccttccccggggtccctgcggccccgactgtgcgcccgccgcgcccagcctcccccaggacccctgcggccccgactgtgcgccccccgcgcccggcctccccccggacccctgcggctccaactgtgctccccccgacgccgtcagagccgccgcgctcccaccccagactccaccgcagacccgcaggaggcggcgtgccaagatcaccggccgggagcgcaaggccatgagggtcctgccggtggtggtcggggccttcctgctgtgctggacgcccttcttcgtggtgcacatcacgcaggcgctgtgtcctgcctgctccgtgcccccgcggctggtcagcgccgtcacctggctgggctacgtcaacagcgccctcaaccccgtcatctacactgtcttcaacgccgagttccgcaacgtcttccgcaaggccctgcgtgcctgctgctgagccgggcacccccggacgccccccggcctgatggccaggcctcagggaccaaggagatggggagggcgcttttgtacgttaattaaacaaattccttcccaaa

SEQ ID NO: 8755 - DNA, 2375 bp, Homo sapiens
  source 1..2375: mol_type = unassigned DNA
agtgccagcctggcgcccgcgactgcctgccccagcccctcagtggcggcttgctctcttctctcgctccgaaccagacacagccgctgccgctgccgtccggcgcgctacagactcccgagaacagccctggctgtcagcgagcaccagccgcttcctgtccccatcgcggagactggaggggcgcaccacggccatggagccagaggcgcttcaggaggcaagagaagtccccgcgcgctccgcagcccggcgcagctcatggtgagcgccctctggggctcgagggtcccttggctgagggggcgcatcctcggggtgcccgatggggctgcctgggggtcgcagggctgaagttgggaccgcgcacagaccgcccctgcagtccagcccgaaatgctgccgccaggcagcaacggcaccgcgtacccggggcagttcgctctataccagcagctggcgcaggggaacgccgtggggggctcggcgggggcaccgccactggggccctcacaggtggtcaccgcctgcctgctgaccctactcatcatctggaccctgctgggcaacgtgctggtgtgcgcagccatcgtgcggagccgccacctgcgcgccaacatgaccaacgtcttcatcgtgtctctggccgtgtcagaccttttcgtggcgctgctggtcatgccctggaaggcagtcgccgaggtggccggttactggccctttggagcgttctgcgacgtctgggtggccttcgacatcatgtgctccactgcctccatcctgaacctgtgcgtcatcagcgtggaccgctactgggccatctccaggcccttccgctacaagcgcaagatgactcagcgcatggccttggtcatggtcggcctggcatggaccttgtccatcctcatctccttcattccggtccagctcaactggcacagggaccaggcggcctcttggggcgggctggacctgccaaacaacctggccaactggacgccctgggaggaggacttttgggagcccgacgtgaatgcagagaactgtgactccagcctgaatcgaacctacgccatctcttcctcgctcatcagcttctacatccccgttgccatcatgatcgtgacctacacgcgcatctaccgcatcgcccaggtgcagatccgcaggatttcctccctggagagggccgcagagcacgcgcagagctgccggagcagcgcagcctgcgcgcccgacaccagcctgcgcgcttccatcaagaaggagaccaaggttctcaagaccctgtcggtgatcatgggggtcttcgtgtgttgctggctgcccttcttcatccttaactgcatggtccctttctgcagtggacaccccgaaggccctccggccggcttcccctgcgtcagtgagaccaccttcgacgtcttcgtctggttcggctgggctaactcctcactcaaccccgtcatctatgccttcaacgccgactttcagaaggtgtttgcccagctgctggggtgcagccacttctgctcccgcacgccggtggagacggtgaacatcagcaatgagctcatctcctacaaccaagacatcgtcttccacaaggaaatcgcagctgcctacatccacatgatgcccaacgccgttacccccggcaaccgggaggtggacaacgacgaggaggagggtcctttcgatcgcatgttccagatctatcagacgtccccagatggtgaccctgttgctgagtctgtctgggagctggactgcgagggggagatttctttagacaaaataacacctttcaccccgaatggattccattaaactgcattaagaaaccccctcatggatctgcataaccgcacagacattgacaagcacgcacacacacgcaaatacatgcctttccagtgctgctccctttatcatgtgtttctgtgtagtagctcgtgtgcttagaaacctcaccccattgattggtagttcgaagaattggcagaagcagttgcaataaactcagtcaaatgtacccagcctaccagagatggaccaacgatcctatgagagaagagagtatggtgctgggtccttaaaaaaaaaaatgatacttggtccttaaaaaatatgctctcccctccctttttaaacaaatggcttgttcagtcacttgtttgtgtttgaattgatttttaaacagcaggttgtgtgtgtgtgcagtgatgtggtgggagcacagctttcctgggtctggattcccgtggctttgtgcttatgtcatttcttctctctgtgctggtgggggcctctttaccatagcttaagaagtatccctgatttattctggtgtctaataaacacagattatttgt

SEQ ID NO: 8756 - DNA, 623 bp, Homo sapiens
  source 1..623: mol_type = unassigned DNA
gacccgcgcggtggggaagagccgctgccgctggttctccggctcttcctcggcggttctggctcccggccgcgccgcagccctgcccagtctctctcccccagcccggagggctcctccgcgccgcacgtgagcgcgcccgccaacagggccactgccgcgatacttttctgctgtgagaatgtaagatggatccagaagagcaggagctcttaaatgattacagatacagaagctactcttcagtgattgaaaaggctttgagaaattttgagtcctcgagtgaatgggcggatctcatatcttcacttggcaaactcaacaaggctcttcagagtaacctgaggtactccttgttgccaagacggctcctcatcagcaaaagattagctcagtgtttgcaccctgccctgcccagtggtgtccacttaaaagctctggaaacctacgagattatctttaaaatcgtggggaccaaatggctggccaaggacttgtttctgtacagctgcgggttatttcctctcctggcacacgcggcggtgtcggtgaggccggtgctgctcaccctgtacgagaagtacttcctcccactgcagaagctgctcctgcccagtctgcag

SEQ ID NO: 8757 - DNA, 7685 bp, Homo sapiens
  source 1..7685: mol_type = unassigned DNA
ttcatctcccacagtgcctggcccagaagccttgctaaatatttgaacaggattgcccaatacttttctgctgtgagaatgtaagatggatccagaagagcaggagctcttaaatgattacagatacagaagctactcttcagtgattgaaaaggctttgagaaattttgagtcctcgagtgaatgggcggatctcatatcttcacttggcaaactcaacaaggctcttcagagtaacctgaggtactccttgttgccaagacggctcctcatcagcaaaagattagctcagtgtttgcaccctgccctgcccagtggtgtccacttaaaagctctggaaacctacgagattatctttaaaatcgtggggaccaaatggctggccaaggacttgtttctgtacagctgcgggttatttcctctcctggcacacgcggcggtgtcggtgaggccggtgctgctcaccctgtacgagaagtacttcctcccactgcagaagctgctcctgcccagtctgcaggccttcatcgtgggcctgctgcccggccttgaagagggctccgagatctccgacagaacggatgctctgctcctgagactgtcgctggtggttggcaaagaggtgttttacaccgccctctgggggagcgtcctggccagcccgtccatccgcctccctgcctcagtcttcgtggtgggccacatcaacagggatgcccccggccgggagcagaagtacatgctggggaccaatcaccaactcacggtgaagtctttgcgtgcctccctgttggactcaaatgttcttgtgcaaagaaataatctggaaatcgttctgtttttcttcccattttatacctgtctggattccaatgagagagccatccccctcctcagatctgacatcgtgcgcattctctcagccgccacccagaccctactgagaagggacatgtccctgaacagaagactgtatgcatggttactaggctcagacataaaaggaaataccgttgtgccagaatctgaaatctcaaattcttatgaagaccagtcgtcttatttttttgaaaaatactccaaggatcttttagttgagggtttggctgagatattgcatcagaagttcatagatgctgacgtggaggaacgccatcatgcatacctgaagccttttcgcgtcctcatcagtctgcttgacaagccagaaatagggcctcaagtggttgggaatttgtttctcgaagtcatcagggccttttattcttactgcagagatgcccttggctctgatcttaaacttagctacacccagagtggaaattcgctgataagtgcaatcaaggaaaacagaaatgcctctgagattgtcaaaacggtaaatttgctgataacttctctaagcacagactttctctgggattatatgacaaggtgttttgaggaatgctttagaccagtgaagcagcgttacagcgtgaggaacagcgtcagccctccccccacggtctcggagctctgcgccctcctggtcttcctgctggatgtcattcctttggaactttactctgaggtgcaaacccagtatctccctcaggtgctcggctgcctggtgcagcctcttgctgaggacatggaggccttaagtttacctgaactcacgcatgccttgaagacgtgtttcaaggtgctcagcaaagtccagatgcctccttcctacctcgacacggagtccaccagcggaacctcgagtccagtaaaaggtgaaaacggcaaaataattttggaaacaaaggcagtgattcccggtgacgaagatgcttcgtttccccctctgaagtctgaggacagtgggatcgggctcagtgcctcgtcaccggagctctctgagcacttgagggttcctcgagtttctctggaaagggacgacgtttggaagaagggcgggagcatgcagaggacgtttctttgcatccaagagctaatcgccaactttgccagcaagaacatttttggagtacagctgacagcgtcaggagaagaaagcaagtccgaggagcctgcagggaagagggacagggatgggacgcagagcctggcagccaatgattccagcaggaagaactcttgggagcccaagcccatcactgtgcctcagttcaagcagatgctgtcagacttgttcacagcacgagggtctccattcaagacaaaaagttcagagtcaccatcgtcttcgcccagcagccctgccaggaaaaacgggggagaatgggatgttgagaaggtggtcattgacctggggggttccagggaggaacgcagggaggcctttgccgccgcctgccacctgctgctggattgtgccactttccctgtctacctgtccgaggaagagaccgagcagctctgtgcaacgctcttccagctgccaggagccggtgattccagttttccatcttggctgaagtccctcatgactatttgctgctgtgtgactgactgctacctccagaacgtggccatttccactctgctggaagtgataaaccattcccagtccctggcgcttgtcattgaagacaagatgaaacgctataagagctctggacacaaccctttttttggcaagctgcagatggtgacggttcctcccattgctccagggatattgaaagtcattgcagagaaaacagatttctatcagagggtggctcgtgtgctttggaatcagctgaacaaagagacccgggagcatcacgtcacctgcgtagaattgttctaccggctgcactgcctggcccctacggccaacatctgcgaggacatcatctgccatgccctcctggaccctgacaagggaacaaggctggaagctctgtttagattttccgtgatctggcatctgacaagagagatccaaggcagtcgagtaacatctcacaatcgctcctttgataggtccttgtttgtcgtgctggacagcctggcctgcacggatggtgccatcggtgcggcagcccagggctggctggtgcgtgcgctctccctcggggacgtggctcgcatcctcgaacccgtgctcctgctgctgctgcagccaaaaacccagagaacctccatccactgcctcaagcaggagaactcggccgatgacttgcaccgttggtttaacaggaagaaaacctctttcagagaggcatgcgcagtgcccgagcctcaggagagcggctctgaagagcacctgcctctgagccagttcaccacagtggaccgtgaagccatttgggccgaagtggagaaggagcccgagaagtacccgctgcgaggcgagctgagcgaggaagagctgccctactacgtggagcttccagacaggacggcccacggcgccccggacagcagcgagcacaccgagtctgcagatacaagctcctgccacacggacagcgagaacacgtcctccttctcctccccttcccacgacctgcaggagctgagcaacgaagagaactgctgtgcacccatccccatggggggcagggcgtaccccaagcgctcggccctgctggcggccttccagtcagaaagcttcaaggctggggccaagttaagcctggtgcgggtggactcggacaagacgcaggcttctgagtcgttctccagcgacgaggaggcggacttggagctccaggccctcaccacatccaggctgctaaagcagcagcgggaaaggcaggaggccgtcgaggccttgttcaagcacatcctgctctacctgcagccctacgactctcggcgggtcctctatgccttctcggtgctggaggctgtgctcaaaaccaaccctaaggaattcatcgaggctgtgtccaggactagcatggataccagctccaccgcgcacctcaacctcatctccaacctcctcgctcgccaccaggaggccctcattggccagagtttctacggaaagctccagacccaggtccccaacgtgtgcccccactctctgctcctggagctgctcacctacctctgcctgagcttcctgcgctcctactacccttgctatttgaaggtctcgcaccgagacattctcggcaaccgggacgtgcaggtcaaaagtgtcgaggttttgatcaggataatgatgcagctggtctcagtggccaagtcttcggaagggaagaacgtggagttcatccacagcttgctgcagaggtgcaaagttcaggagtttgtcctgctctccctgtcggcgtccatgtacacgagccagaagcgctacgggctggccaccgcccaccacggcagggccctgccagaggacagcctctttgaggagagtctcattaacttgggtcaggaccagatctggagtgagcacccgctgcagattgagctgctgaagctgctgcaggtgctgattgtcttggaacaccacctgggtcgggcccatgaggaggcggaaaaccagcccgacctgtcccgggagtggcagagagccctgaacttccagcaggccatcagcgccctgcagtacgtgcagccccaccccctcacctcccagggtcttctggtctctgcggtggtgaggggtctgcagcccgcctacggttacggcatgcatccggcctgggtgagcttggtcacgcattccttgccctacttcggaaagtccctgggctggacggtgacaccctttgttgtccagatttgcaaaaacttggatgacttggtcaagcagtatgaaagcgaatctgtgaagctctctgtcagcacaacctccaagagggaaaacatttctccagattatccactcacccttctagaaggtctaacgaccattagtcatttttgtcttttggaacaagccaaccaaaacaaaaagaccatggctgcaggtgatcctgccaacttgaggaatgccagaaatgccattttggaagagctgcctcgaactgttaacaccatggcccttctctggaatgttctcagaaaggaggagactcaaaagagacctgtcgatctcctaggggccacgaagggatcctcttccgtttactttaaaaccaccaaaaccataagacaaaaaattttagacttcttaaaccccttgacggcccatcttggggttcagttgacagcggctgttgcggcagtgtggagcagaaagaaagcccagcgtcacagtaagatgaagattatcccaacggcaagtgcatcccagctaacccttgtcgacttggtgtgtgcactcagcaccctgcagactgacacgctgctgcacctggtgaaggaggtggtgaagaggccaccccaagtcaaagggggtgatgagaaatcgcccctagtggacattcctgtgttgcagttttgctatgcttttctccaaaggctcccagtaccagccttgcaagagaacttttcttcactgttgggagtattgaaagagtctgtacagttgaatctagccccacctgggtattttctgcttctcagcatgctgaatgactttgtaacaagaactcccaacctggaaaacaagaaggaccaaaaagacctgcaggaaatcactcagaaaatcctagaagctgtggggaacattgccggctcttccttggagcaaaccagctggctaagcagaaacctggaagtgaaggcccaacctcaggcctctctagaagaatctgatgctgaggaggacctgtatgatgctgctgcagcttcagcaatggtgtcttcatccgccccgtcggtgtacagcgtgcaagccctctctctcctggcagaggtactggcttccctcctggacatggtttatcgaagtgatgagaaggagaaagctgtgccgttaatctcccgtctgctttactatgtttttccatacttacgcaaccacagtgcctacaatgctcccagcttccgggctggcgctcagctgctgagctccctgagtggctatgcctacacaaagcgagcctggaggaaggaggtcctggagctgtttctcgaccccgctttctttcagatggatacttcctgtgttcattggaagtccattattgaccatcttttgactcatgagaaaacaatgtttaaggatttaatgaacatgcagagcagttctttgaaactattctcaagttttgaacagaaagccatgctgttaaagcgccaggcttttgctgtcttcagtggagaacttgatcaataccacctttaccttccactgatacaagaacgcctgacagacaatctcagagttggacagacatccatagttgctgctcagatgtttctttttttcagagttttgctgctaagaatatctcctcaacatttgacttcattgtggccaataatggtctctgaattgattcagacattcacacagcttgaagaagatctaaaagatgaagatgagtcattgagaagcaccaacaaagtaaacagaacgaaagtttcagtcccggatgcaaatggaccctcagtgggggagataccccagagtgaactcatcttgtatttatcagcttgcaaattcttggacacagcgctttcttttccacctgacaagatgccattatttcaaatttataggtgggcatttattccagaagtggacacagagggccctgccttcctgtcggatgtagaggagaatcaccaagaatgcaaaccccacactgtcaggattctagaacttctaaaattaaagtttggggaaatcagtagctctgatgagatcaccatgaagagtgaattcccgcttctgcgccaacattctgtttccagcatcaggcagttgatgccattcttcatgactctaaatggtgcatttaagacccagagacagctgcctgctgatagcccaggaactccattcttggactttcctgtcacagatagcccaaggatcttaaaacaactggaagaatgcatcgaatatgattttctggaacatccagaatgttaaccatgtgagagagaatatgtttaatccatgtattggtactttactgaaaaccaggttatattctaaagaagaaagaaggcaggatagtgcttttgaacaagcctatttccattttgaaagtagatttcaggctaggtgcggtggctcacacctgtaatctcagcactttgggaggccaaggcaggcagatcacttgaggtcaggagttcgagaccagcctgaccaacatggtgagaccctgtctctactaaaaatacaaaaattagctgggtgtggtggcggcgcctgtaatcccagctacttgggaggctaaggcatgagaattgcttgaacccaggaggtggaggctgcagtgagccgagatcacgacactgcactccagctgtgtgacagaatgagaccatctccaaaaaaaaaaaaaagtagatttcagataatttactgttcagcaacaggacacacctccctaaatgccttgtaatatatttgaatctgattctgcatttcttcctcaatttatgtaatgaaaataaaattaatatatcatctaacagtagcacaaaatttgtaatatgaagtaaagtatgaagataatgaagaagttgttttctttgttgaagcagttatatgggtctttctcagtatatttctcttttctctaaaagtttaaacttattaaaagaatgttatttttaacctttca

SEQ ID NO: 8758 - DNA, 3216 bp, Homo sapiens
  source 1..3216: mol_type = unassigned DNA
gccgaggtatgctcggctcctgacccactcgccgggccccgagcgccgggccttggggctcggctgccttcctggcctgagctgcagctcgcagatggccttgcgcgctagccggacctggctgcggtggcccgggtgcagggcttctggctgggaccccagagagccagaaactacgctgcggggtttggtgctggggccagggtgagggcacggccgtccgggaggtggacacacccgaaggactgccctgtggggttgctgcttgcgacggggctgccgccttccctcctgtcccccgcagtgagatgagggcgttgggagggactttccaggaggggagcgccgggtgcgccctagggctgggcgggagcgctggcagagggagacttgaagctctatcgctgtttgctttgcagccaggcaggagcaacgcgcgcgggtccgttctgctgccaccctcccaggtctcggccgtccagccgatctgacagccggcgatgttttatttccactgcccgccacagctagagggcactgcaacctttggcaatcactcttcgggggattttgatgacgggtttctgcgtagaaaacagcgccggaaccggacgacgttcactcttcagcagctggaagctctcgaggccgtttttgcccaaacacactatccagatgtcttcaccagagaagagctcgccatgaaaataaacctcacagaagccagagtgcaggtttggttccagaacagaagggccaaatggaggaagacagagagaggggcctcagaccaggagccaggagccaaggagcccatggcagaggtgacacctcctccagtgagaaacatcaactccccgccccctggggaccaagcccggagtaagaaggaggcgctggaggcccagcagagcctggggcgaacggtaggtcctgcagggcctttcttcccctcctgcttgccggggactctcctgaacacggccacctacgcccaggccttgtcccatgtggcttccctcaaagggggcccactgtgctcttgctgcgtcccagaccccatgggactctccttccttcccacctatggctgccagagtaaccgcacggccagcgtggccaccctgcgcatgaaggcccgcgagcactcagaagctgtcctgcagtcagccaacctcctgccttccaccagcagcagccccggccctgtcgccaagccggcgcccccagatggcagccaggaaaagacctctcccaccaaggaacagagcgaggcagagaagagtgtatgagggtccacagtgccccgcccggcctgccctcccccgcccctccttctcccagcctcagcccctacagaaaactctccaaatagcaaggagaagcctgcggccccagggcctctgcatggacccaggacgggcaagtgagacccacagctcccttggcacctggagcgtccctctggagtcccaccagtgcggcagtgttgtcctggcttctttggcaacagatcccgatggcacttggtggcagcagagccctctctgtgaggagcctccctgggatttccatccaggcccagagtctcggagggaggtagattcctcatccgtctcccttcctatttcctccctgggctgcctttgaaggtcttgtcaaccccaggaactgtggcatgggctgaagtttcatgaaaagaaaagggcctgtcccgcttacagtgtttaagaactggggaactggtggaaccccaagcgactcttgctcccctggaccaagatgagcagtaatgccctttctcttgttggagaatattggttgtgggcttcattacaaagtgagaagatgcagggtagggaggggccaacaggacacagcctgtcccagaggaccacggtggctctgacccaggagatctcactggcacatctggccggggggctgggctaatcacccaggccacctgctccatgaactgggggctgctgtcttgacactgtgggtgtggaactagtgtggcccctgtacctgaagcactcacctgcaagcccttcctctctcccagatagacctgtggattggtgggaagttaagcaactgaaaagcagctctctggtccaggagggcctgagggcccttggagagggaagaagcccttcaggaatgcctctgaagtaattatgcatacagatgaactacctttccccacatgcctggcacgtagagggggctcttcagtggtggtggttttttactggggaaaaaaaagtaggaaaggagacaggaacggcgtatgtgcagatatggagcatggggaagacagctttctcatggtgtggagagcattaattccaaagggccaaatttcacagagatttctgttttggtctagtgtggctgttttctctggtgaggatggtgacctagaggagatccaaggggaacgtgcaatagcataagctctgccgctttctggcaggggcgcccggcatgggaaaggttgcagtctttggtggcttttgctgatggtgtttccatgcggatggttattgccttcatgatggttattttggtttcagttattatcgtcaaaatgttttactttcacatttcctgtcccctttttaccttcccccactccatgacccccaaataatactcctgagtgtatcatgccttgtctatgatcactacgaagcatttgataaaacccactgtctcctttaaagaaaaaaatcaaatccttcttcctgctgtattttgcttgttgagtataaagatgaaacgatttgccaaaaagcggcaaagttgcttccgtttccctgtaattacgaatgtttggttgaaggatgtaagctcaagcccttatgtacactaactcttcaatctaattgtttgattaaactcgtatttcctccagaaaggtacataaataagtgaactgttgagcaaattaagaatacttaacagcattgcatctgaaaagtagttatgctgattaaattttgtgtccttgaggactttcaggaaattacttttgatcgtcaataacacaattaagtaaactacacacacattagcatgaataattgataagaaattatgtattaccacgaagcactgatttaataattcatgatgcgacactctagtgactgtgcaaaactggatcatatcgaaaagtctgcctgatgttactgaaaggaaagaaaa

SEQ ID NO: 8759 - DNA, 807 bp, Homo sapiens
  source 1..807: mol_type = unassigned DNA
atggtgctgatgagctgtgaccaacggttgatcagtttgctcttggtaggcactgcaacctttggcaatcactcttcgggggattttgatgacgggtttctgcgtagaaaacagcgccggaaccggacgacgttcactcttcagcagctggaagctctcgaggccgtttttgcccaaacacactatccagatgtcttcaccagagaagagctcgccatgaaaataaacctcacagaagccagagtgcaggtttggttccagaacagaagggccaaatggaggaagacagagagaggggcctcagaccaggagccaggagccaaggagcccatggcagaggtgacacctcctccagtgagaaacatcaactccccgccccctggggaccaagcccggagtaagaaggaggcgctggaggcccagcagagcctggggcgaacggtaggtcctgcagggcctttcttcccctcctgcttgccggggactctcctgaacacggccacctacgcccaggccttgtcccatgtggcttccctcaaagggggcccactgtgctcttgctgcgtcccagaccccatgggactctccttccttcccacctatggctgccagagtaaccgcacggccagcgtggccaccctgcgcatgaaggcccgcgagcactcagaagctgtcctgcagtcagccaacctcctgccttccaccagcagcagccccggccctgtcgccaagccggcgcccccagatggcagccaggaaaagacctctcccaccaaggaacagagcgaggcagagaagagtgtatga

SEQ ID NO: 8760 - DNA, 5259 bp, Homo sapiens
  source 1..5259: mol_type = unassigned DNA
cccgcctagcatggtgcggcggccgcgcgcgcggacatgggggagaagctggagctgagactgaagtcgcccgtgggggctgagcccgccgtctacccgtggccgctgccggtctacgataaacatcacgatgctgctcatgaaatcatcgagaccatccgatgggtctgtgaagaaatcccggatctcaagctcgctatggagaattacgttttaattgactatgacaccaaaagcttcgagagcatgcagaggctctgcgacaagtacaaccgtgccatcgacagcatccaccagctgtggaagggcaccacgcagcccatgaagctgaacacgcggccgtccactggactcctgcgccatatcctgcagcaggtctacaaccactcggtgaccgaccccgagaagctcaacaactacgagcccttctcccccgaggtgtacggggagacctccttcgacctggtggcccagatgattgatgagatcaagatgaccgacgacgacctgtttgtggacttggggagcggtgtgggccaggtcgtgctccaggttgctgctgccaccaactgcaaacatcactatggcgtcgagaaagcagacatcccggccaagtatgcggagaccatggaccgcgagttcaggaagtggatgaaatggtatggaaaaaagcatgcagaatacacattggagagaggcgatttcctctcagaagagtggagggagcgaatcgccaacacgagtgttatatttgtgaataattttgcctttggtcctgaggtggatcaccagctgaaggagcggtttgcaaacatgaaggaaggtggcagaatcgtgtcctcgaaaccctttgcacctctgaacttcagaataaacagtagaaacttgagtgacatcggcaccatcatgcgcgtggtggagctctcgcccctgaagggctcggtgtcgtggacggggaagccagtctcctactacctgcacactatcgaccgcaccatacttgaaaactatttttctagtctgaaaaacccaaaactcagggaggaacaggaggcagcccggcgccgccagcagcgcgagagcaagagcaacgcggccacgcccactaagggcccagagggcaaggtggccggccccgccgacgcccccatggactctggtgctgaggaagagaaggcgggagcagccaccgtgaagaagccgtctccctccaaagcccgcaagaagaagctaaacaagaaggggaggaagatggctggccgcaagcgcgggcgccccaagaagatgaacactgcgaaccccgagcggaagcccaagaagaaccaaactgcactggatgccctgcacgctcagaccgtgtctcagacggcggcctcctcaccccaggatgcctacagatcccctcacagcccgttctaccagctacctccgagcgtgcagcggcactcccccaacccgctgctggtggcgcccaccccgcccgcgctgcagaagcttctagagtccttcaagatccagtacctgcagttcctggcatacacaaagaccccccagtacaaggccagcctgcaggagctgctgggccaggagaaggagaagaacgcccagctcctgggtgcggctcagcagctcctcagccactgccaggcccagaaggaggagatcaggaggctgtttcagcaaaaattggatgagctgggtgtgaaggcgctgacctacaacgacctgattcaagcgcagaaggagatctccgcccataaccagcagctgcgggagcagtcggagcagctggagcaggacaaccgcgcgctccgcggccagagcttgcagctgctcaaggctcgctgcgaggagctgcagctggactgggccacgctgtcgctggagaagctgttgaaggagaagcaggccctgaagagccagatctcggagaagcagaggcactgcctggagctgcagatcagcattgtggagctagagaagagccagcggcagcaggagctcctgcagctcaagtcctgtgtgccgcctgacgacgccctgtccctgcacctgcgtgggaagggcgccctgggccgcgagctggagcctgacgccagccggctgcacctggagctggactgcaccaagttctcgctgcctcacttgagcagcatgagcccggagctctccatgaacggccaggctgctggctatgagctctgcggtgtgctgagccggccttcgtcgaagcagaacacgccccagtacctggcctcacccctggaccaggaggtggtgccctgtacccctagccacgtcggccggccgcgcctggagaagctgtctggcctagccgcacccgactacactaggctgtccccggccaagattgtgctgaggcggcacctgagccaggaccacacggtgcccggcaggccggctgccagtgagctgcattcgagagctgagcacaccaaggagaacggccttccctaccagagccccagcgtgcctggcagcatgaagctgagccctcaggacccgcggcccctgtcccctggggccttgcagcttgctggagagaagagcagtgagaagggcctgagagagcgcgcctacggcagcagcggggagctcatcaccagcctgcccatcagcatcccgctcagcaccgtgcagcccaacaagctcccggtcagcattcccctggccagcgtggtgctgcccagccgcgccgagagggcgaggagcacccccagtcccgtgctgcagccccgtgacccctcgtccacacttgaaaagcagattggtgctaatgcccacggtgctgggagcagaagccttgccctggcccccgcaggcttctcctacgctggctcggtggccatcagcggggccttggcgggcagcccggcctctctcacacctggagccgagccggccaccttggatgagtcctccagctctgggagcctttttgccaccgtggggtcccgcagctccacgccacagcaccccctgctgctggcacagccccggaactcgcttcctgcctctcccgcccaccagctctcctccagtccccggcttggtggggccgcccagggcccgttgcccgaggccagcaagggagacctgccctccgattccggcttctcagatcctgagagtgaagccaagaggaggattgtgttcaccatcaccactggtgcgggcagtgccaagcagtcgccctccagcaagcacagccccctgaccgccagcgcccgtggggactgtgtgccgagccacgggcaggacagtcgcaggcgcggccggcggaagcgagcatctgcggggacgcccagcttgagcgcaggcgtgtcccccaagcgccgagccctgccgtccgtcgctggccttttcacacagccttcggggtctcccctcaacctcaactccatggtcagtaacatcaaccagcccctggagattacagccatctcgtccccggagacctccctgaagagctcccctgtgccctaccaggaccacgaccagccccccgtgctcaagaaggagcggcctctgagccagaccaatggggcacactactccccactcacctcagacgaggagccaggctctgaggacgagcccagcagtgctcgaattgagagaaaaattgcaacaatctccttagaaagcaaatctcccccgaaaaccttggaaaatggtggtggcttggcgggaaggaagcccgcgcccgccggcgagccagtcaatagcagcaagtggaagtccaccttctcgcccatctccgacatcggcctggccaagtcggcggacagcccgctgcaggccagctccgccctcagccagaactccctgttcacgttccggcccgccctggaggagccctctgccgatgccaagctggccgctcaccccaggaaaggctttcccggctccctgtcgggggctgacggactcagcccgggcaccaaccctgccaacggctgcaccttcggcgggggcctggccgcggacctgagtttacacagcttcagtgatggtgcttctcttccccacaagggccccgaggcggccggcctgagctccccgctgagcttcccctcgcagcgcggcaaggagggctcggacgccaaccctttcctgagcaagaggcagctggacggcctggctgggctgaagggcgagggcagccgcggcaaggaggcaggggagggcggcctaccgctgtgcgggcccacggacaagaccccactgctgagcggcaaggccgccaaggcccgggaccgcgaggtcgacctcaagaatggccacaacctcttcatctctgcggcggccgtgcctcccggaagcctcctcagcggccccggcctggccccggcggcgtcctccgcaggcggcgcggcgtcctccgcccagacgcaccggtccttcctgggccccttcccgccgggaccgcagttcgcgctcggccccatgtccctgcaggccaacctcggctccgtggccggctcctccgtgctgcagtcgctgttcagctctgtgccggccgccgcaggcctggtgcacgtgtcgtccgctgccaccagactgaccaactcgcacgccatgggcagcttttccggggtggcaggcggcacagttggagcaggaggtgtctttaaccacgcggtgccctccgcctctgctcatccgtttggagcccgtgtcggccgcggggctgcatgtggcagcgccacactgggcccgagcccgctgcaggcggcggccagcgcctcggcctcttcctttcaggccccggcctcggttgagacccggccgccccctccgcctccgcctccgcctcccccgctgcccccgcctgcgcacctgggccggtcccccgcggggccgcccgtcctccacgccccccctccacctaacgccgccttgcctcctcccccaacgctgctggcctctaaccctgagcccgcgcttctgcagagcctcgcgtccctcccgcctaaccaagctttcttgccccccacctctgctgcctctctgccgcctgctaacgcctctttgtctatcaagctcacctccctcccgcacaagggcgcccgcccctccttcacggtgcaccaccagcccctgccccggctggccctggcccaggccgcgcccgggatcccacaggccagcgccacggggccgtccgcggtgtgggtgtccctcggcatgccgcctccctatgccgcgcacctttcgggggttaagccgcgataa

SEQ ID NO: 8761 - DNA, 7436 bp, Homo sapiens
  source 1..7436: mol_type = unassigned DNA
cccgcctagcatggtgcggcggccgcgcgcgcggacatgggggagaagctggagctgagactgaagtcgcccgtgggggctgagcccgccgtctacccgtggccgctgccggtctacgataaacatcacgatgctgctcatgaaatcatcgagaccatccgatgggtctgtgaagaaatcccggatctcaagctcgctatggagaattacgttttaattgactatgacaccaaaagcttcgagagcatgcagaggctctgcgacaagtacaaccgtgccatcgacagcatccaccagctgtggaagggcaccacgcagcccatgaagctgaacacgcggccgtccactggactcctgcgccatatcctgcagcaggtctacaaccactcggtgaccgaccccgagaagctcaacaactacgagcccttctcccccgaggtgtacggggagacctccttcgacctggtggcccagatgattgatgagatcaagatgaccgacgacgacctgtttgtggacttggggagcggtgtgggccaggtcgtgctccaggttgctgctgccaccaactgcaaacatcactatggcgtcgagaaagcagacatcccggccaagtatgcggagaccatggaccgcgagttcaggaagtggatgaaatggtatggaaaaaagcatgcagaatacacattggagagaggcgatttcctctcagaagagtggagggagcgaatcgccaacacgagtgttatatttgtgaataattttgcctttggtcctgaggtggatcaccagctgaaggagcggtttgcaaacatgaaggaaggtggcagaatcgtgtcctcgaaaccctttgcacctctgaacttcagaataaacagtagaaacttgagtgacatcggcaccatcatgcgcgtggtggagctctcgcccctgaagggctcggtgtcgtggacggggaagccagtctcctactacctgcacactatcgaccgcaccatacttgaaaactatttttctagtctgaaaaacccaaaactcagggaggaacaggaggcagcccggcgccgccagcagcgcgagagcaagagcaacgcggccacgcccactaagggcccagagggcaaggtggccggccccgccgacgcccccatggactctggtgctgaggaagagaaggcgggagcagccaccgtgaagaagccgtctccctccaaagcccgcaagaagaagctaaacaagaaggggaggaagatggctggccgcaagcgcgggcgccccaagaagatgaacactgcgaaccccgagcggaagcccaagaagaaccaaactgcactggatgccctgcacgctcagaccgtgtctcagacggcggcctcctcaccccaggatgcctacagatcccctcacagcccgttctaccagctacctccgagcgtgcagcggcactcccccaacccgctgctggtggcgcccaccccgcccgcgctgcagaagcttctagagtccttcaagatccagtacctgcagttcctggcatacacaaagaccccccagtacaaggccagcctgcaggagctgctgggccaggagaaggagaagaacgcccagctcctgggtgcggctcagcagctcctcagccactgccaggcccagaaggaggagatcaggaggctgtttcagcaaaaattggatgagctgggtgtgaaggcgctgacctacaacgacctgattcaagcgcagaaggagatctccgcccataaccagcagctgcgggagcagtcggagcagctggagcaggacaaccgcgcgctccgcggccagagcttgcagctgctcaaggctcgctgcgaggagctgcagctggactgggccacgctgtcgctggagaagctgttgaaggagaagcaggccctgaagagccagatctcggagaagcagaggcactgcctggagctgcagatcagcattgtggagctagagaagagccagcggcagcaggagctcctgcagctcaagtcctgtgtgccgcctgacgacgccctgtccctgcacctgcgtgggaagggcgccctgggccgcgagctggagcctgacgccagccggctgcacctggagctggactgcaccaagttctcgctgcctcacttgagcagcatgagcccggagctctccatgaacggccaggctgctggctatgagctctgcggtgtgctgagccggccttcgtcgaagcagaacacgccccagtacctggcctcacccctggaccaggaggtggtgccctgtacccctagccacgtcggccggccgcgcctggagaagctgtctggcctagccgcacccgactacactaggctgtccccggccaagattgtgctgaggcggcacctgagccaggaccacacggtgcccggcaggccggctgccagtgagctgcattcgagagctgagcacaccaaggagaacggccttccctaccagagccccagcgtgcctggcagcatgaagctgagccctcaggacccgcggcccctgtcccctggggccttgcagcttgctggagagaagagcagtgagaagggcctgagagagcgcgcctacggcagcagcggggagctcatcaccagcctgcccatcagcatcccgctcagcaccgtgcagcccaacaagctcccggtcagcattcccctggccagcgtggtgctgcccagccgcgccgagagggcgaggagcacccccagtcccgtgctgcagccccgtgacccctcgtccacacttgaaaagcagattggtgctaatgcccacggtgctgggagcagaagccttgccctggcccccgcaggcttctcctacgctggctcggtggccatcagcggggccttggcgggcagcccggcctctctcacacctggagccgagccggccaccttggatgagtcctccagctctgggagcctttttgccaccgtggggtcccgcagctccacgccacagcaccccctgctgctggcacagccccggaactcgcttcctgcctctcccgcccaccagctctcctccagtccccggcttggtggggccgcccagggcccgttgcccgaggccagcaagggagacctgccctccgattccggcttctcagatcctgagagtgaagccaagaggaggattgtgttcaccatcaccactggtgcgggcagtgccaagcagtcgccctccagcaagcacagccccctgaccgccagcgcccgtggggactgtgtgccgagccacgggcaggacagtcgcaggcgcggccggcggaagcgagcatctgcggggacgcccagcttgagcgcaggcgtgtcccccaagcgccgagccctgccgtccgtcgctggccttttcacacagccttcggggtctcccctcaacctcaactccatggtcagtaacatcaaccagcccctggagattacagccatctcgtccccggagacctccctgaagagctcccctgtgccctaccaggaccacgaccagccccccgtgctcaagaaggagcggcctctgagccagaccaatggggcacactactccccactcacctcagacgaggagccaggctctgaggacgagcccagcagtgctcgaattgagagaaaaattgcaacaatctccttagaaagcaaatctcccccgaaaaccttggaaaatggtggtggcttggcgggaaggaagcccgcgcccgccggcgagccagtcaatagcagcaagtggaagtccaccttctcgcccatctccgacatcggcctggccaagtcggcggacagcccgctgcaggccagctccgccctcagccagaactccctgttcacgttccggcccgccctggaggagccctctgccgatgccaagctggccgctcaccccaggaaaggctttcccggctccctgtcgggggctgacggactcagcccgggcaccaaccctgccaacggctgcaccttcggcgggggcctggccgcggacctgagtttacacagcttcagtgatggtgcttctcttccccacaagggccccgaggcggccggcctgagctccccgctgagcttcccctcgcagcgcggcaaggagggctcggacgccaaccctttcctgagcaagaggcagctggacggcctggctgggctgaagggcgagggcagccgcggcaaggaggcaggggagggcggcctaccgctgtgcgggcccacggacaagaccccactgctgagcggcaaggccgccaaggcccgggaccgcgaggtcgacctcaagaatggccacaacctcttcatctctgcggcggccgtgcctcccggaagcctcctcagcggccccggcctggccccggcggcgtcctccgcaggcggcgcggcgtcctccgcccagacgcaccggtccttcctgggccccttcccgccgggaccgcagttcgcgctcggccccatgtccctgcaggccaacctcggctccgtggccggctcctccgtgctgcagtcgctgttcagctctgtgccggccgccgcaggcctggtgcacgtgtcgtccgctgccaccagactgaccaactcgcacgccatgggcagcttttccggggtggcaggcggcacagttggaggtaactaggatttctacctcaaccgcgagacctatgcaaggacggtgtggaccaactcgcgcccgcggcatggtgcccgccggcctgccgggctcccacccctggacggcagaggcaaggacggacgggagctccactgtgaatcggcggcacgcgccgcaggaggctgggactggtccagtttgtactgtcgatagttttagataaagtatttatcattttttaaaaagtataaacaattctgacttattttattccatctaagtggtaaaaggcaacttattgagaaatataaatatctatatatgagagctctatataaagacacgtgtctgcagggcgggcccgccagcggattcgccacagcctgccccggtgctatctcgtccccaggcccgcgcctgcctccacccgcttggtgctgactagacgctgacaacgccgaaccccgttctcggaaacgccgcccggccggctcccccgacgcgctgctcccgtaccaaaggcaggcccgtcgccaccacattcctcggaggcctccccgcggcctgagccccttcctgagcgccctggcgcctgccctgagctcttcacctttaccccggcactgtgaacccccagactgttcaccctccggggcgtgggttgcgcccttgcatgtgaaggggcctgcgcggtgacgcagctggccatgtgctgcgcgatggtgctgtgaggacggcgcgggcacgttgaacaagtgcatttacttttgtatttctcggctgtccatggctcgcagcatgccctgcgatgcggggcaggcctgtcgtgggtcccttggtgtttctgtacaggagagagtcacactaatgagtggcagtattttatagagatgtgatgagaatttataaatttcatagatttgacagcttttatttttagatggtataatgcacagtgaagaggaaagaaaagcgaggggaaaaaaccttatttattcaaacagtgcacaaaatggccccagcgtcagccccgaccctagacccctcagttgcagctcccagcagcccagacagagctgccggcgcccctgcctgccccacatcccttcctgtcagggccacgcctggcacccatcccttggagcctgtgctggttctcccagctgctgtgggtgtgctggggccagggtgcactgctgaaacctggcctctctggccctaggccccagggtgacgtcggccccccactctgcagccttggcgggtgcctgggactgggtgtggaaggagaggagctgaggccggggtgtagcaggcaggcagggccactccagtgcttctggagccctgagcagtcagggcctgggttgtctgagcagtggtggctctgtgccctccctggaggatgggatctgggagtctgagctccccgcatctggccctgggctgtgtggcacttgctgagcccaccttctcaagtgcttgctcctgtgagatggcatcggggagccccttccccaaggtgccacagatccaccctccagggagctgccagccctgtgttctggttcccaagggcaggatggacacacgtcacatccctaccacgtggcctccaaagggagccacggaggaaaggcttctgtggttgctaggtgggggagtcctgtgtgggagggcctgaagacccctgcttgtgcctggtgaggggggtgctgcctcccccagcccccaacaacctctcagacccccaccctccaacatagctgagttctgaagatggtgctccggacctgtcctcttaagtggtgcccagtgccctccccaccccacgttggtgctctcagctagaaggtgctgtgcctctgcctgagccccaagccccgagcctggccttcaggacaggcagcctgctctgtgtcgccacgggccggatacgccacagggttgatggcagagacggccgagtccctggtctagaacaagacacattctttaaacactgtattacttctgcctccctctaggtgacagtggcagtccgggtgccatcacgggtcctgcagatggccatgcagggctcctgcccacgcaggccaccgtatgttcaggacacgcactgggtctcagagccactggcccaggcagaagtctccttgagcccactgggtcatatgcgtgtcaccacacgtgaactagtgtggtggctgcctgcggacaccctcctgttctgagccctgggcctgtgttcttctcagacactcccagactgaggggtggtgtgtggcgggtggcagggtggctgtggagactggggatctggagcctggtgctggcacctggcctgagtttccgtgggcagctggcggggacctgtgctgctgctgctgactgtgggtgggcgggcggcgcctgggagtggctcttgctcaggaattgataggaaccctaaaaactaggataccccctcctcggcccatgaggcacgcacagtgacttatttaagacttcccccttaatttatctgcccccaggatgcgtcagtctgttcagtggtcagcaggccccccaccccccgccgactgccctcgccatcgtggtcagacccccctcccaacacaacacgctgctggtctgtgtcagcctttgtaacgtgggaggctctgccgtgtcttccgggtgaactgtatttggattgcgcgcattgtcacggtccgcccctgggctgcaggcgccccttcctctgggcacccctgcattctgcatccccacctctagacgctgtaataaacagactgttttcactcgga

SEQ ID NO: 8762 - DNA, 2066 bp, Homo sapiens
  source 1..2066: mol_type = unassigned DNA
cgccgccgcgccggctgcatcctcgcctccacctcgctcaccccctcctccccgcactttctcggcgctccctccctctcggctcgcacagctcgactccgcgctctcctcgccggccgccgccgcccagcctgcgcccgccgtccccccagtgcctgggcacctgttggaggcagagccaggggtgctgcatgaggggccgcaggggcgatcgcatgaccatcaacatccaggagcacatggccatcaacgtgtgccccgggcccatccggcccatccgccagatctctgactacttcccccggggaccaggacctgaagggggcggcgggggcggcggggaggcccccgcccatctggtccccctggctctggccccccctgcagccctccttggggccaccacgcctgaggatggtgcggaggtggacagctatgactcggatgatgccaccgccctaggcacgctggagtttgaccttctctacgaccgggcctcctgcactctgcactgtagcatcctcagggccaagggcctcaagcccatggatttcaatggcctcgccgacccctacgtcaagctgcacttgctgcctggagcctgtaaggccaataagctaaaaacgaagactcagaggaacacactgaatcccgtgtggaatgaggacctgacttacagcgggatcacagatgacgacatcacgcacaaggtgctcaggatcgccgtctgtgatgaggacaagctgagtcacaatgagtttattggggagatccgcgtgcccctccgccgcctcaagccttcgcagaagaagcattttaacatctgcctcgagcgccaggtcccgctggcgtccccctcttccatgtcagcggcgctgaggggcatctcctgttatctgaaggagttggagcaggcggagcaggggcaggggctgctggaggagcgtggccgcatcctgctgagtctcagctacagctcgcggcgccggggactgctggtaggcatcttgcgctgcgcccatctggctgccatggacgtcaacggttactcggacccctacgtcaagacgtacctgaggcccgatgtggacaagaaatccaagcataagacgtgtgtgaagaagaagactctcaacccagaatttaacgaggagtttttctacgagatagagctctccactctggccaccaagaccctggaagtcaccgtctgggactatgacattggcaaatccaatgacttcattggtggcgtgtccctggggccaggtgcccgaggcgaggctcggaagcactggagtgactgcctgcagcagccggacgcagccctggagcgctggcacaccctgaccagtgagctgccccctgcggccggggctctgtcctcagcctgagtggacagcagtgtcccggcacaggcccatcgagccgggtccagtacccaaccttcgcacgagtgtgttgcacgtttacacagggtgggctgcccccaccctgcactacctatttttgtgagtctccgtgacccgggtctgtctgctcatgaggggctgcggagttctatattcacatatgcaaacctcctgcctgactcgctagtccctgcaaatatgcaaaccccccatcatctgcacacccgggcagtgctcagagcccggccccaggcccccgcgctcctcactcctgcctctccacgctgccccgtccctctcccccaacagggaggaggtcggattaggggaggttcagaggaggagaatgtctcaaaaaaaaaggacaaaaaacaaacccagagccactcctttaatacagaaacttcattgaaaaaacctagccctgtacagctgcccttttaaagaggtggccattgcagggtctctgcctccccagcaggtggcagatgctcccggccactcgtttaaataactgtcccctggagggggccggggtttgaaggcagggcccctgccaccctcctgggggacacccgtgcatgtttacgccttttctggttgtgtcagtggccggagcatggcagctgggcatcaataaacacctccgaggaa

SEQ ID NO: 8763 - DNA, 927 bp, Homo sapiens
  source 1..927: mol_type = unassigned DNA
atgaccctccggcggcgcggggagaaggcgaccatcagcatccaggagcatatggccatcgacgtgtgccccggccccatccgtcccatcaagcagatctccgactacttcccccgcttcccgcggggcctgcccccggacgccgggccccgagccgctgcacccccggacgcccccgcgcgcccggctgtggccggtgccggccgccgcagcccctccgacggcgcccgcgaggacgacgaggatgtggaccagctcttcggagcctacggctccagcccgggccccagcccgggtcccagccccgcgcggccgccagccaagccgccggaggacgagccggacgccgacggctacgagtcggacgactgcactgccctgggcacgctggacttcagcctgctgtatgaccaggagaacaacgccctccactgcaccatcaccaaggccaagggcctgaagccaatggaccacaatgggctggcagacccctacgtcaagctgcacctgctgccaggagccagtaaggcaaataagctcagaacaaaaactctccgtaacactctgaaccccacatggaacgagaccctcacttactacgggatcacagatgaagacatgatccgcaagaccctgcggatctctgtgtgtgacgaggacaaattccggcacaatgagttcatcggggagacacgtgtgcccctgaagaagctgaaacccaaccacaccaagaccttcagcatctgcctggagaagcagctgccggtggacaagactgaagacaagtccctggaggagcggggccgcatcctcatctccctcaagtacagctcacagaagcaaggcctgctggtaggcatcgtgcggtgcgcccacctggccgccatggacgccaacggctactcggacccctacgtgaaaacgtga

SEQ ID NO: 8764 - DNA, 1080 bp, Homo sapiens
  source 1..1080: mol_type = unassigned DNA
tccgcagcggagcgggcagcggccaagtcagggccgtccgggggcgcggccggcgatgcccgcagcccccgccgcgccccgccgggcctgctgagccgcccccgggccggggtcgcgccgggccgggccgcgcccggggcggggcggcgctgcctgcatgaccctccggcggcgcggggagaaggcgaccatcagcatccaggagcatatggccatcgacgtgtgccccggccccatccgtcccatcaagcagatctccgactacttcccccgcttcccgcggggcctgcccccggacgccgggccccgagccgctgcacccccggacgcccccgcgcgcccggctgtggccggtgccggccgccgcagcccctccgacggcgcccgcgaggacgacgaggatgtggaccagctcttcggagcctacggctccagcccgggccccagcccgggtcccagccccgcgcggccgccagccaagccgccggaggacgagccggacgccgacggctacgagtcggacgactgcactgccctgggcacgctggacttcagcctgctgtatgaccaggagaacaacgccctccactgcaccatcaccaaggccaagggcctgaagccaatggaccacaatgggctggcagacccctacgtcaagctgcacctgctgccaggagccagtaaggcaaataagctcagaacaaaaactctccgtaacactctgaaccccacatggaacgagaccctcacttactacgggatcacagatgaagacatgatccgcaagaccctgcggatctctgtgtgtgacgaggacaaattccggcacaatgagttcatcggggagacacgtgtgcccctgaagaagctgaaacccaaccacaccaagaccttcagcatctgcctggagaagcagctgccggtggacaagactgaagacaagtccctggaggagcggggccgcatcctcatctccctcaagtacagctcacagaagcaaggcctgctggtaggcatcgtgcggtgcgcccacctggccgccatggacgccaacggctactcggacccctacgtgaaaac

SEQ ID NO: 8765 - DNA, 1501 bp, Homo sapiens
  source 1..1501: mol_type = unassigned DNA
atggccctcccgacaccctcggacagcaccctccccgcggaagcccggggacgaggacggcgacggagactcgtttggaccccgagccaaagcgaggccctgcgagcctgctttgagcggaacccgtacccgggcatcgccaccagagaacggctggcccaggccatcggcattccggagcccagggtccagatttggtttcagaatgagaggtcacgccagctgaggcagcaccggcgggaatctcggccctggcccgggagacgcggcccgccagaaggccggcgaaagcggaccgccgtcaccggatcccagaccgccctgctcctccgagcctttgagaaggatcgctttccaggcatcgccgcccgggaggagctggccagagagacgggcctcccggagtccaggattcagatctggtttcagaatcgaagggccaggcacccgggacagggtggcagggcgcccgcgcaggcaggcggcctgtgcagcgcggcccccggcgggggtcaccctgctccctcgtgggtcgccttcgcccacaccggcgcgtggggaacggggcttcccgcaccccacgtgccctgcgcgcctggggctctcccacagggggctttcgtgagccaggcagcgagggccgcccccgcgctgcagcccagccaggccgcgccggcagagggggtctcccaacctgccccggcgcgcggggatttcgcctacgccgccccggctcctccggacggggcgctctcccaccctcaggctcctcggtggcctccgcacccgggcaaaagccgggaggaccgggacccgcagcgcgacggcctgccgggcccctgcgcggtggcacagcctgggcccgctcaagcggggccgcagggccaaggggtgcttgcgccacccacgtcccaggggagtccgtggtggggctggggccggggtccccaggtcgccggggcggcgtgggaaccccaagccggggcagctccacctccccagcccgcgcccccggacgcctccgcctccgcgcggcaggggcagatgcaaggcatcccggcgccctcccaggcgctccaggagccggcgccctggtctgcactcccctgcggcctgctgctggatgagctcctggcgagcccggagtttctgcagcaggcgcaacctctcctagaaacggaggccccgggggagctggaggcctcggaagaggccgcctcgctggaagcacccctcagcgaggaagaataccgggctctgctggaggagctttaggacgcggggttgggacggggtcgggtggttcggggcagggcggtggcctctctttcgcggggaacacctggctggctacggaggggcgtgtctccgccccgccccctccaccgggctgaccggcctgggattcctgccttctaggtccaggcccggtgagagactccacaccgcggagaactgccattctttcctgggcatcccggggatcccagagccggcccag

SEQ ID NO: 8766 - DNA, 1617 bp, Homo sapiens
  source 1..1617: mol_type = unassigned DNA
ccaccccccccccccaccaccaccaccaccaccaccccgccggccggccccaggcctcgacgccctgggtcccttccggggtggggcgggctgtcccaggggggctcaccgccattcatgaaggggtggagcctgcctgcctgtgggcctttacaagggcggctggctggctggctggctgtccgggcaggcctcctggctgcacctgccgcagtgcacagtccggctgaggtgcacgggagcccgccggcctctctctgcccgcgtccgtccgtgaaattccggccggggctcaccgcgatggccctcccgacaccctcggacagcaccctccccgcggaagcccggggacgaggacggcgacggagactcgtttggaccccgagccaaagcgaggccctgcgagcctgctttgagcggaacccgtacccgggcatcgccaccagagaacggctggcccaggccatcggcattccggagcccagggtccagatttggtttcagaatgagaggtcacgccagctgaggcagcaccggcgggaatctcggccctggcccgggagacgcggcccgccagaaggccggcgaaagcggaccgccgtcaccggatcccagaccgccctgctcctccgagcctttgagaaggatcgctttccaggcatcgccgcccgggaggagctggccagagagacgggcctcccggagtccaggattcagatctggtttcagaatcgaagggccaggcacccgggacagggtggcagggcgcccgcgcaggcaggcggcctgtgcagcgcggcccccggcgggggtcaccctgctccctcgtgggtcgccttcgcccacaccggcgcgtggggaacggggcttcccgcaccccacgtgccctgcgcgcctggggctctcccacagggggctttcgtgagccaggcagcgagggccgcccccgcgctgcagcccagccaggccgcgccggcagagggggtctcccaacctgccccggcgcgcggggatttcgcctacgccgccccggctcctccggacggggcgctctcccaccctcaggctcctcggtggcctccgcacccgggcaaaagccgggaggaccgggacccgcagcgcgacggcctgccgggcccctgcgcggtggcacagcctgggcccgctcaagcggggccgcagggccaaggggtgcttgcgccacccacgtcccaggggagtccgtggtggggctggggccggggtccccaggtcgccggggcggcgtgggaaccccaagccggggcagctccacctccccagcccgcgcccccggacgcctccgcctccgcgcggcaggggcagatgcaaggcatcccggcgccctcccaggcgctccaggagccggcgccctggtctgcactcccctgcggcctgctgctggatgagctcctggcgagcccggagtttctgcagcaggcgcaacctctcctagaaacggaggccccgggggagctggaggcctcggaagaggccgcctcgctggaagcacccctcagcgaggaagaataccgggctctgctggaggagctttaggacgcggggttgggacggggtcgggtggttcggggcagggcg

SEQ ID NO: 8767 - DNA, 9405 bp, Homo sapiens
  source 1..9405: mol_type = unassigned DNA
cttatttcttatgaatgtcggatagctgcaccagcttggtggggaaagggtttgatgaatagcacaaagacactggctgttccctggaggctgtccctttaaaggagaatcttagtttattctggggggaggggatgcacacattagagtaggaaagagggcttggaataaaatgaaaacactcccccttcatagtcattgtactgaaatgcaaagactgcttcctaagctggagatgctaaccttgggtagctccttctgttctcttcaaggggaattttgtcaggctatggattcatttacaactgttagtcatgtgggcatgtgtgaggaaacagatgccagttttaatgtatttagcccgaagttccaatttgataggagccactgtcagtctctgaggttccaccaaaatatggaacttgattttggacactttgacgaaagagataagacatccaggaacatgcgaggctcccggatgaatgggttgcctagccccactcacagcgcccactgtagcttctaccgaaccagaaccttgcaggcactgagtaatgagaagaaagccaagaaggtacgtttctaccgcaatggggaccgctacttcaaggggattgtgtacgctgtgtcctctgaccgttttcgcagctttgacgccttgctggctgacctgacgcgatctctgtctgacaacatcaacctgcctcagggagtgcgttacatttacaccattgatggatccaggaagatcggaagcatggatgaactggaggaaggggaaagctatgtctgttcctcagacaacttctttaaaaaggtggagtacaccaagaatgtcaatcccaactggtctgtcaacgtaaaaacatctgccaatatgaaagccccccagtccttggctagcagcaacagtgcacaggccagggagaacaaggactttgtgcgccccaagctggttaccatcatccgcagtggggtgaagcctcggaaggctgtgcgtgtgcttctgaacaagaagacagcccactcttttgagcaagtcctcactgatatcacagaagccatcaaactggagaccggggttgtcaaaaaactctacactctggatggaaaacaggtaacttgtctccatgatttctttggtgatgatgatgtgtttattgcctgtggtcctgaaaaatttcgctatgctcaggatgatttttctctggatgaaaatgaatgccgagtcatgaagggaaacccatcagccacagctggcccaaaggcatccccaacacctcagaagacttcagccaagagccctggtcctatgcgccgaagcaagtctccagctgactcagcaaacggaacctccagcagccagctctctacccccaagtctaagcagtctcccatctctacgcccaccagtcctggcagcctccggaagcacaaggacctgtacctgcctctgtccttggatgactcggactcgcttggtgattccatgtaaaggaggggagagtgctcagagtccagagtacaaatccaagcctatcattgtagtagggtacttctgctcaagtgtccaacagggctattggtgctttcaagtttttattttgttgttgttgttattttgaaaaacacattgtaatatgttgggtttattttcctgtgatttctcctctgggccactgatccacagttaccaattatgagagatagattgataaccatcctttggggcagcattccagggatgcaaaatgtgctagtccatgacctttcaatggaaagcttaggtgcctgcgttatatttgccctgtctaattttgcccatacagtcttccttctgtagagggctgtttacatatacagcacttaaaatgtttgtgtgggaaaaaaaaaactcattggcagatccaagaatgacaaacacaagtgccccttttctctggatctcaagaatggtggaggaccctggaaggacagcaaggcagctccccagcctcactcttcactcctgattgaggcccgggtttgttgtccagcaccaattctggctgtcaatggggagaaataaaccaacaacttataattgtgacaccagatgcttaggatcctggtgctgggttagctaagagaatagacagaattggaaaatactgcagacatttccgaagagtttataaagcacagtgaattcctggtcaatctctccactgaggcaatttggaatcaataagcaattgataatagtttggagtaagggacttcatatacctgattcctctagaaggctgtctaacataccacatgattacatgaactgtatggtatccatctatctctgttctattgaatgccttgttaacagccaacactgaaaacactgtgagaatttgttttcaggtctgacacctttcagtctctttttatagcaagaaatcaatatcctttttataaaaattcatgtctgtatttcaggagcaaactcttcaggctccttttttataaactggtgatttttcttttgtctaaaaaacacatgaagaaaatttaccaaaaaaaaaaaaaaaagcagaagaataatgtagtttagaaattatgctgtcactgccaaacagtaacctccaggagaaaacaagatgaatagcagaggccaattcaatagaatcagttttttgatagctttttaacagttatgcttgcattaataatttcaatgtggaccagacattctaattatattttaaatgaaatgttacagcatattttaagcaactctttttatctataatcctaatatttcatactgaagacacagaaatctttcacttgtctttaacattagaaaggatttctctttactaaggactgatcatttgaaatagttttcagtcttttgagatacaggtttataacactgcttttttttttctgtaatcatagcccataatggcaaagacaactaaatttaagtgaaggtcatgcatgccaattctgtgtttgcttttagcagatatgaagatttccttatttctttgtaattgtgcagatattttgaaaggcacagcattcgaagccaagctgctgtttggctactgaatggcttgcagttgttcctccactctaaatggaatgagcttgctgtgtgtgtgtgtggtggtggtgggagggggtggtgcatgtgtgtgtgtgtgtgtgcatctgcagctgcttcaaaattaggaaatactacaggacacccctgtaatggattggtggcaactgggtggcactgctgatgtgcactgtgtaggggggaacccagtggtggtggggtagctcagatgcccctagacaagcttcagatgtctgtagctaccagaaacattttcggttcaggaaaagtgagatgatggtagtactggtttctggtgaaattgaagaaccccaaatgatgaggatctctttttgccccctctcctttttttgtagacccattcaaaaccattaataagcccattttactaagcccctatttctttctagaagctcagggttttcttagtgcctcccagaacattttgtagttaattgggaaaaagtgatacttggattagggggtgtgggcataaagaatggtgggaggcctgattttaaacttcaggccagaacccccaatgactccacccatagtctcactttaggtctcatttagtccatcacctttattttaagttgaggaagtggaggctggtaaagagcaggaccagaggaagaatccagatttccttatgcttgggcctcacactagctctctgagtatttccttgattgcggtatatgtactactagaaaataccaaatggatatattttctttaggataacctttgaaccaacaatcttcaataacaatagtacatcttccatcttacttttaatcgagtataaggaaatgtttctttatggccattttggagggagcaggggatgaggcttggcatagtccaaaatttaagtctccaataattaattgcattttaaattggcccactttcaaggcaattttttttgtgtgtctgtaactgagctcctccacccctgtcattcacttccaattttacccaatccaattttagcactcaagttccattgtgttaatttctgcacggtcaacaaacatcaagtcagcaagcatttgccaccactccctatacttctccctccttcttacacacacacacacacacacacacacaatccatctcttgcttgttcctacctcctgatttttcttccctacagaaatagaaatagggacaaagaaggggaaaatgtatatattggggctgggctgaacaactaacttcataagtagtattaactaggggtaaattgagagaaaagctccttttctcttcactgttttggaaaggatagccattagcatgactgctttgtgtccttatggactttagtattagcctagattgaattatagcgttttctagctggaaggaaccttaagatcacatcatctactcctctactccaaatttctcattcttcaggccaggaaaccgagacacagaggtaaagtaatttccccaaggtcacacagctggctggggcaggattgggtttacaacccacatctcctggctcttattccagggccttttcccactaagtagtattgccttccattaggctcctgagagttatttctcagggtcatgttgcatcttggagccacatgctgctgccctgatctcagtgggaaatccacccagcaacctaatacagccccttttccctgcattcacctggttcccatccacatgggttgcagatgtccttgaagagagtgaggcattgagggccaataggagcaatggggtccctggccttgtccatctgattcaggagatcactgctccatcgtgaggagccctctgaatagccccccactgaatgcttgccttgcccaaatggaatggaggaagattgattttctccatcagttcaccttgtgtcatctcataatggttggtctttccaggctgagggaaatgtttcttgtttccagagtagaaaaagaaagagtggaacaatagctttgttcatcctaactttctgagatggcttttcaacattttaaaaaaactagtgtggctaccattcactggcaatgatttcttttagaatatgggagtaagatgagctagagaaaataacctggtctcactgtggttgccctcatccacaatgtccccaaagccatcctgctctgatgaggacaatttccaggtataagcaaggggctttgtgacaaaaatgtaccctggctgatgttaaacattggctcctgtgtttgcaccaaaatagcaagctgtgtgctctatacactcttcccatcgtcttgtgtacactgctcctgtggccttccacagcagaaaccagggcaaaagggtccaaacacatggttttccttgctgcaaggctcttcctgggaactaagggggtatttattagttcagttctaagagacctccttctgggcttaccccactcctcaggtacttctctctccttcctccttctcctccacagtcacaagtaaccaaggaacctgaaagtggatgtgtagctatttgaagaaggcaaggaaccctgagattcttctttgaatcctctagtccaagtcttagaccagtgattggtgcttaccttgaacaaaattttgtctgtgttcctaatcccttcaatactctgggtacaatgctcccaatcaccctgcacatttgattctaaatggcttttattttttaaaaatccatatccctaggacaagagaacaggatgcctatatccccaaaatgagctccaggacactgatgggaatgatcccaaagatcaccccacctcagaaacgtctgtgccaagagacttccccagatagaaacactgggacagtggtttgaacgacttcttttatggttgtccagtttgctatggaaataaaaggcattgattttttaaaaagatgattggaacctgtctttggccacatagggccacttggatccatttccaggccttactcatatattgccttcactgaagggctttggctttaagtcccagactggtctcccaagtgaaccataagtgttttggagctcatctggggtgaggcatgagaatgttgccccatctatcccttcaggaaaaggtgccttccctccctttctcctaaagcctggtccccagaaattgtttttgtctccaaaagtctagtatggtctttatacacccagactcttagtgttgcgtcctgccttgtttccttgttaaggatctatgcagacctcccgctttggcttagctagcgtgacattggctatcatttgacaagactaacttttttttttttttttttttgactgagtctccctctgtcacctaggctggagtgcagtggcacaatcttggctcgctgcaaccttcacccttcacctcccaggtcgaagcgattctcctgcctcagtctcccgagtagctgggattacaggcgtgcgccaccaaatctggctatttttttattattattatttttagtagagatggggtttcaccatgttggccagactggtcttgaactcttggcctcaaattatctgcccacctcggcctcccaaagtgctgggattacaggcatgagccaccatgcccagctgacaagactaattttttatcccttggtttattggcttcaacatcttctggaatcagaggtgattttttcttaccttggatgcctgagactaggggagtatagaattccaattggtaattaaggcatctttctgctcctgatcagaagggcaggttagttgggagaggtcagatggcacaacagaagtcaccttgtaagtaaggcaaagacttgaaggcattagcgtttctcattactaggtcaataacctgagggaatcaatggctttttgccgctctacctcttgtgtatctctttgacttttctttctctgtctagtttcctctgttctcagtttatattctatgttatcagtctctctttccacagtacaaacatccatcctttctcctgtgcaattctgtctctccctcttattatctttatttgtactttttccttcctccctgtctaggcattgggcatgtgcctcttcttagcctgtgattttgccttgggactgatgataaattatttccagattcaatcagccctggtcctaccccagtccaatcagaagtatgttggtgggaatcaacctgatcctggccctttcttcttctccattttcattcgtaatccccctcagcagatctttacaagcagtttccttatagctcatgtatctttaggtctttgccttccaagcactgtacagaatactttgtggttcctttttagtctgacattttgtggagcagtgaagcgtgctcagagacataatcagctgaagagaaaaaatccacccatggatttatatcagctaaatactaataattgattttgtttgatgtgcccataatttttaaagctgcaatataatataatgagggaccacaggtaatttctcctgtcatttgttttggctggatgggggtgggggagtaattgcttaaagttttaccattacacattaaactctctataataatcttgtttggggcttgctaactgttgagctgttttaactaaactggtaggcaatcggagttgatttaaatgaaaagataatttaacaaatctatactataaaaagagacatttgcttaattgacatgtattttttccttctgagtcacctaaacatttactcttgacaccaactgttcatgatactgaatagacagtccatataagagaaattagtggacctaaagaagccagattgtaggtgttaatttattaaacagagtgcaaagcccttggaaatgtcactgcttggcaataccatatggaatgccaaaatttacaatgacttttctttataagttatccaaaagggatttgaacaagtaagaggttatgccaaaatgtctccaatgtatggtcctgtaatatattgcagcttgaagccaatgatcccttatgacttgtatacaactaatgcatgttttattgaattttgcatttcccacgtgtggtaagttctttaaaatgtttttgatcacctttttgtgccattaaacttgtacagaaaatgtttttatggccattttcaaagggagaaagtttaaaatggaaacagcccaccctttctgccctatagctgtagttagaattgagtacctgtagcaaaacagctgtaattggtggttgtagtgttagaggtgttagcttgctagtgactagctttggagagtaaatgcatggtattgtacatcacatttcttaactcgttttaacctctgaaaagaatatattcttctttgtagtccttcttcccacccccttgccctctccctctccctgctcccagttgtcttacagttgtaaatatctgatttgaggcccaataactcttgccaagtaaagtcagcaaacaacaaacaaaccaaaatgtggggaaaaggcatttctcaaccatctctcagcagttattgatcatttcttaaggaacagcattgtgatcaaagactcaactttacgtaaaaatcagtggtaaattggggttgtatttggccatttgattacatttcaggattgaatagttttcagaatcacatgtaatccaaagacagtaggtagtgatgtcccttatccctgcagctgttttaagatagagacctcagaagactctgcttgaccgatgaccaataattatttgaaaaaaaaagaaaaaatgagagaaataaaacagatatttaagaactttagccacctatttagaatagttatagccagaaaaaaaaacaagggcatgagttcaaatgcattactatcagtgtcctaggcaatacctaacctactctgaaattgtgattcaaaagcagtatttcaagaggcattctccttttttggtttgctgaccccacttggactggtaggtttggtgaggcccccataaaccagctggagcagacccttttcatctcctgtgcctgtaacacccctcttcccccaccccctccgcaattcaatgagggctttcttgggtcagaggacttcaaggttgtctagagaagtttgccatgtgtgtaaggtgctgtgaactgtgagtgctgaagattcgcagcattcaataccaggcagccaaagagctgctcttgcaattattttggctctcaagctctgttcttcatcgcattctcatttctgtgtacatttgcaagatgtgtgtaatgtcattttccaaaaataaaatttgatttcaat

SEQ ID NO: 8768 - DNA, 2981 bp, Homo sapiens
  source 1..2981: mol_type = unassigned DNA
gagattggttttctttctctcagcatctccacccaaccagcagaaaaccgcttctacctgggattttcctttggaaaagtctctgaggttccaccaaaatatggaacttgattttggacactttgacgaaagagataagacatccaggaacatgcgaggctcccggatgaatgggttgcctagccccactcacagcgcccactgtagcttctaccgaaccagaaccttgcaggcactgagtaatgagaagaaagccaagaaggtacgtttctaccgcaatggggaccgctacttcaaggggattgtgtacgctgtgtcctctgaccgttttcgcagctttgacgccttgctggctgacctgacgcgatctctgtctgacaacatcaacctgcctcagggagtgcgttacatttacaccattgatggatccaggaagatcggaagcatggatgaactggaggaaggggaaagctatgtctgttcctcagacaacttctttaaaaaggtggagtacaccaagaatgtcaatcccaactggtctgtcaacgtaaaaacatctgccaatatgaaagccccccagtccttggctagcagcaacagtgcacaggccagggagaacaaggactttgtgcgccccaagctggttaccatcatccgcagtggggtgaagcctcggaaggctgtgcgtgtgcttctgaacaagaagacagcccactcttttgagcaagtcctcactgatatcacagaagccatcaaactggagaccggggttgtcaaaaaactctacactctggatggaaaacaggtaacttgtctccatgatttctttggtgatgatgatgtgtttattgcctgtggtcctgaaaaatttcgctatgctcaggatgatttttctctggatgaaaatgaatgccgagtcatgaagggaaacccatcagccacagctggcccaaaggcatccccaacacctcagaagacttcagccaagagccctggtcctatgcgccgaagcaagtctccagctgactcaggtaacgaccaagacgcaaacggaacctccagcagccagctctctacccccaagtctaagcagtctcccatctctacgcccaccagtcctggcagcctccggaagcacaaggacctgtacctgcctctgtccttggatgactcggactcgcttggtgattccatgtaaaggaggggagagtgctcagagtccagagtacaaatccaagcctatcattgtagtagggtacttctgctcaagtgtccaacagggctattggtgctttcaagtttttattttgttgttgttgttattttgaaaaacacattgtaatatgttgggtttattttcctgtgatttctcctctgggccactgatccacagttaccaattatgagagatagattgataaccatcctttggggcagcattccagggatgcaaaatgtgctagtccatgacctttcaatggaaagcttaggtgcctgcgttatatttgccctgtctaattttgcccatacagtcttccttctgtagagggctgtttacatatacagcacttaaaatgtttgtgtgggaaaaaaaaaactcattggcagatccaagaatgacaaacacaagtgccccttttctctggatctcaagaatggtggaggaccctggaaggacagcaaggcagctccccagcctcactcttcactcctgattgaggcccgggtttgttgtccagcaccaattctggctgtcaatggggagaaataaaccaacaacttataattgtgacaccagatgcttaggatcctggtgctgggttagctaagagaatagacagaattggaaaatactgcagacatttccgaagagtttataaagcacagtgaattcctggtcaatctctccactgaggcaatttggaatcaataagcaattgataatagtttggagtaagggacttcatatacctgattcctctagaaggctgtctaacataccacatgattacatgaactgtatggtatccatctatctctgttctattgaatgccttgttaacagccaacactgaaaacactgtgagaatttgttttcaggtctgacacctttcagtctctttttatagcaagaaatcaatatcctttttataaaaattcatgtctgtatttcaggagcaaactcttcaggctccttttttataaactggtgatttttcttttgtctaaaaaacacatgaagaaaatttaccaaaaaaaaaaaaaaaagcagaagaataatgtagtttagaaattatgctgtcactgccaaacagtaacctccaggagaaaacaagatgaatagcagaggccaattcaatagaatcagttttttgatagctttttaacagttatgcttgcattaataatttcaatgtggaccagacattctaattatattttaaatgaaatgttacagcatattttaagcaactctttttatctataatcctaatatttcatactgaagacacagaaatctttcacttgtctttaacattagaaaggatttctctttactaaggactgatcatttgaaatagttttcagtcttttgagatacaggtttataacactgcttttttttttctgtaatcatagcccataatggcaaagacaactaaatttaagtgaaggtcatgcatgccaattctgtgtttgcttttagcagatatgaagatttccttatttctttgtaattgtgcagatattttgaaaggcacagcattcgaagccaagctgctgtttggctactgaatggcttgcagttgttcctccactctaaatggaatgagcttgctgtgtgtgtgtgtggtggtggtgggagggggtggtgcatgtgtgtgtgtgtgtgtgcatctgcagctgcttcaaaattaggaaatactacaggacacccctgtaatggattggtggcaactgggtggcactgctgatgtgca

SEQ ID NO: 8769 - DNA, 9069 bp, Homo sapiens
  source 1..9069: mol_type = unassigned DNA
tttctttctctcagcatctccacccaaccagcagaaaaccggtctctgaggttccaccaaaatatggaacttgattttggacactttgacgaaagagataagacatccaggaacatgcgaggctcccggatgaatgggttgcctagccccactcacagcgcccactgtagcttctaccgaaccagaaccttgcaggcactgagtaatgagaagaaagccaagaaggtacgtttctaccgcaatggggaccgctacttcaaggggattgtgtacgctgtgtcctctgaccgttttcgcagctttgacgccttgctggctgacctgacgcgatctctgtctgacaacatcaacctgcctcagggagtgcgttacatttacaccattgatggatccaggaagatcggaagcatggatgaactggaggaaggggaaagctatgtctgttcctcagacaacttctttaaaaaggtggagtacaccaagaatgtcaatcccaactggtctgtcaacgtaaaaacatctgccaatatgaaagccccccagtccttggctagcagcaacagtgcacaggccagggagaacaaggactttgtgcgccccaagctggttaccatcatccgcagtggggtgaagcctcggaaggctgtgcgtgtgcttctgaacaagaagacagcccactcttttgagcaagtcctcactgatatcacagaagccatcaaactggagaccggggttgtcaaaaaactctacactctggatggaaaacaggtaacttgtctccatgatttctttggtgatgatgatgtgtttattgcctgtggtcctgaaaaatttcgctatgctcaggatgatttttctctggatgaaaatgaatgccgagtcatgaagggaaacccatcagccacagctggcccaaaggcatccccaacacctcagaagacttcagccaagagccctggtcctatgcgccgaagcaagtctccagctgactcaggtaacgaccaagacgcaaacggaacctccagcagccagctctctacccccaagtctaagcagtctcccatctctacgcccaccagtcctggcagcctccggaagcacaaggacctgtacctgcctctgtccttggatgactcggactcgcttggtgattccatgtaaaggaggggagagtgctcagagtccagagtacaaatccaagcctatcattgtagtagggtacttctgctcaagtgtccaacagggctattggtgctttcaagtttttattttgttgttgttgttattttgaaaaacacattgtaatatgttgggtttattttcctgtgatttctcctctgggccactgatccacagttaccaattatgagagatagattgataaccatcctttggggcagcattccagggatgcaaaatgtgctagtccatgacctttcaatggaaagcttaggtgcctgcgttatatttgccctgtctaattttgcccatacagtcttccttctgtagagggctgtttacatatacagcacttaaaatgtttgtgtgggaaaaaaaaaactcattggcagatccaagaatgacaaacacaagtgccccttttctctggatctcaagaatggtggaggaccctggaaggacagcaaggcagctccccagcctcactcttcactcctgattgaggcccgggtttgttgtccagcaccaattctggctgtcaatggggagaaataaaccaacaacttataattgtgacaccagatgcttaggatcctggtgctgggttagctaagagaatagacagaattggaaaatactgcagacatttccgaagagtttataaagcacagtgaattcctggtcaatctctccactgaggcaatttggaatcaataagcaattgataatagtttggagtaagggacttcatatacctgattcctctagaaggctgtctaacataccacatgattacatgaactgtatggtatccatctatctctgttctattgaatgccttgttaacagccaacactgaaaacactgtgagaatttgttttcaggtctgacacctttcagtctctttttatagcaagaaatcaatatcctttttataaaaattcatgtctgtatttcaggagcaaactcttcaggctccttttttataaactggtgatttttcttttgtctaaaaaacacatgaagaaaatttaccaaaaaaaaaaaaaaaagcagaagaataatgtagtttagaaattatgctgtcactgccaaacagtaacctccaggagaaaacaagatgaatagcagaggccaattcaatagaatcagttttttgatagctttttaacagttatgcttgcattaataatttcaatgtggaccagacattctaattatattttaaatgaaatgttacagcatattttaagcaactctttttatctataatcctaatatttcatactgaagacacagaaatctttcacttgtctttaacattagaaaggatttctctttactaaggactgatcatttgaaatagttttcagtcttttgagatacaggtttataacactgcttttttttttctgtaatcatagcccataatggcaaagacaactaaatttaagtgaaggtcatgcatgccaattctgtgtttgcttttagcagatatgaagatttccttatttctttgtaattgtgcagatattttgaaaggcacagcattcgaagccaagctgctgtttggctactgaatggcttgcagttgttcctccactctaaatggaatgagcttgctgtgtgtgtgtgtggtggtggtgggagggggtggtgcatgtgtgtgtgtgtgtgtgcatctgcagctgcttcaaaattaggaaatactacaggacacccctgtaatggattggtggcaactgggtggcactgctgatgtgcactgtgtaggggggaacccagtggtggtggggtagctcagatgcccctagacaagcttcagatgtctgtagctaccagaaacattttcggttcaggaaaagtgagatgatggtagtactggtttctggtgaaattgaagaaccccaaatgatgaggatctctttttgccccctctcctttttttgtagacccattcaaaaccattaataagcccattttactaagcccctatttctttctagaagctcagggttttcttagtgcctcccagaacattttgtagttaattgggaaaaagtgatacttggattagggggtgtgggcataaagaatggtgggaggcctgattttaaacttcaggccagaacccccaatgactccacccatagtctcactttaggtctcatttagtccatcacctttattttaagttgaggaagtggaggctggtaaagagcaggaccagaggaagaatccagatttccttatgcttgggcctcacactagctctctgagtatttccttgattgcggtatatgtactactagaaaataccaaatggatatattttctttaggataacctttgaaccaacaatcttcaataacaatagtacatcttccatcttacttttaatcgagtataaggaaatgtttctttatggccattttggagggagcaggggatgaggcttggcatagtccaaaatttaagtctccaataattaattgcattttaaattggcccactttcaaggcaattttttttgtgtgtctgtaactgagctcctccacccctgtcattcacttccaattttacccaatccaattttagcactcaagttccattgtgttaatttctgcacggtcaacaaacatcaagtcagcaagcatttgccaccactccctatacttctccctccttcttacacacacacacacacacacacacacaatccatctcttgcttgttcctacctcctgatttttcttccctacagaaatagaaatagggacaaagaaggggaaaatgtatatattggggctgggctgaacaactaacttcataagtagtattaactaggggtaaattgagagaaaagctccttttctcttcactgttttggaaaggatagccattagcatgactgctttgtgtccttatggactttagtattagcctagattgaattatagcgttttctagctggaaggaaccttaagatcacatcatctactcctctactccaaatttctcattcttcaggccaggaaaccgagacacagaggtaaagtaatttccccaaggtcacacagctggctggggcaggattgggtttacaacccacatctcctggctcttattccagggccttttcccactaagtagtattgccttccattaggctcctgagagttatttctcagggtcatgttgcatcttggagccacatgctgctgccctgatctcagtgggaaatccacccagcaacctaatacagccccttttccctgcattcacctggttcccatccacatgggttgcagatgtccttgaagagagtgaggcattgagggccaataggagcaatggggtccctggccttgtccatctgattcaggagatcactgctccatcgtgaggagccctctgaatagccccccactgaatgcttgccttgcccaaatggaatggaggaagattgattttctccatcagttcaccttgtgtcatctcataatggttggtctttccaggctgagggaaatgtttcttgtttccagagtagaaaaagaaagagtggaacaatagctttgttcatcctaactttctgagatggcttttcaacattttaaaaaaactagtgtggctaccattcactggcaatgatttcttttagaatatgggagtaagatgagctagagaaaataacctggtctcactgtggttgccctcatccacaatgtccccaaagccatcctgctctgatgaggacaatttccaggtataagcaaggggctttgtgacaaaaatgtaccctggctgatgttaaacattggctcctgtgtttgcaccaaaatagcaagctgtgtgctctatacactcttcccatcgtcttgtgtacactgctcctgtggccttccacagcagaaaccagggcaaaagggtccaaacacatggttttccttgctgcaaggctcttcctgggaactaagggggtatttattagttcagttctaagagacctccttctgggcttaccccactcctcaggtacttctctctccttcctccttctcctccacagtcacaagtaaccaaggaacctgaaagtggatgtgtagctatttgaagaaggcaaggaaccctgagattcttctttgaatcctctagtccaagtcttagaccagtgattggtgcttaccttgaacaaaattttgtctgtgttcctaatcccttcaatactctgggtacaatgctcccaatcaccctgcacatttgattctaaatggcttttattttttaaaaatccatatccctaggacaagagaacaggatgcctatatccccaaaatgagctccaggacactgatgggaatgatcccaaagatcaccccacctcagaaacgtctgtgccaagagacttccccagatagaaacactgggacagtggtttgaacgacttcttttatggttgtccagtttgctatggaaataaaaggcattgattttttaaaaagatgattggaacctgtctttggccacatagggccacttggatccatttccaggccttactcatatattgccttcactgaagggctttggctttaagtcccagactggtctcccaagtgaaccataagtgttttggagctcatctggggtgaggcatgagaatgttgccccatctatcccttcaggaaaaggtgccttccctccctttctcctaaagcctggtccccagaaattgtttttgtctccaaaagtctagtatggtctttatacacccagactcttagtgttgcgtcctgccttgtttccttgttaaggatctatgcagacctcccgctttggcttagctagcgtgacattggctatcatttgacaagactaacttttttttttttttttttttgactgagtctccctctgtcacctaggctggagtgcagtggcacaatcttggctcgctgcaaccttcacccttcacctcccaggtcgaagcgattctcctgcctcagtctcccgagtagctgggattacaggcgtgcgccaccaaatctggctatttttttattattattatttttagtagagatggggtttcaccatgttggccagactggtcttgaactcttggcctcaaattatctgcccacctcggcctcccaaagtgctgggattacaggcatgagccaccatgcccagctgacaagactaattttttatcccttggtttattggcttcaacatcttctggaatcagaggtgattttttcttaccttggatgcctgagactaggggagtatagaattccaattggtaattaaggcatctttctgctcctgatcagaagggcaggttagttgggagaggtcagatggcacaacagaagtcaccttgtaagtaaggcaaagacttgaaggcattagcgtttctcattactaggtcaataacctgagggaatcaatggctttttgccgctctacctcttgtgtatctctttgacttttctttctctgtctagtttcctctgttctcagtttatattctatgttatcagtctctctttccacagtacaaacatccatcctttctcctgtgcaattctgtctctccctcttattatctttatttgtactttttccttcctccctgtctaggcattgggcatgtgcctcttcttagcctgtgattttgccttgggactgatgataaattatttccagattcaatcagccctggtcctaccccagtccaatcagaagtatgttggtgggaatcaacctgatcctggccctttcttcttctccattttcattcgtaatccccctcagcagatctttacaagcagtttccttatagctcatgtatctttaggtctttgccttccaagcactgtacagaatactttgtggttcctttttagtctgacattttgtggagcagtgaagcgtgctcagagacataatcagctgaagagaaaaaatccacccatggatttatatcagctaaatactaataattgattttgtttgatgtgcccataatttttaaagctgcaatataatataatgagggaccacaggtaatttctcctgtcatttgttttggctggatgggggtgggggagtaattgcttaaagttttaccattacacattaaactctctataataatcttgtttggggcttgctaactgttgagctgttttaactaaactggtaggcaatcggagttgatttaaatgaaaagataatttaacaaatctatactataaaaagagacatttgcttaattgacatgtattttttccttctgagtcacctaaacatttactcttgacaccaactgttcatgatactgaatagacagtccatataagagaaattagtggacctaaagaagccagattgtaggtgttaatttattaaacagagtgcaaagcccttggaaatgtcactgcttggcaataccatatggaatgccaaaatttacaatgacttttctttataagttatccaaaagggatttgaacaagtaagaggttatgccaaaatgtctccaatgtatggtcctgtaatatattgcagcttgaagccaatgatcccttatgacttgtatacaactaatgcatgttttattgaattttgcatttcccacgtgtggtaagttctttaaaatgtttttgatcacctttttgtgccattaaacttgtacagaaaatgtttttatggccattttcaaagggagaaagtttaaaatggaaacagcccaccctttctgccctatagctgtagttagaattgagtacctgtagcaaaacagctgtaattggtggttgtagtgttagaggtgttagcttgctagtgactagctttggagagtaaatgcatggtattgtacatcacatttcttaactcgttttaacctctgaaaagaatatattcttctttgtagtccttcttcccacccccttgccctctccctctccctgctcccagttgtcttacagttgtaaatatctgatttgaggcccaataactcttgccaagtaaagtcagcaaacaacaaacaaaccaaaatgtggggaaaaggcatttctcaaccatctctcagcagttattgatcatttcttaaggaacagcattgtgatcaaagactcaactttacgtaaaaatcagtggtaaattggggttgtatttggccatttgattacatttcaggattgaatagttttcagaatcacatgtaatccaaagacagtaggtagtgatgtcccttatccctgcagctgttttaagatagagacctcagaagactctgcttgaccgatgaccaataattatttgaaaaaaaaagaaaaaatgagagaaataaaacagatatttaagaactttagccacctatttagaatagttatagccagaaaaaaaaacaagggcatgagttcaaatgcattactatcagtgtcctaggcaatacctaacctactctgaaattgtgattcaaaagcagtatttcaagaggcattctccttttttggtttgctgaccccacttggactggtaggtttggtgaggcccccataaaccagctggagcagacccttttcatctcctgtgcctgtaacacccctcttcccccaccccctccgcaattcaatgagggctttcttgggtcagaggacttcaaggttgtctagagaagtttgccatgtgtgtaaggtgctgtgaactgtgagtgctgaagattcgcagcattcaataccaggcagccaaagagctgctcttgcaattattttggctctcaagctctgttcttcatcgcattctcatttctgtgtacatttgcaagatgtgtgtaatgtcattttccaaaaataaaatttgatttcaata

SEQ ID NO: 8770 - DNA, 9223 bp, Homo sapiens
  source 1..9223: mol_type = unassigned DNA
attgtactgaaatgcaaagactgcttcctaagctggagatgctaaccttgggtagctccttctgttctcttcaaggggaattttgtcaggctatggattcatttacaactgttagtcatgtgggcatgtgtgaggaaacagatgccagttttaatgtatttagcccgaagttccaatttgataggagccactgtcagtctctgaggttccaccaaaatatggaacttgattttggacactttgacgaaagagataagacatccaggaacatgcgaggctcccggatgaatgggttgcctagccccactcacagcgcccactgtagcttctaccgaaccagaaccttgcaggcactgagtaatgagaagaaagccaagaaggtacgtttctaccgcaatggggaccgctacttcaaggggattgtgtacgctgtgtcctctgaccgttttcgcagctttgacgccttgctggctgacctgacgcgatctctgtctgacaacatcaacctgcctcagggagtgcgttacatttacaccattgatggatccaggaagatcggaagcatggatgaactggaggaaggggaaagctatgtctgttcctcagacaacttctttaaaaaggtggagtacaccaagaatgtcaatcccaactggtctgtcaacgtaaaaacatctgccaatatgaaagccccccagtccttggctagcagcaacagtgcacaggccagggagaacaaggactttgtgcgccccaagctggttaccatcatccgcagtggggtgaagcctcggaaggctgtgcgtgtgcttctgaacaagaagacagcccactcttttgagcaagtcctcactgatatcacagaagccatcaaactggagaccggggttgtcaaaaaactctacactctggatggaaaacaggtaacttgtctccatgatttctttggtgatgatgatgtgtttattgcctgtggtcctgaaaaatttcgctatgctcaggatgatttttctctggatgaaaatgaatgccgagtcatgaagggaaacccatcagccacagctggcccaaaggcatccccaacacctcagaagacttcagccaagagccctggtcctatgcgccgaagcaagtctccagctgactcaggtaacgaccaagacgcaaacggaacctccagcagccagctctctacccccaagtctaagcagtctcccatctctacgcccaccagtcctggcagcctccggaagcacaaggacctgtacctgcctctgtccttggatgactcggactcgcttggtgattccatgtaaaggaggggagagtgctcagagtccagagtacaaatccaagcctatcattgtagtagggtacttctgctcaagtgtccaacagggctattggtgctttcaagtttttattttgttgttgttgttattttgaaaaacacattgtaatatgttgggtttattttcctgtgatttctcctctgggccactgatccacagttaccaattatgagagatagattgataaccatcctttggggcagcattccagggatgcaaaatgtgctagtccatgacctttcaatggaaagcttaggtgcctgcgttatatttgccctgtctaattttgcccatacagtcttccttctgtagagggctgtttacatatacagcacttaaaatgtttgtgtgggaaaaaaaaaactcattggcagatccaagaatgacaaacacaagtgccccttttctctggatctcaagaatggtggaggaccctggaaggacagcaaggcagctccccagcctcactcttcactcctgattgaggcccgggtttgttgtccagcaccaattctggctgtcaatggggagaaataaaccaacaacttataattgtgacaccagatgcttaggatcctggtgctgggttagctaagagaatagacagaattggaaaatactgcagacatttccgaagagtttataaagcacagtgaattcctggtcaatctctccactgaggcaatttggaatcaataagcaattgataatagtttggagtaagggacttcatatacctgattcctctagaaggctgtctaacataccacatgattacatgaactgtatggtatccatctatctctgttctattgaatgccttgttaacagccaacactgaaaacactgtgagaatttgttttcaggtctgacacctttcagtctctttttatagcaagaaatcaatatcctttttataaaaattcatgtctgtatttcaggagcaaactcttcaggctccttttttataaactggtgatttttcttttgtctaaaaaacacatgaagaaaatttaccaaaaaaaaaaaaaaaagcagaagaataatgtagtttagaaattatgctgtcactgccaaacagtaacctccaggagaaaacaagatgaatagcagaggccaattcaatagaatcagttttttgatagctttttaacagttatgcttgcattaataatttcaatgtggaccagacattctaattatattttaaatgaaatgttacagcatattttaagcaactctttttatctataatcctaatatttcatactgaagacacagaaatctttcacttgtctttaacattagaaaggatttctctttactaaggactgatcatttgaaatagttttcagtcttttgagatacaggtttataacactgcttttttttttctgtaatcatagcccataatggcaaagacaactaaatttaagtgaaggtcatgcatgccaattctgtgtttgcttttagcagatatgaagatttccttatttctttgtaattgtgcagatattttgaaaggcacagcattcgaagccaagctgctgtttggctactgaatggcttgcagttgttcctccactctaaatggaatgagcttgctgtgtgtgtgtgtggtggtggtgggagggggtggtgcatgtgtgtgtgtgtgtgtgcatctgcagctgcttcaaaattaggaaatactacaggacacccctgtaatggattggtggcaactgggtggcactgctgatgtgcactgtgtaggggggaacccagtggtggtggggtagctcagatgcccctagacaagcttcagatgtctgtagctaccagaaacattttcggttcaggaaaagtgagatgatggtagtactggtttctggtgaaattgaagaaccccaaatgatgaggatctctttttgccccctctcctttttttgtagacccattcaaaaccattaataagcccattttactaagcccctatttctttctagaagctcagggttttcttagtgcctcccagaacattttgtagttaattgggaaaaagtgatacttggattagggggtgtgggcataaagaatggtgggaggcctgattttaaacttcaggccagaacccccaatgactccacccatagtctcactttaggtctcatttagtccatcacctttattttaagttgaggaagtggaggctggtaaagagcaggaccagaggaagaatccagatttccttatgcttgggcctcacactagctctctgagtatttccttgattgcggtatatgtactactagaaaataccaaatggatatattttctttaggataacctttgaaccaacaatcttcaataacaatagtacatcttccatcttacttttaatcgagtataaggaaatgtttctttatggccattttggagggagcaggggatgaggcttggcatagtccaaaatttaagtctccaataattaattgcattttaaattggcccactttcaaggcaattttttttgtgtgtctgtaactgagctcctccacccctgtcattcacttccaattttacccaatccaattttagcactcaagttccattgtgttaatttctgcacggtcaacaaacatcaagtcagcaagcatttgccaccactccctatacttctccctccttcttacacacacacacacacacacacacacaatccatctcttgcttgttcctacctcctgatttttcttccctacagaaatagaaatagggacaaagaaggggaaaatgtatatattggggctgggctgaacaactaacttcataagtagtattaactaggggtaaattgagagaaaagctccttttctcttcactgttttggaaaggatagccattagcatgactgctttgtgtccttatggactttagtattagcctagattgaattatagcgttttctagctggaaggaaccttaagatcacatcatctactcctctactccaaatttctcattcttcaggccaggaaaccgagacacagaggtaaagtaatttccccaaggtcacacagctggctggggcaggattgggtttacaacccacatctcctggctcttattccagggccttttcccactaagtagtattgccttccattaggctcctgagagttatttctcagggtcatgttgcatcttggagccacatgctgctgccctgatctcagtgggaaatccacccagcaacctaatacagccccttttccctgcattcacctggttcccatccacatgggttgcagatgtccttgaagagagtgaggcattgagggccaataggagcaatggggtccctggccttgtccatctgattcaggagatcactgctccatcgtgaggagccctctgaatagccccccactgaatgcttgccttgcccaaatggaatggaggaagattgattttctccatcagttcaccttgtgtcatctcataatggttggtctttccaggctgagggaaatgtttcttgtttccagagtagaaaaagaaagagtggaacaatagctttgttcatcctaactttctgagatggcttttcaacattttaaaaaaactagtgtggctaccattcactggcaatgatttcttttagaatatgggagtaagatgagctagagaaaataacctggtctcactgtggttgccctcatccacaatgtccccaaagccatcctgctctgatgaggacaatttccaggtataagcaaggggctttgtgacaaaaatgtaccctggctgatgttaaacattggctcctgtgtttgcaccaaaatagcaagctgtgtgctctatacactcttcccatcgtcttgtgtacactgctcctgtggccttccacagcagaaaccagggcaaaagggtccaaacacatggttttccttgctgcaaggctcttcctgggaactaagggggtatttattagttcagttctaagagacctccttctgggcttaccccactcctcaggtacttctctctccttcctccttctcctccacagtcacaagtaaccaaggaacctgaaagtggatgtgtagctatttgaagaaggcaaggaaccctgagattcttctttgaatcctctagtccaagtcttagaccagtgattggtgcttaccttgaacaaaattttgtctgtgttcctaatcccttcaatactctgggtacaatgctcccaatcaccctgcacatttgattctaaatggcttttattttttaaaaatccatatccctaggacaagagaacaggatgcctatatccccaaaatgagctccaggacactgatgggaatgatcccaaagatcaccccacctcagaaacgtctgtgccaagagacttccccagatagaaacactgggacagtggtttgaacgacttcttttatggttgtccagtttgctatggaaataaaaggcattgattttttaaaaagatgattggaacctgtctttggccacatagggccacttggatccatttccaggccttactcatatattgccttcactgaagggctttggctttaagtcccagactggtctcccaagtgaaccataagtgttttggagctcatctggggtgaggcatgagaatgttgccccatctatcccttcaggaaaaggtgccttccctccctttctcctaaagcctggtccccagaaattgtttttgtctccaaaagtctagtatggtctttatacacccagactcttagtgttgcgtcctgccttgtttccttgttaaggatctatgcagacctcccgctttggcttagctagcgtgacattggctatcatttgacaagactaacttttttttttttttttttttgactgagtctccctctgtcacctaggctggagtgcagtggcacaatcttggctcgctgcaaccttcacccttcacctcccaggtcgaagcgattctcctgcctcagtctcccgagtagctgggattacaggcgtgcgccaccaaatctggctatttttttattattattatttttagtagagatggggtttcaccatgttggccagactggtcttgaactcttggcctcaaattatctgcccacctcggcctcccaaagtgctgggattacaggcatgagccaccatgcccagctgacaagactaattttttatcccttggtttattggcttcaacatcttctggaatcagaggtgattttttcttaccttggatgcctgagactaggggagtatagaattccaattggtaattaaggcatctttctgctcctgatcagaagggcaggttagttgggagaggtcagatggcacaacagaagtcaccttgtaagtaaggcaaagacttgaaggcattagcgtttctcattactaggtcaataacctgagggaatcaatggctttttgccgctctacctcttgtgtatctctttgacttttctttctctgtctagtttcctctgttctcagtttatattctatgttatcagtctctctttccacagtacaaacatccatcctttctcctgtgcaattctgtctctccctcttattatctttatttgtactttttccttcctccctgtctaggcattgggcatgtgcctcttcttagcctgtgattttgccttgggactgatgataaattatttccagattcaatcagccctggtcctaccccagtccaatcagaagtatgttggtgggaatcaacctgatcctggccctttcttcttctccattttcattcgtaatccccctcagcagatctttacaagcagtttccttatagctcatgtatctttaggtctttgccttccaagcactgtacagaatactttgtggttcctttttagtctgacattttgtggagcagtgaagcgtgctcagagacataatcagctgaagagaaaaaatccacccatggatttatatcagctaaatactaataattgattttgtttgatgtgcccataatttttaaagctgcaatataatataatgagggaccacaggtaatttctcctgtcatttgttttggctggatgggggtgggggagtaattgcttaaagttttaccattacacattaaactctctataataatcttgtttggggcttgctaactgttgagctgttttaactaaactggtaggcaatcggagttgatttaaatgaaaagataatttaacaaatctatactataaaaagagacatttgcttaattgacatgtattttttccttctgagtcacctaaacatttactcttgacaccaactgttcatgatactgaatagacagtccatataagagaaattagtggacctaaagaagccagattgtaggtgttaatttattaaacagagtgcaaagcccttggaaatgtcactgcttggcaataccatatggaatgccaaaatttacaatgacttttctttataagttatccaaaagggatttgaacaagtaagaggttatgccaaaatgtctccaatgtatggtcctgtaatatattgcagcttgaagccaatgatcccttatgacttgtatacaactaatgcatgttttattgaattttgcatttcccacgtgtggtaagttctttaaaatgtttttgatcacctttttgtgccattaaacttgtacagaaaatgtttttatggccattttcaaagggagaaagtttaaaatggaaacagcccaccctttctgccctatagctgtagttagaattgagtacctgtagcaaaacagctgtaattggtggttgtagtgttagaggtgttagcttgctagtgactagctttggagagtaaatgcatggtattgtacatcacatttcttaactcgttttaacctctgaaaagaatatattcttctttgtagtccttcttcccacccccttgccctctccctctccctgctcccagttgtcttacagttgtaaatatctgatttgaggcccaataactcttgccaagtaaagtcagcaaacaacaaacaaaccaaaatgtggggaaaaggcatttctcaaccatctctcagcagttattgatcatttcttaaggaacagcattgtgatcaaagactcaactttacgtaaaaatcagtggtaaattggggttgtatttggccatttgattacatttcaggattgaatagttttcagaatcacatgtaatccaaagacagtaggtagtgatgtcccttatccctgcagctgttttaagatagagacctcagaagactctgcttgaccgatgaccaataattatttgaaaaaaaaagaaaaaatgagagaaataaaacagatatttaagaactttagccacctatttagaatagttatagccagaaaaaaaaacaagggcatgagttcaaatgcattactatcagtgtcctaggcaatacctaacctactctgaaattgtgattcaaaagcagtatttcaagaggcattctccttttttggtttgctgaccccacttggactggtaggtttggtgaggcccccataaaccagctggagcagacccttttcatctcctgtgcctgtaacacccctcttcccccaccccctccgcaattcaatgagggctttcttgggtcagaggacttcaaggttgtctagagaagtttgccatgtgtgtaaggtgctgtgaactgtgagtgctgaagattcgcagcattcaataccaggcagccaaagagctgctcttgcaattattttggctctcaagctctgttcttcatcgcattctcatttctgtgtacatttgcaagatgtgtgtaatgtcattttccaaaaataaaatttgatttcaat

SEQ ID NO: 8771 - DNA, 9122 bp, Homo sapiens
  source 1..9122: mol_type = unassigned DNA
cacaaggcaaagcctgctctctctgtctctctgtctcctcttctccttttttgccttattctatccgattttttccctaagcttctacctgggattttcctttggaaaagtctctgaggttccaccaaaatatggaacttgattttggacactttgacgaaagagataagacatccaggaacatgcgaggctcccggatgaatgggttgcctagccccactcacagcgcccactgtagcttctaccgaaccagaaccttgcaggcactgagtaatgagaagaaagccaagaaggtacgtttctaccgcaatggggaccgctacttcaaggggattgtgtacgctgtgtcctctgaccgttttcgcagctttgacgccttgctggctgacctgacgcgatctctgtctgacaacatcaacctgcctcagggagtgcgttacatttacaccattgatggatccaggaagatcggaagcatggatgaactggaggaaggggaaagctatgtctgttcctcagacaacttctttaaaaaggtggagtacaccaagaatgtcaatcccaactggtctgtcaacgtaaaaacatctgccaatatgaaagccccccagtccttggctagcagcaacagtgcacaggccagggagaacaaggactttgtgcgccccaagctggttaccatcatccgcagtggggtgaagcctcggaaggctgtgcgtgtgcttctgaacaagaagacagcccactcttttgagcaagtcctcactgatatcacagaagccatcaaactggagaccggggttgtcaaaaaactctacactctggatggaaaacaggtaacttgtctccatgatttctttggtgatgatgatgtgtttattgcctgtggtcctgaaaaatttcgctatgctcaggatgatttttctctggatgaaaatgaatgccgagtcatgaagggaaacccatcagccacagctggcccaaaggcatccccaacacctcagaagacttcagccaagagccctggtcctatgcgccgaagcaagtctccagctgactcagcaaacggaacctccagcagccagctctctacccccaagtctaagcagtctcccatctctacgcccaccagtcctggcagcctccggaagcacaaggacctgtacctgcctctgtccttggatgactcggactcgcttggtgattccatgtaaaggaggggagagtgctcagagtccagagtacaaatccaagcctatcattgtagtagggtacttctgctcaagtgtccaacagggctattggtgctttcaagtttttattttgttgttgttgttattttgaaaaacacattgtaatatgttgggtttattttcctgtgatttctcctctgggccactgatccacagttaccaattatgagagatagattgataaccatcctttggggcagcattccagggatgcaaaatgtgctagtccatgacctttcaatggaaagcttaggtgcctgcgttatatttgccctgtctaattttgcccatacagtcttccttctgtagagggctgtttacatatacagcacttaaaatgtttgtgtgggaaaaaaaaaactcattggcagatccaagaatgacaaacacaagtgccccttttctctggatctcaagaatggtggaggaccctggaaggacagcaaggcagctccccagcctcactcttcactcctgattgaggcccgggtttgttgtccagcaccaattctggctgtcaatggggagaaataaaccaacaacttataattgtgacaccagatgcttaggatcctggtgctgggttagctaagagaatagacagaattggaaaatactgcagacatttccgaagagtttataaagcacagtgaattcctggtcaatctctccactgaggcaatttggaatcaataagcaattgataatagtttggagtaagggacttcatatacctgattcctctagaaggctgtctaacataccacatgattacatgaactgtatggtatccatctatctctgttctattgaatgccttgttaacagccaacactgaaaacactgtgagaatttgttttcaggtctgacacctttcagtctctttttatagcaagaaatcaatatcctttttataaaaattcatgtctgtatttcaggagcaaactcttcaggctccttttttataaactggtgatttttcttttgtctaaaaaacacatgaagaaaatttaccaaaaaaaaaaaaaaaagcagaagaataatgtagtttagaaattatgctgtcactgccaaacagtaacctccaggagaaaacaagatgaatagcagaggccaattcaatagaatcagttttttgatagctttttaacagttatgcttgcattaataatttcaatgtggaccagacattctaattatattttaaatgaaatgttacagcatattttaagcaactctttttatctataatcctaatatttcatactgaagacacagaaatctttcacttgtctttaacattagaaaggatttctctttactaaggactgatcatttgaaatagttttcagtcttttgagatacaggtttataacactgcttttttttttctgtaatcatagcccataatggcaaagacaactaaatttaagtgaaggtcatgcatgccaattctgtgtttgcttttagcagatatgaagatttccttatttctttgtaattgtgcagatattttgaaaggcacagcattcgaagccaagctgctgtttggctactgaatggcttgcagttgttcctccactctaaatggaatgagcttgctgtgtgtgtgtgtggtggtggtgggagggggtggtgcatgtgtgtgtgtgtgtgtgcatctgcagctgcttcaaaattaggaaatactacaggacacccctgtaatggattggtggcaactgggtggcactgctgatgtgcactgtgtaggggggaacccagtggtggtggggtagctcagatgcccctagacaagcttcagatgtctgtagctaccagaaacattttcggttcaggaaaagtgagatgatggtagtactggtttctggtgaaattgaagaaccccaaatgatgaggatctctttttgccccctctcctttttttgtagacccattcaaaaccattaataagcccattttactaagcccctatttctttctagaagctcagggttttcttagtgcctcccagaacattttgtagttaattgggaaaaagtgatacttggattagggggtgtgggcataaagaatggtgggaggcctgattttaaacttcaggccagaacccccaatgactccacccatagtctcactttaggtctcatttagtccatcacctttattttaagttgaggaagtggaggctggtaaagagcaggaccagaggaagaatccagatttccttatgcttgggcctcacactagctctctgagtatttccttgattgcggtatatgtactactagaaaataccaaatggatatattttctttaggataacctttgaaccaacaatcttcaataacaatagtacatcttccatcttacttttaatcgagtataaggaaatgtttctttatggccattttggagggagcaggggatgaggcttggcatagtccaaaatttaagtctccaataattaattgcattttaaattggcccactttcaaggcaattttttttgtgtgtctgtaactgagctcctccacccctgtcattcacttccaattttacccaatccaattttagcactcaagttccattgtgttaatttctgcacggtcaacaaacatcaagtcagcaagcatttgccaccactccctatacttctccctccttcttacacacacacacacacacacacacacaatccatctcttgcttgttcctacctcctgatttttcttccctacagaaatagaaatagggacaaagaaggggaaaatgtatatattggggctgggctgaacaactaacttcataagtagtattaactaggggtaaattgagagaaaagctccttttctcttcactgttttggaaaggatagccattagcatgactgctttgtgtccttatggactttagtattagcctagattgaattatagcgttttctagctggaaggaaccttaagatcacatcatctactcctctactccaaatttctcattcttcaggccaggaaaccgagacacagaggtaaagtaatttccccaaggtcacacagctggctggggcaggattgggtttacaacccacatctcctggctcttattccagggccttttcccactaagtagtattgccttccattaggctcctgagagttatttctcagggtcatgttgcatcttggagccacatgctgctgccctgatctcagtgggaaatccacccagcaacctaatacagccccttttccctgcattcacctggttcccatccacatgggttgcagatgtccttgaagagagtgaggcattgagggccaataggagcaatggggtccctggccttgtccatctgattcaggagatcactgctccatcgtgaggagccctctgaatagccccccactgaatgcttgccttgcccaaatggaatggaggaagattgattttctccatcagttcaccttgtgtcatctcataatggttggtctttccaggctgagggaaatgtttcttgtttccagagtagaaaaagaaagagtggaacaatagctttgttcatcctaactttctgagatggcttttcaacattttaaaaaaactagtgtggctaccattcactggcaatgatttcttttagaatatgggagtaagatgagctagagaaaataacctggtctcactgtggttgccctcatccacaatgtccccaaagccatcctgctctgatgaggacaatttccaggtataagcaaggggctttgtgacaaaaatgtaccctggctgatgttaaacattggctcctgtgtttgcaccaaaatagcaagctgtgtgctctatacactcttcccatcgtcttgtgtacactgctcctgtggccttccacagcagaaaccagggcaaaagggtccaaacacatggttttccttgctgcaaggctcttcctgggaactaagggggtatttattagttcagttctaagagacctccttctgggcttaccccactcctcaggtacttctctctccttcctccttctcctccacagtcacaagtaaccaaggaacctgaaagtggatgtgtagctatttgaagaaggcaaggaaccctgagattcttctttgaatcctctagtccaagtcttagaccagtgattggtgcttaccttgaacaaaattttgtctgtgttcctaatcccttcaatactctgggtacaatgctcccaatcaccctgcacatttgattctaaatggcttttattttttaaaaatccatatccctaggacaagagaacaggatgcctatatccccaaaatgagctccaggacactgatgggaatgatcccaaagatcaccccacctcagaaacgtctgtgccaagagacttccccagatagaaacactgggacagtggtttgaacgacttcttttatggttgtccagtttgctatggaaataaaaggcattgattttttaaaaagatgattggaacctgtctttggccacatagggccacttggatccatttccaggccttactcatatattgccttcactgaagggctttggctttaagtcccagactggtctcccaagtgaaccataagtgttttggagctcatctggggtgaggcatgagaatgttgccccatctatcccttcaggaaaaggtgccttccctccctttctcctaaagcctggtccccagaaattgtttttgtctccaaaagtctagtatggtctttatacacccagactcttagtgttgcgtcctgccttgtttccttgttaaggatctatgcagacctcccgctttggcttagctagcgtgacattggctatcatttgacaagactaacttttttttttttttttttttgactgagtctccctctgtcacctaggctggagtgcagtggcacaatcttggctcgctgcaaccttcacccttcacctcccaggtcgaagcgattctcctgcctcagtctcccgagtagctgggattacaggcgtgcgccaccaaatctggctatttttttattattattatttttagtagagatggggtttcaccatgttggccagactggtcttgaactcttggcctcaaattatctgcccacctcggcctcccaaagtgctgggattacaggcatgagccaccatgcccagctgacaagactaattttttatcccttggtttattggcttcaacatcttctggaatcagaggtgattttttcttaccttggatgcctgagactaggggagtatagaattccaattggtaattaaggcatctttctgctcctgatcagaagggcaggttagttgggagaggtcagatggcacaacagaagtcaccttgtaagtaaggcaaagacttgaaggcattagcgtttctcattactaggtcaataacctgagggaatcaatggctttttgccgctctacctcttgtgtatctctttgacttttctttctctgtctagtttcctctgttctcagtttatattctatgttatcagtctctctttccacagtacaaacatccatcctttctcctgtgcaattctgtctctccctcttattatctttatttgtactttttccttcctccctgtctaggcattgggcatgtgcctcttcttagcctgtgattttgccttgggactgatgataaattatttccagattcaatcagccctggtcctaccccagtccaatcagaagtatgttggtgggaatcaacctgatcctggccctttcttcttctccattttcattcgtaatccccctcagcagatctttacaagcagtttccttatagctcatgtatctttaggtctttgccttccaagcactgtacagaatactttgtggttcctttttagtctgacattttgtggagcagtgaagcgtgctcagagacataatcagctgaagagaaaaaatccacccatggatttatatcagctaaatactaataattgattttgtttgatgtgcccataatttttaaagctgcaatataatataatgagggaccacaggtaatttctcctgtcatttgttttggctggatgggggtgggggagtaattgcttaaagttttaccattacacattaaactctctataataatcttgtttggggcttgctaactgttgagctgttttaactaaactggtaggcaatcggagttgatttaaatgaaaagataatttaacaaatctatactataaaaagagacatttgcttaattgacatgtattttttccttctgagtcacctaaacatttactcttgacaccaactgttcatgatactgaatagacagtccatataagagaaattagtggacctaaagaagccagattgtaggtgttaatttattaaacagagtgcaaagcccttggaaatgtcactgcttggcaataccatatggaatgccaaaatttacaatgacttttctttataagttatccaaaagggatttgaacaagtaagaggttatgccaaaatgtctccaatgtatggtcctgtaatatattgcagcttgaagccaatgatcccttatgacttgtatacaactaatgcatgttttattgaattttgcatttcccacgtgtggtaagttctttaaaatgtttttgatcacctttttgtgccattaaacttgtacagaaaatgtttttatggccattttcaaagggagaaagtttaaaatggaaacagcccaccctttctgccctatagctgtagttagaattgagtacctgtagcaaaacagctgtaattggtggttgtagtgttagaggtgttagcttgctagtgactagctttggagagtaaatgcatggtattgtacatcacatttcttaactcgttttaacctctgaaaagaatatattcttctttgtagtccttcttcccacccccttgccctctccctctccctgctcccagttgtcttacagttgtaaatatctgatttgaggcccaataactcttgccaagtaaagtcagcaaacaacaaacaaaccaaaatgtggggaaaaggcatttctcaaccatctctcagcagttattgatcatttcttaaggaacagcattgtgatcaaagactcaactttacgtaaaaatcagtggtaaattggggttgtatttggccatttgattacatttcaggattgaatagttttcagaatcacatgtaatccaaagacagtaggtagtgatgtcccttatccctgcagctgttttaagatagagacctcagaagactctgcttgaccgatgaccaataattatttgaaaaaaaaagaaaaaatgagagaaataaaacagatatttaagaactttagccacctatttagaatagttatagccagaaaaaaaaacaagggcatgagttcaaatgcattactatcagtgtcctaggcaatacctaacctactctgaaattgtgattcaaaagcagtatttcaagaggcattctccttttttggtttgctgaccccacttggactggtaggtttggtgaggcccccataaaccagctggagcagacccttttcatctcctgtgcctgtaacacccctcttcccccaccccctccgcaattcaatgagggctttcttgggtcagaggacttcaaggttgtctagagaagtttgccatgtgtgtaaggtgctgtgaactgtgagtgctgaagattcgcagcattcaataccaggcagccaaagagctgctcttgcaattattttggctctcaagctctgttcttcatcgcattctcatttctgtgtacatttgcaagatgtgtgtaatgtcattttccaaaaataaaatttgatttcaata

SEQ ID NO: 8772 - DNA, 518 bp, Homo sapiens
  source 1..518: mol_type = unassigned DNA
aatgctgagctcagcataggtcatggtgacattggaaaaaaggcggaattgagcctggcagacccattaggcaccagtctttcttatctcctgtcctcctggtcccttgcaaatatattgatgtggcagtgtgtagcagctgagccctgcttgctttgtctctgaggttccaccaaaatatggaacttgattttggacactttgacgaaagagataagacatccaggaacatgcgaggctcccggatgaatgggttgcctagccccactcacagcgcccactgtagcttctaccgaaccagaaccttgcaggcactgagtaatgagaagaaagccaagaaggtacgtttctaccgcaatggggaccgctacttcaaggggattgtgtacgctgtgtcctctgaccgttttcgcagctttgacgccttgctggctgacctgacgcgatctctgtctgacaacatcaacctgcctcagggagtgcgttacatttacaccattgatggatccaggaagatc

SEQ ID NO: 8773 - DNA, 2422 bp, Homo sapiens
  source 1..2422: mol_type = unassigned DNA
gaaacctttctagctgttaatgcagcctgtgaatttttttaaaagcatgtaattaatcataggaggttggggggattcactaagcctgagttacatgggagaagctggacaaggcactaggacctagaaggcatctatccaccctggcaggaatttcttgcttggagctcagacaacaaaggcatagagagattggttttctttctctcagcatctccacccaaccagcagaaaaccggtctctgaggttccaccaaaatatggaacttgattttggacactttgacgaaagagataagacatccaggaacatgcgaggctcccggatgaatgggttgcctagccccactcacagcgcccactgtagcttctaccgaaccagaaccttgcaggcactgagtaatgagaagaaagccaagaaggtacgtttctaccgcaatggggaccgctacttcaaggggattgtgtacgctgtgtcctctgaccgttttcgcagctttgacgccttgctggctgacctgacgcgatctctgtctgacaacatcaacctgcctcagggagtgcgttacatttacaccattgatggatccaggaagatcggaagcatggatgaactggaggaaggggaaagctatgtctgttcctcagacaacttctttaaaaaggtggagtacaccaagaatgtcaatcccaactggtctgtcaacgtaaaaacatctgccaatatgaaagccccccagtccttggctagcagcaacagtgcacaggccagggagaacaaggactttgtgcgccccaagctggttaccatcatccgcagtggggtgaagcctcggaaggctgtgcgtgtgcttctgaacaagaagacagcccactcttttgagcaagtcctcactgatatcacagaagccatcaaactggagaccggggttgtcaaaaaactctacactctggatggaaaacaggtaacttgtctccatgatttctttggtgatgatgatgtgtttattgcctgtggtcctgaaaaatttcgctatgctcaggatgatttttctctggatgaaaatgaatgccgagtcatgaagggaaacccatcagccacagctggcccaaaggcatccccaacacctcagaagacttcagccaagagccctggtcctatgcgccgaagcaagtctccagctgactcagcaaacggaacctccagcagccagctctctacccccaagtctaagcagtctcccatctctacgcccaccagtcctggcagcctccggaagcacaaggacctgtacctgcctctgtccttggatgactcggactcgcttggtgattccatgtaaaggaggggagagtgctcagagtccagagtacaaatccaagcctatcattgtagtagggtacttctgctcaagtgtccaacagggctattggtgctttcaagtttttattttgttgttgttgttattttgaaaaacacattgtaatatgttgggtttattttcctgtgatttctcctctgggccactgatccacagttaccaattatgagagatagattgataaccatcctttggggcagcattccagggatgcaaaatgtgctagtccatgacctttcaatggaaagcttaggtgcctgcgttatatttgccctgtctaattttgcccatacagtcttccttctgtagagggctgtttacatatacagcacttaaaatgtttgtgtgggaaaaaaaaaactcattggcagatccaagaatgacaaacacaagtgccccttttctctggatctcaagaatggtggaggaccctggaaggacagcaaggcagctccccagcctcactcttcactcctgattgaggcccgggtttgttgtccagcaccaattctggctgtcaatggggagaaataaaccaacaacttataattgtgacaccagatgcttaggatcctggtgctgggttagctaagagaatagacagaattggaaaatactgcagacatttccgaagagtttataaagcacagtgaattcctggtcaatctctccactgaggcaatttggaatcaataagcaattgataatagtttggagtaagggacttcatatacctgattcctctagaaggctgtctaacataccacatgattacatgaactgtatggtatccatctatctctgttctattgaatgccttgttaacagccaacactgaaaacactgtgagaatttgttttcaggtctgacacctttcagtctctttttatagcaagaaatcaatatcctttttataaaaattcatgtctgtatttcaggagcaaactcttcaggctccttttttataaactggtgatttttcttttgtctaaaaaacacatgaagaaaatttaccaaaaaaaaaaaaaaaagcagaagaa

SEQ ID NO: 8774 - DNA, 1706 bp, Homo sapiens
  source 1..1706: mol_type = unassigned DNA
agaagcgacgctccgcccaccccgacgcggtctctatggtaaccggtcaccgcttctatggagtggcgtttactaccaattgcaaataagaaaattccagattccattccaagatggccaaataggaacagctccagcctgcagctcccagcgtgattaatgtagaagatgggtgatttctgcatttccaactaagctgaaaatggcaaaaacaggagcagaagatcacagagaagcactatctcagtcttccttatccctcttgactgaagcaatggaagtattacagcaaagtagccctgaaggcactttggatgggaatactgtaaacccaatttacaaatatattttgaatgatttaccaagagagtttatgtcatcccaggcaaaagcagttattaaaactactgatgattatttgcagtctcagtttggccccaacagactcgtgcattcagcagcagtatcagaagggtcaggacttcaagattgctccacacatcaaacagcatcagatcacagccatgatgaaatatcagacctagatagctacaaatcaaacagtaaaaacaattcttgttctatatcagcatccaagagaaacagacctgtcagtgctccagtgggtcaactgagggttgcagagttctcttctttaaaatttcagtcagcccggaattggcagaaattgtctcaaagacacaaacttcaaccaagagtgattaaagtaacagcttacaaaaatggatctagaacagtctttgccagagttactgtaccaaccatcaccttgctgctggaggagtgcacagaaaagctgaatctgaacatggccgcaagacgagtgttcttggcagacggcaaggaagccctcgaacctgaagatataccccatgaagccgatgtttatgtttcaacgggagagccctttttaaatccattcaaaaaaattaaagaccatctgttgttaattaagaaagtaacttggacaatgaatgggttgatgcttcctactgatatcaaaagacggaaaaccaagcctgttctttctattagaatgaagaaacttactgagaggacctcagtccgaattctgttctttaagaatggcatggggcaggatgggcatgagattacagtgggaaaagaaacaatgaaaaaggttttagatacttgtacaataagaatgaatctaaatttaccagccagatatttttatgatttgtatggcagaaaaattgaagatatttcaaaaggaaagcactgactctgagacgtgatacttcatggatgccagaggcattcggattcatgactcgtgcttcacgtatcccagaagtgtgctattatcacattttaatgcatgccttgccctctgtttttgcatccttataaaagcttatgccagctgaaattagcctgtgcaaccactaacatgtggaagcattacaagttcactggacttaaaatatttaaagaagctaatcctgttggaggaacttccagtctgtagcaccctagtcacttaacattaggtttttgaacttcttttttctttgtttctatgatgttgtgcatcaaatgattgagatccctaaacttttgtgttggatggttttctgaacttcaacttgggaaaggtcaagttttatgtgaaagttatcttttaatttaaacaaataaatgctgatactcttttgattcga

SEQ ID NO: 8775 - DNA, 3684 bp, Homo sapiens
  source 1..3684: mol_type = unassigned DNA
gaccactgaatgttttctcaatgaaaatgtggaacaactgggggtggtgtggtggtcggaggagggggtgcacaaaaatactatcaactaaaaagggaatccaaatgtctattaaaaataagcatttgattgtaattccagcattcagccacacgatgtcacaattggattttgattttcactgtgtgtttgtctcaatagatgaaggcattttcaaagctggagcagagaggtctgaaacacggggggcagcagaagtccaagaagatgaagatactcaggttgaggttccagtcgatcagaggccagcagaaatagtagacgaggaagaagatggagagaaggcaaacaaggatgcagaacagaaagaagacttttcaggaatgaatggtgaccttgaagaggaaggaggtagggaggctacagatgcccctgagcaagtcgaggagattctggatcacagtgagcagcaggcacgccctgctcgtgtaaatggaggcaccgatgaggagaatggtgaggagctgcagcaggttaataatgagcttcaactggtcctagacaaggaaagaaagtctcaaggagctggcagtggacaagatgaggctgatgtagaccctcaaagaccaccaaggccagaagtaaaaattaccagtccagaagaaaatgaaaacaaccaacaaaacaaggactatgctgccgtggcttagaacatttttaaaaagagagtatatggatcgcaagaaaaatgaagggttatcatacttgaaagataagcacatagttattgctgaatataatgtgacactatggtcgaatactacctacgaattataacattagaagcctagtggaaagaccagataactttaaatggctactaaaggataattacttacttttattgcatgtgttttaaaagtcatatagaaatattaaataagacggacagaggagaatttgcactggaagacaattgccacttgtaaaggatgaaaaataggatcactcttattgtacgctttattataagtttagaaggcagtttattctaaataatttttctctaggaaggcgtagaattttaaagaactggtaataggaaagcatgtactattttcttaaagcaataaactcttgaatgaacagattgcgatttactttcagacataatttggagatggcagtagatcaaaatgtgtccatgacttgttaacatgcctttctttcttcctccttagccaaaatccacctttgaactacaaagacagagcaaggcgttcattttggtgggaggaagcattggttcagagtgttagtgactagtatcgccatgccgtcacttaaatgctttcaggcttgcatgcttgtggctccaatggcgcacactcaggaaggaattgtaaaggagcacccagttatattataaagcctggatgtatggtttgcagataatggaaatcctgtggattttcactgatccagtctatctttaccaatagtatctctctcttctcccttatgttattagagaacctgatattggctattccaaagattaaattattttcaaatagttttcaacaaaaataaaagtgtattaggaagaaaaaagtagactatatgaagagtttgtgactgctcaatttaacttgttttttgccttatttctattaagactgttttactatgtttttgccctagggatatcagcaaatatttatttttcctagcatgatatagttagaatttcaagcagatttctttgtaattagaaggcatctgatagaaattgtaaaactttagaagttattataatgaaaccaattcctgaatcacaacttcatggactgactaaattgatttatagttgccttgtgaggtatgtatggggaaaacataaaaacataattaaaacataatttcgtcctttttatgaattcttaagagatgttcttccataaatatagaaataatatatttttcttaaaggatatatttttaattatgtggaagttgtaagcttgaaattttaacttctagtgcttttctaaaattcacaattacaagtttaaaacattttttctcttccaggtttcatttggaataaagagttggcagttatataaagcacttaataatactatagaaaatagatgtgttttttcttaatatgattttggtattttccacagatcagaagtgtaaacagagagataatgtaacagtatttggaagagataatgacacaaggatatagtgatctgggagcatgaattagaaacagggtactatgtttctggtgtaaaatctaaattgtgctttctactagcgttactttttcaaatgggatgatataaagcactgtgggctataagcaacaatcttgggttggtaggcaaatagaccaattgatctttattattattattattattattattattattttttgagatgaagtcttgctcttgtcgcccaggctgggtgcagtggcatgatcttggcttactgcaacctctgcctcctgggttcaagcacctgagcctcccgagtagctgggattacaggcatctgccaccacacctggctaatttttgtattttttgtagagacagatgtttcaccatgttggccaggctggtctcaaactcctgacctcaggtgatccgcccgcctttgcatcccaaaatgctgggattacaggtgtgagccacagcacccggtcccagttggtcttttaatattaaatttgtgcactattactgggtctggagttaatgatttcaaatagtttctaaaaataactgattaaatgtaagaaattataactaattatcaaggtgattctcttttgtttcttcaatggagagtttctctttctcttttcctcctctaataaaaatatttctttttttcctgtccttttattcattatattatgaaacttaggttttaggaaacaccttaagcgtcattttaatgaagcacaacattgatattttacatgaataataacgtttggtattttaaatatacttcaagggggtaataagccacaataactgtaccaaaaaaacttaaaaatggggacatattcatcccttgtgtgtgcatattttaccacttgttgacaagatacaattgtgacctactttgaggggatgaataacgacttatcactttaagacactttgcaaacatgttactaaaaaaaggtgcctagccaaggaaaaaaccattcacttggaattaaaattgtggatgtcacttcagagatgactttaacataaatgctgaaagttcattcacctcacaaatgtggcagttttctctgtggagaatggtggtctccgtggcagactggctctccaaattaaatgaaactcattgacagacctgggaccttttatgtgagtggacagacaagatcttggtttggcttcatgtactgttttctagagagagtgctacgaaaaacttatgatgcttttatgtgataaccaatataatgctttaatatgttaattctttgtgatgctatatacatagtttttatagttttatgaaaccactttgttaaacttatctggattttaagacacttgtaaacaaatggtttgttagtaaaattggggcattaagagttttacagagcaaataaagaagattttgacaaaagtc

SEQ ID NO: 8776 - DNA, 4707 bp, Homo sapiens
  source 1..4707: mol_type = unassigned DNA
gtccaccttgattctgcccgtagcaggtgaacctggtgtggtgcgcgcactgcgggtcctgattggctgtgcacgccacggtgaaaaacttgagcgtctactccgagtcctgcaagctcctagtgtctcctctgggtggacgcctaggcgcacggccgttacttctctttcacctgtggattcgtcagtttctcgttcgtttcaggaggcgatcccgcgccctgggtgcggtgaggccgctgggacagcggaggtgcctcccgacgcgaagcagcgagctgaggcggcggccagcggggaagatgagcggcagcagcgccaggtccagccacctgtctcagcccgtcgtgaagagcgtgcttgtgtaccgcaacggggaccccttctacgcggggcgccgcgtcgtcatccatgagaagaaggtgtccagcttcgaagtcttcctgaaggaggtgaccggcggcgttcaggcaccctttggggccgtcaggaacatctacaccccgcggactggccaccgaatccggaagctagaccagatccagagcgggggcaattacgtggctggaggccaggaagccttcaagaaactcaattacttggacataggagaaatcaagaaaagaccaatggaagttgttaatacagaggtaaaaccagtaatccatagcaggatcaacgtgtcagctcgctttagaaaaccgcttcaggagccgtgcactatcttcttgattgcaaatggagacctcataaacccagcttctcgcctccttatccccagaaaaaccttgaatcagtgggatcatgtactacaaatggtcacagaaaaaatcactctgaggagcggggctgttcacaggctttatactttagaaggaaaacttgttgagagtggagcagagttggagaatgggcagttttatgtggctgttggcagagataagtttaagaaactgccttacagtgagttactttttgacaagtcaacgatgagaaggccttttggtcagaaagcttcttcactacctcctattgtaggatccagaaagtctaaagggagtggaaatgatcgccactctaagtcaacagttggatccagtgacaactcatctcctcagcccctgaagaggaaagggaaaaaagaagacgtgaattcagaaaaactgacgaaattgaaacaaaatgtaaaattaaagaattcacaagaaaccattccaaatagtgatgaaggcattttcaaagctggagcagagaggtctgaaacacggggggcagcagaagtccaagaagatgaagatactcaggttgaggttccagtcgatcagaggccagcagaaatagtagacgaggaagaagatggagagaaggcaaacaaggatgcagaacagaaagaagacttttcaggaatgaatggtgaccttgaagaggaaggaggtagggaggctacagatgcccctgagcaagtcgaggagattctggatcacagtgagcagcaggcacgccctgctcgtgtaaatggaggcaccgatgaggagaatggtgaggagctgcagcaggttaataatgagcttcaactggtcctagacaaggaaagaaagtctcaaggagctggcagtggacaagatgaggctgatgtagaccctcaaagaccaccaaggccagaagtaaaaattaccagtccagaagaaaatgaaaacaaccaacaaaacaaggactatgctgccgtggcttagaacatttttaaaaagagagtatatggatcgcaagaaaaatgaagggttatcatacttgaaagataagcacatagttattgctgaatataatgtgacactatggtcgaatactacctacgaattataacattagaagcctagtggaaagaccagataactttaaatggctactaaaggataattacttacttttattgcatgtgttttaaaagtcatatagaaatattaaataagacggacagaggagaatttgcactggaagacaattgccacttgtaaaggatgaaaaataggatcactcttattgtacgctttattataagtttagaaggcagtttattctaaataatttttctctaggaaggcgtagaattttaaagaactggtaataggaaagcatgtactattttcttaaagcaataaactcttgaatgaacagattgcgatttactttcagacataatttggagatggcagtagatcaaaatgtgtccatgacttgttaacatgcctttctttcttcctccttagccaaaatccacctttgaactacaaagacagagcaaggcgttcattttggtgggaggaagcattggttcagagtgttagtgactagtatcgccatgccgtcacttaaatgctttcaggcttgcatgcttgtggctccaatggcgcacactcaggaaggaattgtaaaggagcacccagttatattataaagcctggatgtatggtttgcagataatggaaatcctgtggattttcactgatccagtctatctttaccaatagtatctctctcttctcccttatgttattagagaacctgatattggctattccaaagattaaattattttcaaatagttttcaacaaaaataaaagtgtattaggaagaaaaaagtagactatatgaagagtttgtgactgctcaatttaacttgttttttgccttatttctattaagactgttttactatgtttttgccctagggatatcagcaaatatttatttttcctagcatgatatagttagaatttcaagcagatttctttgtaattagaaggcatctgatagaaattgtaaaactttagaagttattataatgaaaccaattcctgaatcacaacttcatggactgactaaattgatttatagttgccttgtgaggtatgtatggggaaaacataaaaacataattaaaacataatttcgtcctttttatgaattcttaagagatgttcttccataaatatagaaataatatatttttcttaaaggatatatttttaattatgtggaagttgtaagcttgaaattttaacttctagtgcttttctaaaattcacaattacaagtttaaaacattttttctcttccaggtttcatttggaataaagagttggcagttatataaagcacttaataatactatagaaaatagatgtgttttttcttaatatgattttggtattttccacagatcagaagtgtaaacagagagataatgtaacagtatttggaagagataatgacacaaggatatagtgatctgggagcatgaattagaaacagggtactatgtttctggtgtaaaatctaaattgtgctttctactagcgttactttttcaaatgggatgatataaagcactgtgggctataagcaacaatcttgggttggtaggcaaatagaccaattgatctttattattattattattattattattattattttttgagatgaagtcttgctcttgtcgcccaggctgggtgcagtggcatgatcttggcttactgcaacctctgcctcctgggttcaagcacctgagcctcccgagtagctgggattacaggcatctgccaccacacctggctaatttttgtattttttgtagagacagatgtttcaccatgttggccaggctggtctcaaactcctgacctcaggtgatccgcccgcctttgcatcccaaaatgctgggattacaggtgtgagccacagcacccggtcccagttggtcttttaatattaaatttgtgcactattactgggtctggagttaatgatttcaaatagtttctaaaaataactgattaaatgtaagaaattataactaattatcaaggtgattctcttttgtttcttcaatggagagtttctctttctcttttcctcctctaataaaaatatttctttttttcctgtccttttattcattatattatgaaacttaggttttaggaaacaccttaagcgtcattttaatgaagcacaacattgatattttacatgaataataacgtttggtattttaaatatacttcaagggggtaataagccacaataactgtaccaaaaaaacttaaaaatggggacatattcatcccttgtgtgtgcatattttaccacttgttgacaagatacaattgtgacctactttgaggggatgaataacgacttatcactttaagacactttgcaaacatgttactaaaaaaaggtgcctagccaaggaaaaaaccattcacttggaattaaaattgtggatgtcacttcagagatgactttaacataaatgctgaaagttcattcacctcacaaatgtggcagttttctctgtggagaatggtggtctccgtggcagactggctctccaaattaaatgaaactcattgacagacctgggaccttttatgtgagtggacagacaagatcttggtttggcttcatgtactgttttctagagagagtgctacgaaaaacttatgatgcttttatgtgataaccaatataatgctttaatatgttaattctttgtgatgctatatacatagtttttatagttttatgaaaccactttgttaaacttatctggattttaagacacttgtaaacaaatggtttgttagtaaaattggggcattaagagttttacagagcaaataaagaagattttgacaaaagtc

SEQ ID NO: 8777 - DNA, 339 bp, Homo sapiens
  source 1..339: mol_type = unassigned DNA
gcgtcgtcatccatgagaagaaggtgtccagcttcgaagtcttcctgaaggaggtgaccggcggcgttcaggcaccctttggggccgtcaggaacatctacaccccgcggactggccaccgaatccggaagctagaccagatccagagcgggggcaattacgtggctggaggccaggaagccttcaagaaactcaattacttggacataggagaaatcaagaaaagaccaatggaagttgttaatacagagctacatgttctctgattgaaatccatgggaaggttccctgtcaagtgagaagattctgagcgttgttaaataaatctttaccaaagct

SEQ ID NO: 8778 - DNA, 665 bp, Homo sapiens
  source 1..665: mol_type = unassigned DNA
gtccaccttgattctgcccgtagcaggtgaacctggtgtggtgcgcgcactgcgggtcctgattggctgtgcacgccacggtgaaaaacttgagcgtctactccgagtcctgcaagctcctagtgtctcctctgggtggacgcctaggcgcacggccgttacttctctttcacctgtggattcgtcagtttctcgttcgtttcaggaggcgatcccgcgccctgggtgcggtgaggccgctgggacagcggaggtgcctcccgacgcgaagcagcgagctgaggcggcggccagcggggaagatgagcggcagcagcgccaggtccagccacctgtctcagcccgtcgtgaagagcgtgcttgtgtaccgcaacggggaccccttctacgcggggcgccgcgtcgtcatccatgagaagaaggtgtccagcttcgaagtcttcctgaaggaggtgaccggcggcgttcaggcaccctttggggccgtcaggaacatctacaccccgcggactggccaccgaatccggaagctagaccagatccagagcgggggcaattacgtggctggaggccaggaagccttcaagaaactcaattacttggacataggagaaatcaagaaaagaccaatggaagttgttaatacagagctacatgttctctga

SEQ ID NO: 8779 - DNA, 2347 bp, Homo sapiens
  source 1..2347: mol_type = unassigned DNA
agctttgtgtctctcagtaccatcatggcctctccatgtatctttacagtataccttctgagacctgctgaggatatgactcagcaaatcaccatggtgatgggagaaagccaggttgtgggggcaccagctataacggggtaatacttggaaggcaatttctttctgagaacttgctgcagcctagcttggagtcctggcctggaaagcttgaatatgaaaagtcaggtgggccataaaacatgaaggaaccagtaagccaggccagtggaaacattctagagttgaaaatcctctatggaacaagcttacctacatgtggcctgtccttcccagtggccaacttaatgaggagtttgattggccaatacaaggactgcttgttccgagcagtcctcccatgaagaaacccatctgtaagacaacagagccatatgcccctgtgcgactcagagttttgcagaatggagagaagaataaaaacagatccgttactatccttggtccagatatctcacctggacggaaaacgcagtgcactgagattttaaatttaccttctgcagctcggagattgtacaatgaaaaggggaaggaaatatttgccttaaaagacctgcaaagagatgaactggtgtatgtttcatgtggagaactctggatcaatcctgacctgtccattgctcagcaaaagaaacaaatattcctgaggaacctagaatcagacattgccaaaattcaaatcttctgcagcacacataaaatagaagctcttgttttagaagtccaaagtgacattgtatctggaagcaagcttgctgtgcataaacctgtagcaatttttggagaagagaagcaagttacagaaccggaagaaaagcaaatgcaagaagatcctctaacaacggaaaatgcttccagtgaaattctagattcacacgtaagagctcatcttcgaatgaaggcttgtcacacacttcccaggtatgcctggcaggaaacttcacatgactttgatgaggatgacagtcttccaaagaaaacggaaaaagggctctttgaaaatgtggaaccacagaagaaacacagctgttcaccaaagcatagtaaattgcacaagcattgtcatcagcagttcgaatacagagatgggcagattataagccatgctgctcctcagctagtcttgggggttcaaggtcccaatctccgatcaggcatggaggtggttttggtggagaagaaatctgatggtagtcatcagcgctggatacaccaggaagacagcaggacctttcaccttgtgagtaaccctgaccttgtgctggcagtgtctatgaccaagactagaaatgaagtttgtggctatccagttattgttcagaaatataagccgtacaacaatggagctgccaatcaaaagtggcattacatgaaaaatataaaagcacttgtggcctttcatagcactgccttggataaggaaattacatcagcaaattatgctggtgtctgtacatcatctgtgattaaagaagaaaacattgatcaaccaggatactgttatctctcacctgatggaaagagaaaaactatgctctgcttggcttgtggacaatccatgagaacagagaaaggactgaaacaattgcttccaggggttccattcctctgtatttcaggcaccaagactcagaagcccttcttacaagggcccttcaaggtcatcagtgtggctgaggttgatttgtcgtgtgacaaggctgaaaaaactctaagttactaccaagcacgtctattgtctttacggatgaagacctgcacgcaagctgcatctcacagtggcatggcagccacacaccagaaggcagtgaaaataattgcatacaaaaatggggatgggtatcgtaatgggaagttaattgtggctggaacattccccatgcttcttacagaatgcacggaacaacttgggcttgccagagcagcctccaaagtatataccaaagatggaaccccaatctttaccttgcgtgatttggttttatgggctctagatgaatcctttctccagagagactctgagaaacaaaagcaagatgcagctcctgttggaaaagaacagataattgttgaaaaaaatccaagaatgaaagtgaaaaacagattatttgcaaaatctgtgacatccgatagtttggatggtatagacaagtctttgcttaccctcatcctcagaaatcctattgccatctgggtgtcttgtggtgaaccatttctacctccaaatgaaagcagaaaaattagagaaacagaactggctaaaaaaggacagaattttggctga

SEQ ID NO: 8780 - DNA, 2797 bp, Homo sapiens
  source 1..2797: mol_type = unassigned DNA
agctttgtgtctctcagtaccatcatggcctctccatgtatctttacagtataccttctgagacctgctgaggatatgactcagcaaatcaccatggtgatgggagaaagccaggttgtgggggcaccagctataacggggtaatacttggaaggcaatttctttctgagaacttgctgcagcctagcttggagtcctggcctggaaagcttgaatatgaaaagtcaggtgggccataaaacatgaaggaaccagtaagccaggccagtggaaacattctagagttgaaaatcctctatggaacaagcttacctacatgtggcctgtccttcccagtggccaacttaatgaggagtttgattggccaatacaaggactgcttgttccgagcagtcctcccatgaagaaacccatctgtaagacaacagagccatatgcccctgtgcgactcagagttttgcagaatggagagaagaataaaaacagatccgttactatccttggtccagatatctcacctggacggaaaacgcagtgcactgagattttaaatttaccttctgcagctcggagattgtacaatgaaaaggggaaggaaatatttgccttaaaagacctgcaaagagatgaactggtgtatgtttcatgtggagaactctggatcaatcctgacctgtccattgctcagcaaaagaaacaaatattcctgaggaacctagaatcagacattgccaaaattcaaatcttctgcagcacacataaaatagaagctcttgttttagaagtccaaagtgacattgtatctggaagcaagcttgctgtgcataaacctgtagcaatttttggagaagagaagcaagttacagaaccggaagaaaagcaaatgcaagaagatcctctaacaacggaaaatgcttccagtgaaattctagattcacacgtaagagctcatcttcgaatgaaggcttgtcacacacttcccaggtatgcctggcaggaaacttcacatgactttgatgaggatgacagtcttccaaagaaaacggaaaaagggctctttgaaaatgtggaaccacagaagaaacacagctgttcaccaaagcatagtaaattgcacaagcattgtcatcagcagttcgaatacagagatgggcagattataagccatgctgctcctcagctagtcttgggggttcaaggtcccaatctccgatcaggcatggaggtggttttggtggagaagaaatctgatggtagtcatcagcgctggatacaccaggaagacagcaggacctttcaccttgtgagtaaccctgaccttgtgctggcagtgtctatgaccaagactagaaatgaagtttgtggctatccagttattgttcagaaatataagccgtacaacaatggagctgccaatcaaaagtggcattacatgaaaaatataaaagcacttgtggcctttcatagcactgccttggataaggaaattacatcagcaaattatgctggtgtctgtacatcatctgtgattaaagaagaaaacattgatcaaccaggatactgttatctctcacctgatggaaagagaaaaactatgctctgcttggcttgtggacaatccatgagaacagagaaaggactgaaacaattgcttccaggggttccattcctctgtatttcaggcaccaagactcagaagcccttcttacaagggcccttcaaggtcatcagtgtggctgaggttgatttgtcgtgtgacaaggctgaaaaaactctaagttactaccaagcacgtctattgtctttacggatgaagacctgcacgcaagctgcatctcacagtggcatggcagccacacaccagaaggcagtgaaaataattgcatacaaaaatggggatgggtatcgtaatgggaagttaattgtggctggaacattccccatgcttcttacagaatgcacggaacaacttgggcttgccagagcagcctccaaagtatataccaaagatggaaccccaatctttaccttgcgtgatttggttttatgggctctagatgaatcctttctccagagagactctgagaaacaaaagcaagatgcagctcctgttggaaaagaacagataattgttgaaagtatggaagaaaatccaagaatgaaagtgaaaaacagattatttgcaaaatctgtgacatccgatagtttggatggtatagacaagtctttgcttaccctcatcctcagaaatcctattgccatctgggtgtcttgtggtgaaccatttctacctccaaatgctttgcagaaagcagaaaaattagagaaacagaactggctaaaaaaggacagaattttggctgatctagataccatgagacacaaaatgagacagttaaaagggcggcgagtagcggcatgtcagccagccaccatggttcctaccaagagccctgtgcagcccgtggtggttgaaggaggctggaccgaacagactcaacaggaaattaaactcatggaacttataagacatacagaggcacacctttctgaaatccaagaaatggaatccaaaataaattttccaattgcaaccaaacgtatagcagtcaagccgagcaacctgtataagcagcccaacacaaaacgagtgtggatttatctaaatggaggcagacctgaagatggcacttatgcctggggcaaaactatttcagaggtcagcttactttatctgaagacatggatctttatttggagcaggaaagttttcttctattttttgataactgcttaa

SEQ ID NO: 8781 - DNA, 5703 bp, Homo sapiens
  source 1..5703: mol_type = unassigned DNA
gcacatccctgcactagtggccgcaaccgaggcgccgcgctccagcagctgctgccgcccagcccggccccgccgccgccccccagccctgcagccccgcagccccggccgcgcccagcccggcgaggacagcaccaggaggcggcccccagcgcggccacaaagacccccggcggcgtctctccgcggaccggtcctacttgaagtccatcatgtccttcggcagagacatggagctggagcacttcgacgagcgggataaggcgcagagatacagccgagggtcgcgggtgaacggcctgccgagcccgacgcacagcgcccactgcagcttctaccgcacccgcacgctgcagacgctcagctccgagaagaaggccaagaaagttcgtttctatcgaaacggagatcgatacttcaaagggattgtgtatgccatctccccagaccggttccgatcttttgaggccctgctggctgatttgacccgaactctgtcggataacgtgaatttgccccagggagtgagaacaatctacaccattgatgggctcaagaagatttccagcctggaccaactggtggaaggagagagttatgtatgtggctccatagagcccttcaagaaactggagtacaccaagaatgtgaaccccaactggtcggtgaacgtcaagaccacctcggcttctcgggcagtgtcttcactggccactgccaaaggaagcccttcagaggtgcgagagaataaggatttcattcggcccaagctggtcaccatcatcagaagtggcgtgaagccacggaaagctgtcaggattctgctgaacaagaaaacggctcattcctttgagcaggtcctcaccgatatcaccgatgccatcaagctggactcgggagtggtgaaacgcctgtacacgttggatgggaaacaggtgatgtgccttcaggacttttttggtgatgatgacatttttattgcatgtggaccggagaagttccgttaccaggatgatttcttgctagatgaaagtgaatgtcgagtggtaaagtccacttcttacaccaaaatagcttcatcatcccgcaggagcaccaccaagagcccaggaccgtccaggcgtagcaagtcccctgcctccaccagctcagttaatggaacccctggtagtcagctctctactccgcgctcaggcaagtcgccaagcccatcacccaccagcccaggaagcctgcggaagcagaggagctctcagcatggcggctcctctacgtcacttgcgtccaccaaagtctgcagctcgatggatgagaacgatggccctggagaagaagtgtcggaggaaggcttccagattccagctacaataacagaacgatataaagtcggaagaacaataggagatggaaattttgctgttgtcaaggaatgtgtagaaagatcgactgctagagagtatgctctgaaaattatcaagaaaagcaaatgtcgaggcaaagagcacatgatccagaatgaagtgtctattttaagaagagtgaagcatcccaatatcgttcttctgattgaggagatggatgtgccaactgaactgtatcttgtcatggaattagtaaaggggggagacctttttgatgccattacttccactaacaaatacaccgagagagacgccagtgggatgctgtacaacctagccagcgccatcaaatacctgcatagcctgaacatcgtccaccgtgatatcaagccagagaacctgctggtgtatgagcaccaagatggcagcaaatcactgaagctgggtgactttggactggccaccattgtagacggccccctgtacacagtctgtggcaccccaacatacgtggctccagaaatcattgcagagactggatacggcctcaaggtggacatctgggcagcaggtgtaatcacttatatcctgctgtgtggtttccctccattccgtggaagtggtgatgaccaggaggtgctttttgatcagattttgatggggcaggtggactttccttctccatactgggataatgtttccgattctgcaaaggagctcattaccatgatgctgttggtcgatgtagatcagcgattttctgctgttcaagtacttgagcatccctgggttaatgatgatggcctcccagaaaatgaacatcagctgtcagtagctggaaagataaagaagcatttcaacacaggccccaagccgaatagcacagcagctggagtttctgtcatagcactggaccacgggtttaccatcaagagatcagggtctttggactactaccagcaaccaggaatgtattggataagaccaccgctcttgataaggagaggcaggttttccgacgaagacgcaaccaggatgtgaggagccggtacaaggcgcagccagctcctcccgaactcaactcggaatcggaagactactccccaagctcctccgagactgttcgctcccctaactcgcccttttaataagacccttttactcaaagtcctagcttaaccctttgagactctgagatttttttcccccaaatttgtgtaaaacagtttcatctgatctatctagcgctcaatgcttgaatggcagaactgaaagtgttttcaggtatctttgtagcggtttccctttactgaataagatgacacgtggtgattgtgaagatggtaatttgctgctaatagagtcctcaaagggttaaggccaatttgcaatttttttttaaacttagaagcaatgaatgttttcatcagtcaagctaggatctgcagtatgtaatatagcacttgttaaccctctgagtgcatagaattttattgagaattcttgtttgggaatttttcaggcctttggatgtatacacacatgtttcttgattttactgcagatcaaggggtgttgttagatgctgaaatgtccagaaaagaaggacatttagaatgatatcttgtttgtccttttctgtgggtttagaacgtggcaggtttataacttcgacacacgcacggttctttcttcttcacaatcctattcagaaacagattttttttttcattagagatatgactgtcagttgcagtgagttctgcatcccaagtggagggaattgggtttgtggcaaagagcttgacccaggaaatagatggtgccccccaaattgtctccacatgaagatgtactgatgacgccccagaaatgctgcttccatatcagctgctgctagcgccagcgcagactctcagggagtcaccacagcttgtcttgtgcttggtgagtgagggtctctctactcagtgtcagacatctacaggaaagaaacaactggtggaaaagagcaataaattgcccggtgctctgcagggctggaatttcaaacagaaagagggaataagatcctgtgatttttctcacctgcttttccacgcactgtggtcatcactgtgcaatctacatctagtatgaaatccacacataggagagctggggcacaaggggactggaggcagttgctttgcaagatggctgaggagaaagcacactgggaacacaatccagaatgttctaacaataagttttcagtgaataaaccactggcaagacaattccatgtgcacctttaggttacctatatagtctcctaggaagatcaggatgaaagacctagatgatacccctgaggataaaacctccatcccctaaaatgattttttttaaataccactgtctttagctgtccaggaggtcagagtgttttttctgtctttgggccaagtcctgtctgagacctgtattttcactcttgttaccaaatctatctccctagtgcagtgtctccaggcctgagtttcttctggaacagattccattttagaatggggattcacaggttctgtgcatcaccacagtgctcagagaggattctcctggggtgtcttagaggcaggtgcccaactcaaatgtattcccaaggtttgctgggctctgggatccacgagacaaccagagagggatatctcatgaaatttgcatctggtggctgaacagtacctatgttctctgttttgaatatactttaatacctgagagtcttaaaatttgtgaacaacgtttctatagtcctttattttcaaatgcacattgatcttcacttgctgcatttttactcttcaaccctgaaactatggtctacattaatatggatttttaaatcacatgtcattacttttgcaacaccatcaccaaaattttttgctcttttacatttaggttcatctctgtggtctgtgttgtcctgacatgtaaaaagcatatcgtttattgaggtttttttcccccccttttagagcatccggaagtgataacacgcaaaatcacaaagtagcataaatcagtaaattagttgagttgtttttgggggggaggtgggggtagggggcacagaacaccagaaagagtgttggtgtgtaggtagattccatattaatgaggaacactgaactagttggaaattactgctttctctagaaatataaagcaaagcactattccaaggctatggagtagctctacagcctggcctcaactctaaaagtgtgaagaatgcaatgggcagagacctacctgcagtggactgtcattttcctttctttctctgaattactgctttttctgtgggcattaactatattgctacagcatctagtgtactgagcctgcggtgcatggctcaggccttttcccatcgacgtctagggggactctggaccgtgtgaagctagggggtgtttctcagcacactgcagaagggcagctcagaagaatgcagggcccattcagcatggggatcccagcacatcactgtagaatttgagtgatctatgctgaataaacagtggaatgtgaccagtcaagtagaaatcttgagtaatcagatggaatgcaatctttctaacattaagctaccaagatcctgaatgtcagagatgtactcagagggttaacagacaagcacaaggcatgctgactacattggtgtatccagattgctttgcttttagccagtgctttctaatttttttctcgacattcttgggatagttcaagtttgaaataattaagtggtggtgttctttaaggaatttctataaccaaattgatcttatttttgatttcacttatcatagaacaaatatgtatcattatggcagtgtatctatgtaattatcaatttaatcatcaccaccggtgtttccatattttttcccaagtatttaatatagctctcttatggtggtggcctggtgatggggaccgtctttcttttactgacacatgaccaatcatatggtattttcaagggaattttaagattcatcttttcagtttgatagtagactagttaaggaagaactctttcattacttgcatcgtgtaaatcatctctgtagacatgtgttcatattaatgaacacattttttctcaacattgtagcagaaatcattttattcgtcatgatcaatgaatatgtgatttgctccagatcgttagaaggaaaagtaagatttcagtcatcaaaaatgtttttaccgtagccctcatctaacttacacgtggtgcatattaaaataagcagagaaaaaaaaatgtgaataaactactgaaaac

SEQ ID NO: 8782 - DNA, 5629 bp, Homo sapiens
  source 1..5629: mol_type = unassigned DNA
gcacatccctgcactagtggccgcaaccgaggcgccgcgctccagcagctgctgccgcccagcccggccccgccgccgccccccagccctgcagccccgcagccccggccgcgcccagcccggcgaggacagcaccaggaggcggcccccagcgcggccacaaagacccccggcggcgtctctccgcggaccggtcctacttgaagtccatcatgtccttcggcagagacatggagctggagcacttcgacgagcgggataaggcgcagagatacagccgagggtcgcgggtgaacggcctgccgagcccgacgcacagcgcccactgcagcttctaccgcacccgcacgctgcagacgctcagctccgagaagaaggccaagaaagttcgtttctatcgaaacggagatcgatacttcaaagggattgtgtatgccatctccccagaccggttccgatcttttgaggccctgctggctgatttgacccgaactctgtcggataacgtgaatttgccccagggagtgagaacaatctacaccattgatgggctcaagaagatttccagcctggaccaactggtggaaggagagagttatgtatgtggctccatagagcccttcaagaaactggagtacaccaagaatgtgaaccccaactggtcggtgaacgtcaagaccacctcggcttctcgggcagtgtcttcactggccactgccaaaggaagcccttcagaggtgcgagagaataaggatttcattcggcccaagctggtcaccatcatcagaagtggcgtgaagccacggaaagctgtcaggattctgctgaacaagaaaacggctcattcctttgagcaggtcctcaccgatatcaccgatgccatcaagctggactcgggagtggtgaaacgcctgtacacgttggatgggaaacaggtgatgtgccttcaggacttttttggtgatgatgacatttttattgcatgtggaccggagaagttccgttaccaggatgatttcttgctagatgaaagtgaatgtcgagtggtaaagtccacttcttacaccaaaatagcttcatcatcccgcaggagcaccaccaagagcccaggaccgtccaggcgtagcaagtcccctgcctccaccagctcagttaatggaacccctggtagtcagctctctactccgcgctcaggcaagtcgccaagcccatcacccaccagcccaggaagcctgcggaagcagaggagctctcagcatggcggctcctctacgtcacttgcgtccaccaaagtctgcagctcgatggatgagaacgatggccctggagaagaagtgtcggaggaaggcttccagattccagctacaataacagaacgatataaagtcggaagaacaataggagatggaaattttgctgttgtcaaggaatgtgtagaaagatcgactgctagagagtatgctctgaaaattatcaagaaaagcaaatgtcgaggcaaagagcacatgatccagaatgaagtgtctattttaagaagagtgaagcatcccaatatcgttcttctgattgaggagatggatgtgccaactgaactgtatcttgtcatggaattagtaaaggggggagacctttttgatgccattacttccactaacaaatacaccgagagagacgccagtgggatgctgtacaacctagccagcgccatcaaatacctgcatagcctgaacatcgtccaccgtgatatcaagccagagaacctgctggtgtatgagcaccaagatggcagcaaatcactgaagctgggtgactttggactggccaccattgtagacggccccctgtacacagtctgtggcaccccaacatacgtggctccagaaatcattgcagagactggatacggcctcaaggtggacatctgggcagcaggtgtaatcacttatatcctgctgtgtggtttccctccattccgtggaagtggtgatgaccaggaggtgctttttgatcagattttgatggggcaggtggactttccttctccatactgggataatgtttccgattctgcaaaggagctcattaccatgatgctgttggtcgatgtagatcagcgattttctgctgttcaagtacttgagcatccctgggttaatgatgatggcctcccagaaaatgaacatcagctgtcagtagctggaaagataaagaagcatttcaacacaggccccaagccgaatagcacagcagctggagtttctgtcatagcaaccaccgctcttgataaggagaggcaggttttccgacgaagacgcaaccaggatgtgaggagccggtacaaggcgcagccagctcctcccgaactcaactcggaatcggaagactactccccaagctcctccgagactgttcgctcccctaactcgcccttttaataagacccttttactcaaagtcctagcttaaccctttgagactctgagatttttttcccccaaatttgtgtaaaacagtttcatctgatctatctagcgctcaatgcttgaatggcagaactgaaagtgttttcaggtatctttgtagcggtttccctttactgaataagatgacacgtggtgattgtgaagatggtaatttgctgctaatagagtcctcaaagggttaaggccaatttgcaatttttttttaaacttagaagcaatgaatgttttcatcagtcaagctaggatctgcagtatgtaatatagcacttgttaaccctctgagtgcatagaattttattgagaattcttgtttgggaatttttcaggcctttggatgtatacacacatgtttcttgattttactgcagatcaaggggtgttgttagatgctgaaatgtccagaaaagaaggacatttagaatgatatcttgtttgtccttttctgtgggtttagaacgtggcaggtttataacttcgacacacgcacggttctttcttcttcacaatcctattcagaaacagattttttttttcattagagatatgactgtcagttgcagtgagttctgcatcccaagtggagggaattgggtttgtggcaaagagcttgacccaggaaatagatggtgccccccaaattgtctccacatgaagatgtactgatgacgccccagaaatgctgcttccatatcagctgctgctagcgccagcgcagactctcagggagtcaccacagcttgtcttgtgcttggtgagtgagggtctctctactcagtgtcagacatctacaggaaagaaacaactggtggaaaagagcaataaattgcccggtgctctgcagggctggaatttcaaacagaaagagggaataagatcctgtgatttttctcacctgcttttccacgcactgtggtcatcactgtgcaatctacatctagtatgaaatccacacataggagagctggggcacaaggggactggaggcagttgctttgcaagatggctgaggagaaagcacactgggaacacaatccagaatgttctaacaataagttttcagtgaataaaccactggcaagacaattccatgtgcacctttaggttacctatatagtctcctaggaagatcaggatgaaagacctagatgatacccctgaggataaaacctccatcccctaaaatgattttttttaaataccactgtctttagctgtccaggaggtcagagtgttttttctgtctttgggccaagtcctgtctgagacctgtattttcactcttgttaccaaatctatctccctagtgcagtgtctccaggcctgagtttcttctggaacagattccattttagaatggggattcacaggttctgtgcatcaccacagtgctcagagaggattctcctggggtgtcttagaggcaggtgcccaactcaaatgtattcccaaggtttgctgggctctgggatccacgagacaaccagagagggatatctcatgaaatttgcatctggtggctgaacagtacctatgttctctgttttgaatatactttaatacctgagagtcttaaaatttgtgaacaacgtttctatagtcctttattttcaaatgcacattgatcttcacttgctgcatttttactcttcaaccctgaaactatggtctacattaatatggatttttaaatcacatgtcattacttttgcaacaccatcaccaaaattttttgctcttttacatttaggttcatctctgtggtctgtgttgtcctgacatgtaaaaagcatatcgtttattgaggtttttttcccccccttttagagcatccggaagtgataacacgcaaaatcacaaagtagcataaatcagtaaattagttgagttgtttttgggggggaggtgggggtagggggcacagaacaccagaaagagtgttggtgtgtaggtagattccatattaatgaggaacactgaactagttggaaattactgctttctctagaaatataaagcaaagcactattccaaggctatggagtagctctacagcctggcctcaactctaaaagtgtgaagaatgcaatgggcagagacctacctgcagtggactgtcattttcctttctttctctgaattactgctttttctgtgggcattaactatattgctacagcatctagtgtactgagcctgcggtgcatggctcaggccttttcccatcgacgtctagggggactctggaccgtgtgaagctagggggtgtttctcagcacactgcagaagggcagctcagaagaatgcagggcccattcagcatggggatcccagcacatcactgtagaatttgagtgatctatgctgaataaacagtggaatgtgaccagtcaagtagaaatcttgagtaatcagatggaatgcaatctttctaacattaagctaccaagatcctgaatgtcagagatgtactcagagggttaacagacaagcacaaggcatgctgactacattggtgtatccagattgctttgcttttagccagtgctttctaatttttttctcgacattcttgggatagttcaagtttgaaataattaagtggtggtgttctttaaggaatttctataaccaaattgatcttatttttgatttcacttatcatagaacaaatatgtatcattatggcagtgtatctatgtaattatcaatttaatcatcaccaccggtgtttccatattttttcccaagtatttaatatagctctcttatggtggtggcctggtgatggggaccgtctttcttttactgacacatgaccaatcatatggtattttcaagggaattttaagattcatcttttcagtttgatagtagactagttaaggaagaactctttcattacttgcatcgtgtaaatcatctctgtagacatgtgttcatattaatgaacacattttttctcaacattgtagcagaaatcattttattcgtcatgatcaatgaatatgtgatttgctccagatcgttagaaggaaaagtaagatttcagtcatcaaaaatgtttttaccgtagccctcatctaacttacacgtggtgcatattaaaataagcagagaaaaaaaaatgtgaataaactactgaaaac

SEQ ID NO: 8783 - DNA, 2101 bp, Homo sapiens
  source 1..2101: mol_type = unassigned DNA
gcacatccctgcactagtggccgcaaccgaggcgccgcgctccagcagctgctgccgcccagcccggccccgccgccgccccccagccctgcagccccgcagccccggccgcgcccagcccggcgaggacagcaccaggaggcggcccccagcgcggccacaaagacccccggcggcgtctctccgcggaccggtcctacttgaagtccatcatgtccttcggcagagacatggagctggagcacttcgacgagcgggataaggcgcagagatacagccgagggtcgcgggtgaacggcctgccgagcccgacgcacagcgcccactgcagcttctaccgcacccgcacgctgcagacgctcagctccgagaagaaggccaagaaagttcgtttctatcgaaacggagatcgatacttcaaagggattgtgtatgccatctccccagaccggttccgatcttttgaggccctgctggctgatttgacccgaactctgtcggataacgtgaatttgccccagggagtgagaacaatctacaccattgatgggctcaagaagatttccagcctggaccaactggtggaaggagagagttatgtatgtggctccatagagcccttcaagaaactggagtacaccaagaatgtgaaccccaactggtcggtgaacgtcaagaccacctcggcttctcgggcagtgtcttcactggccactgccaaaggaagcccttcagaggtgcgagagaataaggatttcattcggcccaagctggtcaccatcatcagaagtggcgtgaagccacggaaagctgtcaggattctgctgaacaagaaaacggctcattcctttgagcaggtcctcaccgatatcaccgatgccatcaagctggactcgggagtggtgaaacgcctgtacacgttggatgggaaacaggtgatgtgccttcaggacttttttggtgatgatgacatttttattgcatgtggaccggagaagttccgttaccaggatgatttcttgctagatgaaagtgaatgtcgagtggtaaagtccacttcttacaccaaaatagcttcatcatcccgcaggagcaccaccaagagcccaggaccgtccaggcgtagcaagtcccctgcctccaccagctcagttaatggaacccctggtagtcagctctctactccgcgctcaggcaagtcgccaagcccatcacccaccagcccaggaagcctgcggaagcagagggacctgtaccgccccctctcttcggatgacttggattcagtaggagactcagtgtaaaagaaacaatggagcaatgtatatggtttgtgattgggtgaaggtttcacatttctgaagcaaaagtcttacagcaaaatacacaaaagagttttgcataccttgaaatgataaaagaccaaatcatccaaaagtaaatatgtatgcattttgttttcgtgatgttcaaccttgaaattgagagatttttaaaaatatctcccacatggatttgattggggagagtttgaacacaaaatgctgagatttttgtacagggcctggctctagatgaatttcatacacggacccaatattgagtacaagaacacactaaccatgtggcaatatagagccagaatttctgcagatggagttttcttcttaattataagtagacatagagatataatttttctgtactttctgtaaagcatattaaaacggcactagcaggcatattttttctaaaggttatattgtttttaaaatttgaattgcttggtttttagaggtacttttattacaaaataataaaaatacttgggtagattttttttctccctagacagtagaaaaagctacttactgttttgtgggttagtacatccgagagaaaaagaaaaattatgacaacgacacatctcataaagactctgaagttaggctttaggaacttgccttgtttttgttgtcaagtaaattttattttttaaagttattttattagaaacagtataaatttagcttaagctatatgccaatatgaagaacttggccaatggcattgctatagattgtataattttttcttacaa

SEQ ID NO: 8784 - DNA, 4610 bp, Homo sapiens
  source 1..4610: mol_type = unassigned DNA
agccttagccatccttaaactcatccaaccgattcccatttccgcgggtgcttggcttagtgctgagacgggattccgccgttggtattcaggtccaacactaagactgtgtccatgttagaactcatagaagttaatggaacccctggtagtcagctctctactccgcgctcaggcaagtcgccaagcccatcacccaccagcccaggaagcctgcggaagcagaggagctctcagcatggcggctcctctacgtcacttgcgtccaccaaagtctgcagctcgatggatgagaacgatggccctggagaagaagtgtcggaggaaggcttccagattccagctacaataacagaacgatataaagtcggaagaacaataggagatggaaattttgctgttgtcaaggaatgtgtagaaagatcgactgctagagagtatgctctgaaaattatcaagaaaagcaaatgtcgaggcaaagagcacatgatccagaatgaagtgtctattttaagaagagtgaagcatcccaatatcgttcttctgattgaggagatggatgtgccaactgaactgtatcttgtcatggaattagtaaaggggggagacctttttgatgccattacttccactaacaaatacaccgagagagacgccagtgggatgctgtacaacctagccagcgccatcaaatacctgcatagcctgaacatcgtccaccgtgatatcaagccagagaacctgctggtgtatgagcaccaagatggcagcaaatcactgaagctgggtgactttggactggccaccattgtagacggccccctgtacacagtctgtggcaccccaacatacgtggctccagaaatcattgcagagactggatacggcctcaaggtggacatctgggcagcaggtgtaatcacttatatcctgctgtgtggtttccctccattccgtggaagtggtgatgaccaggaggtgctttttgatcagattttgatggggcaggtggactttccttctccatactgggataatgtttccgattctgcaaaggagctcattaccatgatgctgttggtcgatgtagatcagcgattttctgctgttcaagtacttgagcatccctgggttaatgatgatggcctcccagaaaatgaacatcagctgtcagtagctggaaagataaagaagcatttcaacacaggccccaagccgaatagcacagcagctggagtttctgtcatagcaaccaccgctcttgataaggagaggcaggttttccgacgaagacgcaaccaggatgtgaggagccggtacaaggcgcagccagctcctcccgaactcaactcggaatcggaagactactccccaagctcctccgagactgttcgctcccctaactcgcccttttaataagacccttttactcaaagtcctagcttaaccctttgagactctgagatttttttcccccaaatttgtgtaaaacagtttcatctgatctatctagcgctcaatgcttgaatggcagaactgaaagtgttttcaggtatctttgtagcggtttccctttactgaataagatgacacgtggtgattgtgaagatggtaatttgctgctaatagagtcctcaaagggttaaggccaatttgcaatttttttttaaacttagaagcaatgaatgttttcatcagtcaagctaggatctgcagtatgtaatatagcacttgttaaccctctgagtgcatagaattttattgagaattcttgtttgggaatttttcaggcctttggatgtatacacacatgtttcttgattttactgcagatcaaggggtgttgttagatgctgaaatgtccagaaaagaaggacatttagaatgatatcttgtttgtccttttctgtgggtttagaacgtggcaggtttataacttcgacacacgcacggttctttcttcttcacaatcctattcagaaacagattttttttttcattagagatatgactgtcagttgcagtgagttctgcatcccaagtggagggaattgggtttgtggcaaagagcttgacccaggaaatagatggtgccccccaaattgtctccacatgaagatgtactgatgacgccccagaaatgctgcttccatatcagctgctgctagcgccagcgcagactctcagggagtcaccacagcttgtcttgtgcttggtgagtgagggtctctctactcagtgtcagacatctacaggaaagaaacaactggtggaaaagagcaataaattgcccggtgctctgcagggctggaatttcaaacagaaagagggaataagatcctgtgatttttctcacctgcttttccacgcactgtggtcatcactgtgcaatctacatctagtatgaaatccacacataggagagctggggcacaaggggactggaggcagttgctttgcaagatggctgaggagaaagcacactgggaacacaatccagaatgttctaacaataagttttcagtgaataaaccactggcaagacaattccatgtgcacctttaggttacctatatagtctcctaggaagatcaggatgaaagacctagatgatacccctgaggataaaacctccatcccctaaaatgattttttttaaataccactgtctttagctgtccaggaggtcagagtgttttttctgtctttgggccaagtcctgtctgagacctgtattttcactcttgttaccaaatctatctccctagtgcagtgtctccaggcctgagtttcttctggaacagattccattttagaatggggattcacaggttctgtgcatcaccacagtgctcagagaggattctcctggggtgtcttagaggcaggtgcccaactcaaatgtattcccaaggtttgctgggctctgggatccacgagacaaccagagagggatatctcatgaaatttgcatctggtggctgaacagtacctatgttctctgttttgaatatactttaatacctgagagtcttaaaatttgtgaacaacgtttctatagtcctttattttcaaatgcacattgatcttcacttgctgcatttttactcttcaaccctgaaactatggtctacattaatatggatttttaaatcacatgtcattacttttgcaacaccatcaccaaaattttttgctcttttacatttaggttcatctctgtggtctgtgttgtcctgacatgtaaaaagcatatcgtttattgaggtttttttcccccccttttagagcatccggaagtgataacacgcaaaatcacaaagtagcataaatcagtaaattagttgagttgtttttgggggggaggtgggggtagggggcacagaacaccagaaagagtgttggtgtgtaggtagattccatattaatgaggaacactgaactagttggaaattactgctttctctagaaatataaagcaaagcactattccaaggctatggagtagctctacagcctggcctcaactctaaaagtgtgaagaatgcaatgggcagagacctacctgcagtggactgtcattttcctttctttctctgaattactgctttttctgtgggcattaactatattgctacagcatctagtgtactgagcctgcggtgcatggctcaggccttttcccatcgacgtctagggggactctggaccgtgtgaagctagggggtgtttctcagcacactgcagaagggcagctcagaagaatgcagggcccattcagcatggggatcccagcacatcactgtagaatttgagtgatctatgctgaataaacagtggaatgtgaccagtcaagtagaaatcttgagtaatcagatggaatgcaatctttctaacattaagctaccaagatcctgaatgtcagagatgtactcagagggttaacagacaagcacaaggcatgctgactacattggtgtatccagattgctttgcttttagccagtgctttctaatttttttctcgacattcttgggatagttcaagtttgaaataattaagtggtggtgttctttaaggaatttctataaccaaattgatcttatttttgatttcacttatcatagaacaaatatgtatcattatggcagtgtatctatgtaattatcaatttaatcatcaccaccggtgtttccatattttttcccaagtatttaatatagctctcttatggtggtggcctggtgatggggaccgtctttcttttactgacacatgaccaatcatatggtattttcaagggaattttaagattcatcttttcagtttgatagtagactagttaaggaagaactctttcattacttgcatcgtgtaaatcatctctgtagacatgtgttcatattaatgaacacattttttctcaacattgtagcagaaatcattttattcgtcatgatcaatgaatatgtgatttgctccagatcgttagaaggaaaagtaagatttcagtcatcaaaaatgtttttaccgtagccctcatctaacttacacgtggtgcatattaaaataagcagagaaaaaaaaatgtgaataaactactgaaaac

SEQ ID NO: 8785 - DNA, 6923 bp, Homo sapiens
  source 1..6923: mol_type = unassigned DNA
ctttctctgattaaatttaatggaacccctggtagtcagctctctactccgcgctcaggcaagtcgccaagcccatcacccaccagcccaggaagcctgcggaagcagaggagctctcagcatggcggctcctctacgtcacttgcgtccaccaaagtctgcagctcgatggatgagaacgatggccctggagaagaagtgtcggaggaaggcttccagattccagctacaataacagaacgatataaagtcggaagaacaataggagatggaaattttgctgttgtcaaggaatgtgtagaaagatcgactgctagagagtatgctctgaaaattatcaagaaaagcaaatgtcgaggcaaagagcacatgatccagaatgaagtgtctattttaagaagagtgaagcatcccaatatcgttcttctgattgaggagatggatgtgccaactgaactgtatcttgtcatggaattagtaaaggggggagacctttttgatgccattacttccactaacaaatacaccgagagagacgccagtgggatgctgtacaacctagccagcgccatcaaatacctgcatagcctgaacatcgtccaccgtgatatcaagccagagaacctgctggtgtatgagcaccaagatggcagcaaatcactgaagctgggtgactttggactggccaccattgtagacggccccctgtacacagtctgtggcaccccaacatacgtggctccagaaatcattgcagagactggatacggcctcaaggtggacatctgggcagcaggtgtaatcacttatatcctgctgtgtggtttccctccattccgtggaagtggtgatgaccaggaggtgctttttgatcagattttgatggggcaggtggactttccttctccatactgggataatgtttccgattctgcaaaggagctcattaccatgatgctgttggtcgatgtagatcagcgattttctgctgttcaagtacttgagcatccctgggttaatgatgatggcctcccagaaaatgaacatcagctgtcagtagctggaaagataaagaagcatttcaacacaggccccaagccgaatagcacagcagctggagtttctgtcatagcactggaccacgggtttaccatcaagagatcagggtctttggactactaccagcaaccaggaatgtattggataagaccaccgctcttgataaggagaggcaggttttccgacgaagacgcaaccaggatgtgaggagccggtacaaggcgcagccagctcctcccgaactcaactcggaatcggaagactactccccaagctcctccgagactgttcgctcccctaactcgcccttttaataagacccttttactcaaagtcctagcttaaccctttgagactctgagatttttttcccccaaatttgtgtaaaacagtttcatctgatctatctagcgctcaatgcttgaatggcagaactgaaagtgttttcaggtatctttgtagcggtttccctttactgaataagatgacacgtggtgattgtgaagatggtaatttgctgctaatagagtcctcaaagggttaaggccaatttgcaatttttttttaaacttagaagcaatgaatgttttcatcagtcaagctaggatctgcagtatgtaatatagcacttgttaaccctctgagtgcatagaattttattgagaattcttgtttgggaatttttcaggcctttggatgtatacacacatgtttcttgattttactgcagatcaaggggtgttgttagatgctgaaatgtccagaaaagaaggacatttagaatgatatcttgtttgtccttttctgtgggtttagaacgtggcaggtttataacttcgacacacgcacggttctttcttcttcacaatcctattcagaaacagattttttttttcattagagatatgactgtcagttgcagtgagttctgcatcccaagtggagggaattgggtttgtggcaaagagcttgacccaggaaatagatggtgccccccaaattgtctccacatgaagatgtactgatgacgccccagaaatgctgcttccatatcagctgctgctagcgccagcgcagactctcagggagtcaccacagcttgtcttgtgcttggtgagtgagggtctctctactcagtgtcagacatctacaggaaagaaacaactggtggaaaagagcaataaattgcccggtgctctgcagggctggaatttcaaacagaaagagggaataagatcctgtgatttttctcacctgcttttccacgcactgtggtcatcactgtgcaatctacatctagtatgaaatccacacataggagagctggggcacaaggggactggaggcagttgctttgcaagatggctgaggagaaagcacactgggaacacaatccagaatgttctaacaataagttttcagtgaataaaccactggcaagacaattccatgtgcacctttaggttacctatatagtctcctaggaagatcaggatgaaagacctagatgatacccctgaggataaaacctccatcccctaaaatgattttttttaaataccactgtctttagctgtccaggaggtcagagtgttttttctgtctttgggccaagtcctgtctgagacctgtattttcactcttgttaccaaatctatctccctagtgcagtgtctccaggcctgagtttcttctggaacagattccattttagaatggggattcacaggttctgtgcatcaccacagtgctcagagaggattctcctggggtgtcttagaggcaggtgcccaactcaaatgtattcccaaggtttgctgggctctgggatccacgagacaaccagagagggatatctcatgaaatttgcatctggtggctgaacagtacctatgttctctgttttgaatatactttaatacctgagagtcttaaaatttgtgaacaacgtttctatagtcctttattttcaaatgcacattgatcttcacttgctgcatttttactcttcaaccctgaaactatggtctacattaatatggatttttaaatcacatgtcattacttttgcaacaccatcaccaaaattttttgctcttttacatttaggttcatctctgtggtctgtgttgtcctgacatgtaaaaagcatatcgtttattgaggtttttttcccccccttttagagcatccggaagtgataacacgcaaaatcacaaagtagcataaatcagtaaattagttgagttgtttttgggggggaggtgggggtagggggcacagaacaccagaaagagtgttggtgtgtaggtagattccatattaatgaggaacactgaactagttggaaattactgctttctctagaaatataaagcaaagcactattccaaggctatggagtagctctacagcctggcctcaactctaaaagtgtgaagaatgcaatgggcagagacctacctgcagtggactgtcattttcctttctttctctgaattactgctttttctgtgggcattaactatattgctacagcatctagtgtactgagcctgcggtgcatggctcaggccttttcccatcgacgtctagggggactctggaccgtgtgaagctagggggtgtttctcagcacactgcagaagggcagctcagaagaatgcagggcccattcagcatggggatcccagcacatcactgtagaatttgagtgatctatgctgaataaacagtggaatgtgaccagtcaagtagaaatcttgagtaatcagatggaatgcaatctttctaacattaagctaccaagatcctgaatgtcagagatgtactcagagggttaacagacaagcacaaggcatgctgactacattggtgtatccagattgctttgcttttagccagtgctttctaatttttttctcgacattcttgggatagttcaagtttgaaataattaagtggtggtgttctttaaggaatttctataaccaaattgatcttatttttgatttcacttatcatagaacaaatatgtatcattatggcagtgtatctatgtaattatcaatttaatcatcaccaccggtgtttccatattttttcccaagtatttaatatagctctcttatggtggtggcctggtgatggggaccgtctttcttttactgacacatgaccaatcatatggtattttcaagggaattttaagattcatcttttcagtttgatagtagactagttaaggaagaactctttcattacttgcatcgtgtaaatcatctctgtagacatgtgttcatattaatgaacacattttttctcaacattgtagcagaaatcattttattcgtcatgatcaatgaatatgtgatttgctccagatcgttagaaggaaaagtaagatttcagtcatcaaaaatgtttttaccgtagccctcatctaacttacacgtggtgcatattaaaataagcagagaaaaaaaaatgtgaataaactactgaaaacacttggtgttttgtgttcaatgagaccttcctgcaacctgctccccatgggtggcagttaacaggcccatcagatattgttgaaagaaagcaatatatccatgaatgaaggctaaaattgcaatcctttaccctttgaggcatatttcagttgaaaacaaaaagaaaagaaaatttggcttagagggtcacagagctcccatatgaccaagtctcaagcacattaaatcatggttgtttactggccaagggcgtccactagacaactctatcccttgcgctgaagctcaatcgtgctgagggagagctttcttaatattactgtgttgctcttagcccttctctgggttaggatctgtcagcatttctatgataaactcctattctcaaaggtttttaatttgaccataaaaatgtgccccaggctgaagtttgctatacagggctgtaccaaagagtgaaggtttacttccttctctttccaacttcttccccattctccaaggaaaagaacaacaaaaaaatctggtatggtccctccttaatagtgatttcagaattttggaaagcaccaagatccaagatggtagttttaatgtagttactcattcgcacacattttttaaatttaatgggtcacctggcatatattgtagataacatatcttttctataatttgtaagtcaataatttttttaactgctacatgatatttttttttgcccaaagattttaaaagacttgaagttggtcagttcaaaactcagatttttctacacattgtctgccatgtccattaggagtttggggaaaatactctcacacagacccttactttgcatgcagtttagagggtaagatacgtgcttcttttggggataaagatttccttacttaattgtcaaatttcatggagccattctagtctgttggggaaaatagtgattaaaagcacttccaaaattaacattttttgacaattcagatatgaaaagaagcaggggaaaataatacactttactcttttcttgcttaaaggcaaacaaatcaatgaaacttgaggacacactaaacatttgataactgcaaatgtgctttaaaaattggttcaatggtgcttacacatgaaacggtaacaaatggggttcctaggacgtcagaaggaatctttagtttgtatgtaattacacactagaggaggaggtgcttttaagccagtcttttatttttaatcatctcaaatatgcaaccatacatgcagtaacattaagggtcgtaaactggtgggaaacaggaacttcagtggagaggcttaaatgcctctggttagagtgggggtttttgtttgtttgtttattgttgggtttcaacactgagcatcatttctgtgatcaagtttctaactggcatgtgttttgatcatgaggtttaccatatcttgcccatacagacaaatgagagatctagtttcattttgttccctaaagaaagaacactctctaaaattaaatcatacctgtaaatttcttcagcatttgtttctgttcaatgaaattgagacccttaatgttgctttaatgtaaaattgaatattttgtctgtgatatactttaataatttaaagtaagtaatagttctaaagtcttcactgttgctactaagagaaaatagaattttaaaggtgatgataaagatgctataatgtcagttcactccagtccaatcaaatgtagtaagaaaaagtccttgaatagttctctagggacaatttctcacttgccattgacattaatctttggtgtattctcagaaaaaataaaaagaaattgaaactggtccaaggttatagtcatatcctcgataacttttgaaaaaaaattttattaggaaattaatactagcctttttcattctggctgaaagaaaattattaaaggattagttgagtgtgaaattcaacagtattttgctcatacatactaaaaaggtgcgtagggacttggcgcatttaaacaagtttctgaaaggtttcaatttgactcaagaaaaaaattcaatatttcttttgaaaatactgaatttatcacttgctgcatggatcagatggcataggttaatctttgattttcagaatcctaatgaaataactttcaaacaatttgtgtccttaattaaaggtggaatgagatccaatttttccccctaatccttcagtttaagctgatacatgtaggttaatgtggaatgaaatcatctgtgatatattatgttcatttatcaactgagcttttttgatgttgcctgtttttatgtaaaacatgttcttaaagttaataaaataatagtacttggtgta

SEQ ID NO: 8786 - DNA, 2337 bp, Homo sapiens
  source 1..2337: mol_type = unassigned DNA
gcatttcaatgaggacgggccgaggcacatccctgcactagtggccgcaaccgaggcgccgcgctccagcagctgctgccgcccagcccggccccgccgccgccccccagccctgcagccccgcagccccggccgcgcccagcccggcgaggacagcaccaggaggcggcccccagcgcggccacaaagacccccggcggcgtctctccgcggaccggtcctacttgaagtccatcatgtccttcggcagagacatggagctggagcacttcgacgagcgggataaggcgcagagatacagccgagggtcgcgggtgaacggcctgccgagcccgacgcacagcgcccactgcagcttctaccgcacccgcacgctgcagacgctcagctccgagaagaaggccaagaaagttcgtttctatcgaaacggagatcgatacttcaaagggattgtgtatgccatctccccagaccggttccgatcttttgaggccctgctggctgatttgacccgaactctgtcggataacgtgaatttgccccagggagtgagaacaatctacaccattgatgggctcaagaagatttccagcctggaccaactggtggaaggagagagttatgtatgtggctccatagagcccttcaagaaactggagtacaccaagaatgtgaaccccaactggtcggtgaacgtcaagaccacctcggcttctcgggcagtgtcttcactggccactgccaaaggaagcccttcagaggtgcgagagaataaggatttcattcggcccaagctggtcaccatcatcagaagtggcgtgaagccacggaaagctgtcaggattctgctgaacaagaaaacggctcattcctttgagcaggtcctcaccgatatcaccgatgccatcaagctggactcgggagtggtgaaacgcctgtacacgttggatgggaaacaggtgatgtgccttcaggacttttttggtgatgatgacatttttattgcatgtggaccggagaagttccgttaccaggatgatttcttgctagatgaaagtgaatgtcgagtggtaaagtccacttcttacaccaaaatagcttcatcatcccgcaggagcaccaccaagagcccaggaccgtccaggcgtagcaagtcccctgcctccaccagctcagttaatggaacccctggtagtcagctctctactccgcgctcaggcaagtcgccaagcccatcacccaccagcccaggaagcctgcggaagcagaggagctctcagcatggcggctcctctacgtcacttgcgtccaccaaagtctgcagctcgatggatgagaacgatggccctggagaagaagtgtcggaggaaggcttccagattccagctacaataacagaacgatataaagtcggaagaacaataggagatggaaattttgctgttgtcaaggaatgtgtagaaagatcgactgctagagagtatgctctgaaaattatcaagaaaagcaaatgtcgaggcaaagagcacatgatccagaatgaagtgtctattttaagaagagtgaagcatcccaatatcgttcttctgattgaggagatggatgtgccaactgaactgtatcttgtcatggaattagtaaaggggggagacctttttgatgccattacttccactaacaaatacctgcatagcctgaacatcgtccaccgtgatatcaagccagagaacctgctggtgtatgagcaccaagatggcagcaaatcactgaagctgggtgactttggactggccaccattgtagacggccccctgtacacagtctgtggcaccccaacatacgtggctccagaaatcattgcagagactggatacggcctcaaggtggacatctgggcagcaggtgtaatcacttatatcctgctgtgtggtttccctccattccgtggaagtggtgatgaccaggaggtgctttttgatcagattttgatggggcaggtggactttccttctccatactgggataatgtttccgattctgcaaaggagctcattaccatgatggcctcccagaaaatgaacatcagctgtcagtagctggaaagataaagaagcatttcaacacaggccccaagccgaatagcacagcagctggagtttctgtcatagcagcccctgctagaccaccgctcttgataaggagaggcaggttttccgacgaagacgcaaccaggatgtgaggagccggtacaaggcgcagccagctcctcccgaactcaactcggaatcggaagactactccccaagctcctccgagactgttcgctcccctaactcg

SEQ ID NO: 8787 - DNA, 4265 bp, Homo sapiens
  source 1..4265: mol_type = unassigned DNA
ccgcggtttggcatccccggggccgggaagcctcctccagcgctgacagcctgtcggcggcggagggaggccagagcgcggatgcttgccagtgggccgggcctgaccgctgcgtgggaggcgggctgcattatttcccgctagggccgcgctccagggaaggaaggggccagacacggccctctcagccccgaacggcgcgcgctgcccggcgggcgggatccgggcgcggccgaggcggcggcgctgcaccccgggcctgggcccgcgcgactcccccgggggcctctcccacgctccgcgccccgccccacccttccttccttcctcccctcggcgctcccgggagcgctcggcagacgcccgagctttgtgggcgcccgcgggcccagcgcgagcctcgggcggcccaactttgcctctcccggtcggctcccgagcgggacttgtgaggcgtggccgggtggaggaggcgcttgcgggggcgtggggctccccggcaggcgggaggcacggagcaagtcgcactggacaatgacctgggcagctcggcgctgcggacacttttagctgagggcgcgggcgggtcggctcctccgcggctcctcggccccacctgcgcggagagggcgggatgccagagccaggtgtcccggcgcgttaagggccctcgcagtcagacgtccctgcaccggcgctcgcacccttagtcggcccggaacgtctttttgcggacgccctcggagcagccgcgatggccagcaccaggagtatcgagctggagcactttgaggaacgggacaaaaggccgcggccggggtcgcggagaggggcccccagctcctccgggggcagcagcagctcgggccccaaggggaacgggctcatccccagtccggcgcacagtgcccactgcagcttctaccgcacgcggaccctgcaggccctcagctcggagaagaaggccaagaaggcgcgcttctaccggaacggggaccgctacttcaagggcctggtgtttgccatctccagcgaccgcttccggtccttcgatgcgctcctcatagagctcacccgctccctgtcggacaacgtgaacctgccccagggtgtccgcactatctacaccatcgacggcagccggaaggtcaccagcctggacgagctgctggaaggtgagagttacgtgtgtgcatccaatgaaccatttcgtaaagtcgattacaccaaaaatattaatccaaactggtctgtgaacatcaagggtgggacatcccgagcgctggctgctgcctcctctgtgaaaagtgaagtaaaagaaagtaaagatttcatcaaacccaagttagtgactgtgattcgaagtggagtgaagcctagaaaagccgtgcggatccttctgaataaaaagactgctcattcctttgaacaagtcttaacagatatcaccgaagccattaaactagactcaggagtcgtcaagaggctctgcaccctggatggaaagcaggttacttgtctgcaagacttttttggtgatgacgatgtttttattgcatgtggaccagaaaaatttcgttatgcccaagatgactttgtcctggatcatagtgaatgtcgtgtcctgaagtcatcttattctcgatcctcagctgttaagtattctggatccaaaagccctgggccctctcgacgcagcaaatcaccagcttcagttaatggaactcccagcagccaactttctactcctaaatctacgaaatcctccagttcctctccaactagtccaggaagtttcagaggattaaagcagatttctgctcatggcagatcttcttccaatgtaaacggtggacctgagcttgaccgttgcataagtcctgaaggtgtgaatggaaacagatgctctgaatcatcaactcttcttgagaaatacaaaattggaaaggtcattggtgatggcaattttgcagtagtcaaagagtgtatagacaggtccactggaaaggagtttgccctaaagattatagacaaagccaaatgttgtggaaaggaacacctgattgagaatgaagtgtcaatactgcgccgagtgaaacatcccaatatcattatgctggtcgaggagatggaaacagcaactgagctctttctggtgatggaattggtcaaaggtggagatctctttgatgcaattacttcgtcgaccaagtacactgagagagatggcagtgccatggtgtacaacttagccaatgccctcaggtatctccatggcctcagcatcgtgcacagagacatcaaaccagagaatctcttggtgtgtgaatatcctgatggaaccaagtctttgaaactgggagactttgggcttgcgactgtggtagaaggccctttatacacagtctgtggcacacccacttatgtggctccagaaatcattgctgaaactggctatggcctgaaggtggacatttgggcagctggtgtgatcacatacatacttctctgtggattcccaccattccgaagtgagaacaatctccaggaagatctcttcgaccagatcttggctgggaagctggagtttccggccccctactgggataacatcacggactctgccaaggaattaatcagtcaaatgcttcaggtaaatgttgaagctcggtgtaccgcgggacaaatcctgagtcacccctgggtgtcagatgatgcctcccaggagaataacatgcaagctgaggtgacaggtaaactaaaacagcactttaataatgcgctccccaaacagaacagcactaccaccggggtctccgtcatcatgaacacggctctagataaggaggggcagattttctgcagcaagcactgtcaagacagcggcaggcctgggatggagcccatctctccagttcctccctcagtggaggagatccctgtgcctggggaagcagtcccggcccccacccctccggaatctcccaccccccaccctcctcccgctgccccgggtggtgagcgggcaggaacctggcgccgccaccgagactgagcctcctgcagacgggcgaagccgcctgctgcagcccaggaagccagccctctgctcggcctcgccggcctccctgctgcaggcctccctctcttcaccgcctgcgcctgagttcgcgggtcctccgcaggccgcctgggaaccggagcctggcgtgccggagcctggcctggtgctctgggctctgccttctggttcctggaggcatcaaaggctgcatccgttctgccaacagctgttcggagagactcgttccagatcatcccgtcattttcagtttgttggacattttacagcttcaccaggagaatgtgcaactttattccagcattcgatgcatttttatagaaacactttggaaacactttggatgaaccaaggccttttccttatttaagtagactcagaacactccctttcttttcttttctctctctctctctcttttttttttacgaaagacttagaattgcatttgtccttttgtgggtgtcctgtgagaggtgatatgggggctaagaggactggctttctaatagaagaagtgagcgcctgagaggacaatttggtcattggacacggattgcaggctttgagaagcgctcagaggcccagggcggcgggctcagccattcggcttggggcaccaggctccccagagacaatgctcagtattcattcatacacagacgatggaagaagccacttcttccctgggcggtgtgggtttcccccagctcttcccacacgtgtgttaggaaatgcccgtgaacttgccctctgggctttttaatgagaggcttggcgcatgcggcacccagcggctgcttccctgcaagccagcgacttgccgagcagaatgagctctgctcctgagccccggtagctgcttcctcatctgcatttcatctggagcagggcaggtaaccacaggaggaggcatgcccgaggcagccaggactgggcgggaaggtgctccctggatatactctgtgaaccttctggaaggctgctggcagtttttcctttttgtccaccaccctgctctttttaataattgtacataatccgtgtatttgttttacctgctcatcttctaaactggcgagccctatagttcgttctcattgttagattttgccttttacaagtgtccccaacctgcaataaacttttccctcttgaaaaaaagtaatcagggatgggcaaa

SEQ ID NO: 8788 - DNA, 3543 bp, Homo sapiens
  source 1..3543: mol_type = unassigned DNA
atggccagcaccaggagtatcgagctggagcactttgaggaacgggacaaaaggccgcggccggggtcgcggagaggggcccccagctcctccgggggcagcagcagctcgggccccaaggggaacgggctcatccccagtccggcgcacagtgcccactgcagcttctaccgcacgcggaccctgcaggccctcagctcggagaagaaggccaagaaggcgcgcttctaccggaacggggaccgctacttcaagggcctggtgtttgccatctccagcgaccgcttccggtccttcgatgcgctcctcatagagctcacccgctccctgtcggacaacgtgaacctgccccagggtgtccgcactatctacaccatcgacggcagccggaaggtcaccagcctggacgagctgctggaaggtgagagttacgtgtgtgcatccaatgaaccatttcgtaaagtcgattacaccaaaaatattaatccaaactggtctgtgaacatcaagggtgggacatcccgagcgctggctgctgcctcctctgtgaaaagtgaagtaaaagaaagtaaagatttcatcaaacccaagttagtgactgtgattcgaagtggagtgaagcctagaaaagccgtgcggatccttctgaataaaaagactgctcattcctttgaacaagtcttaacagatatcaccgaagccattaaactagactcaggagtcgtcaagaggctctgcaccctggatggaaagcaggttacttgtctgcaagacttttttggtgatgacgatgtttttattgcatgtggaccagaaaaatttcgttatgcccaagatgactttgtcctggatcatagtgaatgtcgtgtcctgaagtcatcttattctcgatcctcagctgttaagtattctggatccaaaagccctgggccctctcgacgcagcaaatcaccagcttcagtaaagcggggtggccactactccagtgcctattctacagccaaatccccagttaatggaactcccagcagccaactttctactcctaaatctacgaaatcctccagttcctctccaactagtccaggaagtttcagaggattaaagcagatttctgctcatggcagatcttcttccaatgtaaacggtggacctgagcttgaccgttgcataagtcctgaaggtgtgaatggaaacagatgctctgaatcatcaactcttcttgagaaatacaaaattggaaaggtcattggtgatggcaattttgcagtagtcaaagagtgtatagacaggtccactggaaaggagtttgccctaaagattatagacaaagccaaatgttgtggaaaggaacacctgattgagaatgaagtgtcaatactgcgccgagtgaaacatcccaatatcattatgctggtcgaggagatggaaacagcaactgagctctttctggtgatggaattggtcaaaggtggagatctctttgatgcaattacttcgtcgaccaagtacactgagagagatggcagtgccatggtgtacaacttagccaatgccctcaggtatctccatggcctcagcatcgtgcacagagacatcaaaccagagaatctcttggtgtgtgaatatcctgatggaaccaagtctttgaaactgggagactttgggcttgcgactgtggtagaaggccctttatacacagtctgtggcacacccacttatgtggctccagaaatcattgctgaaactggctatggcctgaaggtggacatttgggcagctggtgtgatcacatacatacttctctgtggattcccaccattccgaagtgagaacaatctccaggaagatctcttcgaccagatcttggctgggaagctggagtttccggccccctactgggataacatcacggactctgccaaggaattaatcagtcaaatgcttcaggtaaatgttgaagctcggtgtaccgcgggacaaatcctgagtcacccctgggtgtcagatgatgcctcccaggagaataacatgcaagctgaggtgacaggtaaactaaaacagcactttaataatgcgctccccaaacagaacagcactaccaccggggtctccgtcatcatgaacacggctctagataaggaggggcagattttctgcagcaagcactgtcaagacagcggcaggcctgggatggagcccatctctccagttcctccctcagtggaggagatccctgtgcctggggaagcagtcccggcccccacccctccggaatctcccaccccccaccctcctcccgctgccccgggtggtgagcgggcaggaacctggcgccgccaccgagactgagcctcctgcagacgggcgaagccgcctgctgcagcccaggaagccagccctctgctcggcctcgccggcctccctgctgcaggcctccctctcttcaccgcctgcgcctgagttcgcgggtcctccgcaggccgcctgggaaccggagcctggcgtgccggagcctggcctggtgctctgggctctgccttctggttcctggaggcatcaaaggctgcatccgttctgccaacagctgttcggagagactcgttccagatcatcccgtcattttcagtttgttggacattttacagcttcaccaggagaatgtgcaactttattccagcattcgatgcatttttatagaaacactttggaaacactttggatgaaccaaggccttttccttatttaagtagactcagaacactccctttcttttcttttctctctctctctctcttttttttttacgaaagacttagaattgcatttgtccttttgtgggtgtcctgtgagaggtgatatgggggctaagaggactggctttctaatagaagaagtgagcgcctgagaggacaatttggtcattggacacggattgcaggctttgagaagcgctcagaggcccagggcggcgggctcagccattcggcttggggcaccaggctccccagagacaatgctcagtattcattcatacacagacgatggaagaagccacttcttccctgggcggtgtgggtttcccccagctcttcccacacgtgtgttaggaaatgcccgtgaacttgccctctgggctttttaatgagaggcttggcgcatgcggcacccagcggctgcttccctgcaagccagcgacttgccgagcagaatgagctctgctcctgagccccggtagctgcttcctcatctgcatttcatctggagcagggcaggtaaccacaggaggaggcatgcccgaggcagccaggactgggcgggaaggtgctccctggatatactctgtgaaccttctggaaggctgctggcagtttttcctttttgtccaccaccctgctctttttaataattgtacataatccgtgtatttgttttacctgctcatcttctaaactggcgagccctatagttcgttctcattgttagattttgccttttacaagtgtccccaacctgcaataaacttttccctcttgaaaaaaa

SEQ ID NO: 8789 - DNA, 2298 bp, Homo sapiens
  source 1..2298: mol_type = unassigned DNA
atggccagcaccaggagtatcgagctggagcactttgaggaacgggacaaaaggccgcggccggggtcgcggagaggggcccccagctcctccgggggcagcagcagctcgggccccaaggggaacgggctcatccccagtccggcgcacagtgcccactgcagcttctaccgcacgcggaccctgcaggccctcagctcggagaagaaggccaagaaggcgcgcttctaccggaacggggaccgctacttcaagggcctggtgtttgccatctccagcgaccgcttccggtccttcgatgcgctcctcatagagctcacccgctccctgtcggacaacgtgaacctgccccagggtgtccgcactatctacaccatcgacggcagccggaaggtcaccagcctggacgagctgctggaaggtgagagttacgtgtgtgcatccaatgaaccatttcgtaaagtcgattacaccaaaaatattaatccaaactggtctgtgaacatcaagggtgggacatcccgagcgctggctgctgcctcctctgtgaaaagtgaagtaaaagaaagtaaagatttcatcaaacccaagttagtgactgtgattcgaagtggagtgaagcctagaaaagccgtgcggatccttctgaataaaaagactgctcattcctttgaacaagtcttaacagatatcaccgaagccattaaactagactcaggagtcgtcaagaggctctgcaccctggatggaaagcaggttacttgtctgcaagacttttttggtgatgacgatgtttttattgcatgtggaccagaaaaatttcgttatgcccaagatgactttgtcctggatcatagtgaatgtcgtgtcctgaagtcatcttattctcgatcctcagctgttaagtattctggatccaaaagccctgggccctctcgacgcagcaaatcaccagcttcagttaatggaactcccagcagccaactttctactcctaaatctacgaaatcctccagttcctctccaactagtccaggaagtttcagaggattaaagatttctgctcatggcagatcttcttccaatgtaaacggtggacctgagcttgaccgttgcataagtcctgaaggtgtgaatggaaacagatgctctgaatcatcaactcttcttgagaaatacaaaattggaaaggtcattggtgatggcaattttgcagtagtcaaagagtgtatagacaggtccactggaaaggagtttgccctaaagattatagacaaagccaaatgttgtggaaaggaacacctgattgagaatgaagtgtcaatactgcgccgagtgaaacatcccaatatcattatgctggtcgaggagatggaaacagcaactgagctctttctggtgatggaattggtcaaaggtggagatctctttgatgcaattacttcgtcgaccaagtacactgagagagatggcagtgccatggtgtacaacttagccaatgccctcaggtatctccatggcctcagcatcgtgcacagagacatcaaaccagagaatctcttggtgtgtgaatatcctgatggaaccaagtctttgaaactgggagactttgggcttgcgactgtggtagaaggccctttatacacagtctgtggcacacccacttatgtggctccagaaatcattgctgaaactggctatggcctgaaggtggacatttgggcagctggtgtgatcacatacatacttctctgtggattcccaccattccgaagtgagaacaatctccaggaagatctcttcgaccagatcttggctgggaagctggagtttccggccccctactgggataacatcacggactctgccaaggaattaatcagtcaaatgcttcaggtaaatgttgaagctcggtgtaccgcgggacaaatcctgagtcacccctgggtgtcagatgatgcctcccaggagaataacatgcaagctgaggtgacaggtaaactaaaacagcactttaataatgcgctccccaaacagaacagcactaccaccggggtctccgtcatcatgaacacggctctagataaggaggggcagattttctgcagcaagcactgtcaagacagcggcaggcctgggatggagcccatctctccagttcctccctcagtggaggagatccctgtgcctggggaagcagtcccggcccccacccctccggaatctcccaccccccaccctcctcccgctgccccgggtggtgagcgggcaggaacctggcgccgccaccgagactga

SEQ ID NO: 8790 - DNA, 5344 bp, Homo sapiens
  source 1..5344: mol_type = unassigned DNA
gactcttgttggtgtttcatgggcagcaaaactggccctttttatctcagctgtagatccttgaaggacagcaaggcctatgtgaccattctctaaaatatttaagctcgagaatcacagagcggaagctgcaaggctcctggctgcctgccagccgagggaatctggagaaaccattcctggggccgcgtggccccgtcgtgcccttgttctgccctcggaatggccttcactcagcacatcctgagaacagccctctgaagcccagggtcgtgaccgtagtgaagctgggtgggcagcgcccccgaaagatcactctgctcctcaacaggcgatcagtgcagacgttcgagcagctcttagctgacatctcagaagccttgggctctcccagatggaagaatgaccgtgtgaggaaactgtttaacctcaagggcagggaaatcaggagcgtctctgatttcttcagggaaggggatgctttcatagctatgggcaaagaaccactgacactgaagagcattcaggtggctgtagaagaactgtaccccaacaaagcccgggccctgacactggcccagcacagccgtgccccttctccaaggctgaggagcaggctgtttagcaaggctctgaaaggagaccaccgctgtggggagaccgagacccccaagagctgcagcgaagttgcaggatgcaaggcagccatgaggcaccaggggaagatccccgaggagctttcactagatgacagagcgaggacccagaagaagtgggggagggggaaatgggagccagaacccagtagcaagccccccagggaagccactctggaagagaggcacgcaaggggagagaagcatcttggggtggagattgaaaagacctcgggtgaaattatcagatgcgagaagtgcaagagagagagggagctccagcagagcctggagcgtgagaggctttctctggggaccagtgagctggatatggggaagggcccaatgtatgatgtggagaagctggtgaggaccagaagctgcaggaggtctcccgaggcaaatcctgcaagtggggaggaagggtggaagggtgacagccacaggagcagccccaggaatcccactcaagagctgaggagacccagcaagagcatggacaagaaagaggacagaggcccagaggatcaagaaagccatgctcagggagcagccaaggccaagaaggaccttgtggaagttcttcctgtcacagaggaggggctgagggaggtgaagaaggacaccaggcccatgagcaggagcaaacatggtggctggctcctgagagagcaccaggcgggctttgagaagctccgcaggacccgaggagaagagaaggaggcagagaaggagaaaaagccatgtatgtctggaggcagaaggatgactctcagagatgaccaacctgcaaagctagaaaaggagcccaagacgaggccagaagagaacaagccagagcggcccagcggtcggaagccacggcccatgggcatcattgccgccaatgtggaaaagcattatgagactggccgggtcattggggatgggaactttgctgtcgtgaaggagtgcagacaccgcgagaccaggcaggcctatgcgatgaagatcattgacaagtccagactcaagggcaaggaggacatggtggacagtgagatcttgatcatccagagcctctctcaccccaacatcgtgaaattgcatgaagtctacgaaacagacatggaaatctacctgatcctggagtacgtgcagggaggagacctttttgacgccatcatagaaagtgtgaagttcccggagcccgatgctgccctcatgatcatggacttatgcaaagccctcgtccacatgcacgacaagagcattgtccaccgggacctcaagccggaaaaccttttggttcagcgaaatgaggacaaatctactaccttgaaattggctgattttggacttgcaaagcatgtggtgagacctatatttactgtgtgtgggaccccaacttacgtagctcccgaaattctttctgagaaaggttatggactggaggtggacatgtgggctgctggcgtgatcctctatatcctgctgtgtggctttcccccattccgcagccctgagagggaccaggacgagctctttaacatcatccagctgggccactttgagttcctccccccttactgggacaatatctctgatgctgctaaagatctggtgagccggttgctggtggtagaccccaaaaagcgctacacagctcatcaggttcttcagcacccctggatcgaaacagctggcaagaccaatacagtgaaacgacagaagcaggtgtcccccagcagcgagggtcacttccggagccagcacaagagggttgtggagcaggtatcatagtcaccaccttgggaatctgtccagcccccagttctgctcaaggacagagaaaaggatagaagtttgagagaaaaacaatgaaagaggcttcttcacataattggtgaatcagagggagagacactgagtatattttaaagcatattaaaaaaattaagtcaatgttaaatgtcacaacatatttttagatttgtatatttaaagcctttaatacatttttggggggtaagcattgtcatcagtgaggaattttggtaataatgatgtgttttgcttcccctttgtaaccaagtttattctgtactacaggagtggtgcttaccagggtctaaactccccctgtgagattaataaggtgcattgtggtctttctgtgttaataaaatgtgctctgaataacagaagtgggcctgtattctgattacttctttgtgctggtgatgacagcacaaaaattcaaaaatgaattatagttcaggcatatctcctgaagctgatatgactacatatagatgtgaaggacacttgattagttgacaagacctgtttatttaggatgcactaatcttggtctcttgcatttcagtcttaccaaaaatcagttttggtgcagtctgagacatggaaagaaaaaaaacaaaccattgaatcattcttgctcctgcaataccgttatactgcttttcagccccaattatccctgagcctgagtcatttctatgtgaagtcaggcgctcaggctgtgaccgtgttaacattttcagatcacgagggagccatttagtacattaatatgtcagaaatgcagtaaatggattacactggggctcgaaggagctcagagttcaagcacattcctacctgcagggcatacacccaggacacattccagatttctgtgctgaaatattggtctttgcagatgattctgggagtctgtgtgagctgacagcaagacatatcctaatatttcccaaattgaccttcctagattatgaatgacctggttagtaggccacaaaatctagtcaagagtgtggctttttcacgtctaccttccctaacagttttggagccatctgggcggaggcgtgtgttagttaggaaaaccggaatagtactagagaattcaacataaggaattgcttaatcaggttttggaaaatggaagaagcacaaaggaggctctggtataatttagagatagtaactgcaggaagtggctcctgttctttggagaaccaagggaagaagttggggttattagaacctattgaaggagaaatttcttgtagtggacactgtagtatgccactcaggtcctccaagactgaagggaataagctccttggggtgctgctggatgatggctctcagctttcagccctctacaggaattaccctccactggaagagacacctttcagctccctcctgaagcaggctatatcaaatgactagtccctgtagggtatggtggctcagctcctttgtcccaaacagggacaatactgaagggccatccaactacggacctgcccatgggggttggctgaactgttggttgagactgcatcatagcccactttctcccttgcccaatcctgcttctttcctttcccttccagaggtaatgatcctgagaccactccctaataagccttttggatgctaatctggattttagagttggcttctcgggaaaccaaaccgttgacaccccctagaaacttgaaaccacatcaaagaagtaccagctggtgctttaacctcagaagcttggagaaggggccctgtggagcagggactcagacccctgaggagtgggtgctgcccagcaggcagtgtaatgggactcattctgaacacgtgaaagaggctggaagctggattcagttgctactagaacatattttgataaagacaccagtaaccttcatttcactaaatccaaaagagaattttcaatcctcaaattagcatcacttgaccctattgaccactttctctttgaataatttctcctgttgactaccatgatgtcacatttttctggtttttttttctcctatacctttggatctcttgtatagattcagtcttcttccagttgctaaaagctgtagttgcatccttagtggctagggaaatgcaaattaaaatcacaatgaaatatcactatacacccattagaatagctaaaattaaatggctaaaatgagaagactgaccttaccaactactagcgaggatgcagagtgactggaacttcccgtacattgctgctgggagtataaaatgggacttctcctttggagaatggtttggtagttcctttaaaagttaaacatgtacctaccatatgatattccacttctagatgtttacccagcagaaattcaagcatatgtcctatgaagacttcacaatatttataggtgctttatttgtagtagccccaaagtggaaacatcttgaatgggcatgatttggtgcatggataaacagattgtatatccacacaatgaataacagccacaaaaaagggatgaactattcatacacgaacaacatggatggactgccaaagaattaggctgaatgaaagaagaaaaaaaagactacattttgattatttcatttacatactattccagaaaatacaagtgaatctatagtgacagaaagtgatcagggggtttgctggagatggaaatggggagaggagggacagaaggattgcaagggaacacttggtaactttggggaagagggacgtgttcattttcttgaatgtaataatggatttatgggggtatatatgtcaaaacttaccaaattgtacacttttgttatgtgcagtttattgtgtgtcaattatacctcaataaagttgttaaaaatat

SEQ ID NO: 8791 - DNA, 2222 bp, Homo sapiens
  source 1..2222: mol_type = unassigned DNA
cctcgccactccagctgcgcctccggctgcagcgcacacgtctcctgcgcctcctcctccggagcgtcgctgtccgtcgggttcatccctcgcagcagtctccaggcgagagagggggccagagtgctcgcacttctcctaggggcaccatgcccaacgacgaggcattcagcaagccctctacaccgtcggaagcccctcacgcccccggggtaccgccgcagggcagagccgggggctttggcaaagcgtctggggcgctagtgggggcggccagcggctcgagcgccgggggcagcagcagaggaggcggctccggctccggggcgtcggacctgggtgccgggagcaagaagtccccgcggctgcccaagtgcgcacgctgcaggaaccacggctacgcctcgccgctcaagggccacaagcgcttctgcatgtggcgcgactgccagtgcaagaagtgcaacctgatcgccgagaggcagcgcgtgatggccgcgcaggtggccctgagaaggcagcaggcccaggaggaggaattgggtatcagccaccccatcccactgcccagtgcggccgagctgcttgtcaaaagagagaacaatggcagtaacccgtgcctcatgactgagtgcagtggcacctctcagccaccgccggccagtgtccccaccactgcagcttcagagggacgtatggtcatccaggatattcctgctgtcaccagcagagggcatgtggagaacacacctgacctggtttcagactccacctactacagcagcttctaccagccgtctctgtttccttattacaacaatctatacaactgcccgcagtactccatggccttggctgctgattctgcttctggggaggtgggaaatcccctcgggggatcccctgtgaagaacagccttcggggcctccccggaccttatgtgcctggtcagacaggaaaccagtggcagatgaagaacatggagaaccgccatgcaatgagctcccagtacaggatgcattcttactacccgcctccctcttacctgggccagagcgtgccccagttcttcacttttgaggatgctccctcttacccggaagccagggcgagcgtattctcgccgcccagcagtcaagattctggcttggtttccctctcgagcagctctcctattagtaacaagagcacaaaggcagtgcttgaatgtgagcctgcgtcggagcccagcagcttcacagtcactcccgtcatcgaggaggacgagtgagcagtgcctgctgccgatggcggttcacttggagtaacaggcttattccactttccatggggtttgttaatattttgcattgactcatactatcttaactgttgagaacgtatttggtttatattccttagagtttagtccagaggctgtaacacatttgtaatactttagggtccgtgactaccatctgcatggtttaagtgctttactcacggagtttaaataatagtgttcatttttttaatgacactggtttcatgtagttttcaagaaataaaagaattcattcaagtgaagccatttgtgtgcctctaaatgagtcatctaattagatgttacttttagttttaaaatgaaatcttaggtgccttaggggttttttttttttttaagtattttttaaaaacctgcaaagatataaatttagccaagttacctgacgggtgagaagaaaagagcaggcaaaattagtgatttttttagaagtctgctaaatggatatattgtgtgtgttgctgttggaaatagccccaccccatcctcccaatccaaaacgtaactgaaatataatcagaaacattaaagcctgtaaaaaaaaattgctgcgtttttggtaaagggtgtaatttgtaaacagtgcaatttaaagtgaccttagtgatgcagagttcctgagtggtgtttgtagaatgagtttatcatacattctttctactactggaaaaaaatggatgcagtctggactgttgtaaccttaggttgtaatctgatttggaaataagtacatctttaaaagttgctacagatttgagttcatgattttgttaaaaattgctatggagtactttgttatataacagaagccatcctgaaatgaaactagtctaaaaaaattcattgttctacttagttgcagctgtacctgaaataaaaatgttattgatgactgaa

SEQ ID NO: 8792 - DNA, 692 bp, Homo sapiens
  source 1..692: mol_type = unassigned DNA
cctcgccactccagctgcgcctccggctgcagcgcacacgtctcctgcgcctcctcctccggagcgtcgctgtccgtcgggttcatccctcgcagcagtctccaggcgagagagggggccagagtgctcgcacttctcctaggggcaccatgcccaacgacgaggcattcagcaagccctctacaccgtcggaagcccctcacgcccccggggtaccgccgcagggcagagccgggggctttggcaaagcgtctggggcgctagtgggggcggccagcggctcgagcgccgggggcagcagcagaggaggcggctccggctccggggcgtcggacctgggtgccgggagcaagaagtccccgcggctgcccaagtgcgcacgctgcaggaaccacggctacgcctcgccgctcaagggccacaagcgcttctgcatgtggcgcgactgccagtgcaagaagtgcaacctgatcgccgagaggcagcgcgtgatggccgcgcaggtgggtgcgggcgtgcgggagcccgggttcagccttagttttttttttttttttttttttagatggagtctcgctcggttgcccaggctgcagtgtagtggcgcgatcttggctcactgcaactccgcttcccgggttcaagcaattctcctgcctcagcctcccaagtagctgggactacaggcgcac

SEQ ID NO: 8793 - DNA, 2459 bp, Homo sapiens
  source 1..2459: mol_type = unassigned DNA
atggccgacccgcaggctggctccgcggccggggactgggagatcgatgtcgagagcctggagctggaagaggacgtctgcggggcgccgcggtccacgccccccgggcccagcccgccgccggcggacggggactgcgaggacgacgaagatgacgacggggtggacgaagacgcggaagaagagggcgacggcgaggaggcaggcgcgtcccccgggatgcccggccagccggagcagcgggggggaccgcagccgaggccgccgctcgcgcctcaggcctcacccgccggcaccggtccccgagagcgctgcactcccgcgggcggcggcgcggagccgcgcaagctgagccgcacgcccaagtgcgcgcgctgccgcaaccacggcgtggtgtcctgcctgaagggccacaagcgcttctgtcgctggcgcgactgccagtgcgccaactgcctgctggtggtggagcggcagcgcgtcatggccgcccaggtggcgctccggaggcagcaggccaccgaggacaagaaggggctttccgggaaacagaataatttcgagcgcaaagctgtgtaccagaggcaagtcagagcccccagtttgctggccaaaagcattttagaagttctccttggattattctacagctattatgtgtacataatgaaccatctttagaaaataaaagtgacatcagctctaggtatagatatattttttaataatgaaaaaagatgacatggataataataaaacattgattgatacaagataaatagtcttgtctcttaatgcgtagggggcctgggaagaatattaaaattttaatcaataaagtatgtctgttgaagcaagcaagcaaacaaatccataacaaccacaacaagcaacaagaacaagaacaacaacaagaagaagttgcagtatggatatctttcaccctcccaggaaactctttcaaacctaatctgtacttttgcatctgtataaaaatatcagtgagatggaactgtaaataattgttctgctgatctgtagtgttgctgttaccttctgggtttccacatttttattccgtagatgttaatctctttcatgtgcaatctttgcttcttgtaggctatcgccccattccagcggagacttatgtaggagggaccttccctctacctcccccagttagtgacaggatgaggaaaagaagagcctttgctgataaagagttggagaacattatgctggagagagaatataaagaaagggagatgttggaaacttctcaagctgctgctctgtttctgcccaaccgcatggtgcctggacctgactacaattcctacaaaagtgcctacagccccagcccagtggaaccaccaagcaaggacttctgtaattttttgcccacctgccttgatttaaccatgcagtattcagggtctgggaatatggaactaatttcttctaatgtcagcgtggccacaacttatagacagtatcccttgtcctcaagatttttagtttggcccaagtgtggccccattagcgacaccctcctctaccagcaatgcctgctaaatgccaccacctcagttcaagccctgaagcctggggccagctgggacttgaagggagcacgagtccaggatggactcagtgcagagcaggacatgatgccatcgaaattggaaggttccctggtgctgcctcacactcctgagatccagaccacgagaagtgaccttcagggtcatcaggctgtcccagagaggtccgcgttctccccaccccgacggaatttctctcccattgttgacacggactccctggcagctcaagggcatgtcttaacgaagatcagcaaagaaaacaccaggcaccctctgccacttagacataatccattccactcattattccagcaaacacttactgacaaatcgggtcctgagttgaaaacaccatttgtcaaagaggcctttgaagagacccctaagaaacacagagagtgtttagttaaggacaaccagaagtacacatttacaatagatagatgtgcaaaagacctttttgtagccaaacaagttggaacaaaactctcggtgaatgaaccactgtcattttctgttgagtctattcttaagaggccttcatctgccatcactcgtgtctctcagtgaaaggctgcttaaacagaaagctggattttctgcagtcttagagcattatagccatttgctactttttttaaaagttaagatgtttgtgtaaagaaatttctaatgtaaagatgatgattttgaaaaattttatatattcctaatatgcatgtactttttcttatcacatatatttaaacttacagatggaaattgcccaatgtgcaaattgttaagtaccacactttacacagcatttcaaaaagcaataaaattgacactgtcttctcaaagacccaa

SEQ ID NO: 8794 - DNA, 2163 bp, Homo sapiens
  source 1..2163: mol_type = unassigned DNA
tgggttcgttccgggcctccagctatcagctcccgatctcgtgtttgagggtagcgaccccgatttctgtttgcatgcacagccagcagccctagcgccagatcctaaagctggatatcttttaactgggctaccagcccgggcctcaaagttttgagtgagggccgccaggctcaggccccagcgaagccccgagcgccatggccgacccgcaggctggctccgcggccggggactgggagatcgatgtcgagagcctggagctggaagaggacgtctgcggggcgccgcggtccacgccccccgggcccagcccgccgccggcggacggggactgcgaggacgacgaagatgacgacggggtggacgaagacgcggaagaagagggcgacggcgaggaggcaggcgcgtcccccgggatgcccggccagccggagcagcgggggggaccgcagccgaggccgccgctcgcgcctcaggcctcacccgccggcaccggtccccgagagcgctgcactcccgcgggcggcggcgcggagccgcgcaagctgagccgcacgcccaagtgcgcgcgctgccgcaaccacggcgtggtgtcctgcctgaagggccacaagcgcttctgtcgctggcgcgactgccagtgcgccaactgcctgctggtggtggagcggcagcgcgtcatggccgcccaggtggcgctccggaggcagcaggccaccgaggacaagaaggggctttccgggaaacagaataatttcgagcgcaaagctgtgtaccagaggcaagtcagagcccccagtttgctggccaaaagcattttagaaggctatcgccccattccagcggagacttatgtaggagggaccttccctctacctcccccagttagtgacaggatgaggaaaagaagagcctttgctgataaagagttggagaacattatgctggagagagaatataaagaaagggagatgttggaaacttctcaagctgctgctctgtttctgcccaaccgcatggtgcctggacctgactacaattcctacaaaagtgcctacagccccagcccagtggaaccaccaagcaaggacttctgtaattttttgcccacctgccttgatttaaccatgcagtattcagggtctgggaatatggaactaatttcttctaatgtcagcgtggccacaacttatagacagtatcccttgtcctcaagatttttagtttggcccaagtgtggccccattagcgacaccctcctctaccagcaatgcctgctaaatgccaccacctcagttcaagccctgaagcctggggccagctgggacttgaagggagcacgagtccaggatggactcagtgcagagcaggacatgatgccatcgaaattggaaggttccctggtgctgcctcacactcctgagatccagaccacgagaagtgaccttcagggtcatcaggctgtcccagagaggtccgcgttctccccaccccgacggaatttctctcccattgttgacacggactccctggcagctcaagggcatgtcttaacgaagatcagcaaagaaaacaccaggcaccctctgccacttagacataatccattccactcattattccagcaaacacttactgacaaatcgggtcctgagttgaaaacaccatttgtcaaagaggcctttgaagagacccctaagaaacacagagagtgtttagttaaggacaaccagaagtacacatttacaatagatagatgtgcaaaagacctttttgtagccaaacaagttggaacaaaactctcggtgaatgaaccactgtcattttctgttgagtctattcttaagaggccttcatctgccatcactcgtgtctctcagtgaaaggctgcttaaacagaaagctggattttctgcagtcttagagcattatagccatttgctactttttttaaaagttaagatgtttgtgtaaagaaatttctaatgtaaagatgatgattttgaaaaattttatatattcctaatatgcatgtactttttcttatcacatatatttaaacttacagatggaaattgcccaatgtgcaaattgttaagtaccacactttacacagcatttcaaaaagcaataaaattgacactgtcttctcaaagaccc

SEQ ID NO: 8795 - DNA, 1965 bp, Homo sapiens
  source 1..1965: mol_type = unassigned DNA
atggccgacccgcaggctggctccgcggccggggactgggagatcgatgtcgagagcctggagctggaagaggacgtctgcggggcgccgcggtccacgccccccgggcccagcccgccgccggcggacggggactgcgaggacgacgaagatgacgacggggtggacgaagacgcggaagaagagggcgacggcgaggaggcaggcgcgtcccccgggatgcccggccagccggagcagcgggggggaccgcagccgaggccgccgctcgcgcctcaggcctcacccgccggcaccggtccccgagagcgctgcactcccgcgggcggcggcgcggagccgcgcaagctgagccgcacgcccaagtgcgcgcgctgccgcaaccacggcgtggtgtcctgcctgaagggccacaagcgcttctgtcgctggcgcgactgccagtgcgccaactgcctgctggtggtggagcggcagcgcgtcatggccgcccaggtggcgctccggaggcagcaggccaccgaggacaagaaggggctttccgggaaacagaataatttcgagcgcaaagctgtgtaccagaggcaagtcagagcccccagtttgctggccaaaagcattttagaaggctatcgccccattccagcggagacttatgtaggagggaccttccctctacctcccccagttagtgacaggatgaggaaaagaagagcctttgctgataaagagttggagaacattatgctggagagagaatataaagaaagggagatgttggaaacttctcaagctgctgctctgtttctgcccaaccgcatggtgcctggacctgactacaattcctacaaaagtgcctacagccccagcccagtggaaccaccaagcaaggacttctgtaattttttgcccacctgccttgatttaaccatgcagtattcagggtctgggaatatggaactaatttcttctaatgtcagcgtggccacaacttatagacagtatcccttgtcctcaagatttttagtttggcccaagtgtggccccattagcgacaccctcctctaccagcaatgcctgctaaatgccaccacctcagttcaagccctgaagcctggggccagctgggacttgaagggagcacgagtccaggatggactcagtgcagagcaggacatgatgccatcgaaattggaaggttccctggtgctgcctcacactcctgagatccagaccacgagaagtgaccttcagggtcatcaggctgtcccagagaggtccgcgttctccccaccccgacggaatttctctcccattgttgacacggactccctggcagctcaagggcatgtcttaacgaagatcagcaaagaaaacaccaggcaccctctgccacttagacataatccattccactcattattccagcaaacacttactgacaaatcgggtcctgagttgaaaacaccatttgtcaaagaggcctttgaagagacccctaagaaacacagagagtgtttagttaaggacaaccagaagtacacatttacaatagatagatgtgcaaaagacctttttgtagccaaacaagttggaacaaaactctcggtgaatgaaccactgtcattttctgttgagtctattcttaagaggccttcatctgccatcactcgtgtctctcagtgaaaggctgcttaaacagaaagctggattttctgcagtcttagagcattatagccatttgctactttttttaaaagttaagatgtttgtgtaaagaaatttctaatgtaaagatgatgattttgaaaaattttatatattcctaatatgcatgtactttttcttatcacatatatttaaacttacagatggaaattgcccaatgtgcaaattgttaagtaccacactttacacagcatttcaaaaagcaataaaattgacactgtcttctcaaagacccaa

SEQ ID NO: 8796 - DNA, 2292 bp, Homo sapiens
  source 1..2292: mol_type = unassigned DNA
gccagtggcgctgcgctgaatgcaactgcgcgcgcccgccgggtgagccagcgatctgagccaggcgggggcggcccgacctttcccgcccagcctgggtcagaggaagccgaaagcggcctcagcaagtgggttcgttccgggcctccagctatcagctcccgatctcgtgtttgagggtagcgaccccgatttctgtttgcatgcacagccagcagccctagcgccagatcctaaagctggatatcttttaactgggctaccagcccgggcctcaaagttttgagtgagggccgccaggctcaggccccagcgaagccccgagcgccatggccgacccgcaggctggctccgcggccggggactgggagatcgatgtcgagagcctggagctggaagaggacgtctgcggggcgccgcggtccacgccccccgggcccagcccgccgccggcggacggggactgcgaggacgacgaagatgacgacggggtggacgaagacgcggaagaagagggcgacggcgaggaggcaggcgcgtcccccgggatgcccggccagccggagcagcgggggggaccgcagccgaggccgccgctcgcgcctcaggcctcacccgccggcaccggtccccgagagcgctgcactcccgcgggcggcggcgcggagccgcgcaagctgagccgcacgcccaagtgcgcgcgctgccgcaaccacggcgtggtgtcctgcctgaagggccacaagcgcttctgtcgctggcgcgactgccagtgcgccaactgcctgctggtggtggagcggcagcgcgtcatggccgcccaggtggcgctccggaggcagcaggccaccgaggacaagaaggggctttccgggaaacagaataatttcgagcgcaaagctgtgtaccagaggcaagtcagagcccccagtttgctggccaaaagcattttagaaggctatcgccccattccagcggagacttatgtaggagggaccttccctctacctcccccagttagtgacaggatgaggaaaagaagagcctttgctgataaagagttggagaacattatgctggagagagaatataaagaaagggagatgttggaaacttctcaagctgctgctctgtttctgcccaaccgcatggtgcctggacctgactacaattcctacaaaagtgcctacagccccagcccagtggaaccaccaagcaaggacttctgtaattttttgcccacctgccttgatttaaccatgcagtattcagggtctgggaatatggaactaatttcttctaatgtcagcgtggccacaacttatagacagtatcccttgtcctcaagatttttagtttggcccaagtgtggccccattagcgacaccctcctctaccagcaatgcctgctaaatgccaccacctcagttcaagccctgaagcctggggccagctgggacttgaagggagcacgagtccaggatggactcagtgcagagcaggacatgatgccatcgaaattggaaggttccctggtgctgcctcacactcctgagatccagaccacgagaagtgaccttcagggtcatcaggctgtcccagagaggtccgcgttctccccaccccgacggaatttctctcccattgttgacacggactccctggcagctcaagggcatgtcttaacgaagatcagcaaagaaaacaccaggcaccctctgccacttagacataatccattccactcattattccagcaaacacttactgacaaatcgggtcctgagttgaaaacaccatttgtcaaagaggcctttgaagagacccctaagaaacacagagagtgtttagttaaggacaaccagaagtacacatttacaatagatagatgtgcaaaagacctttttgtagccaaacaagttggaacaaaactctcggtgaatgaaccactgtcattttctgttgagtctattcttaagaggccttcatctgccatcactcgtgtctctcagtgaaaggctgcttaaacagaaagctggattttctgcagtcttagagcattatagccatttgctactttttttaaaagttaagatgtttgtgtaaagaaatttctaatgtaaagatgatgattttgaaaaattttatatattcctaatatgcatgtactttttcttatcacatatatttaaacttacagatggaaattgcccaatgtgcaaattgttaagtaccacactttacacagcatttcaaaaagcaataaaattgacactgtcttctcaaagaccc

SEQ ID NO: 8797 - DNA, 2367 bp, Homo sapiens
  source 1..2367: mol_type = unassigned DNA
gccagtggcgctgcgctgaatgcaactgcgcgcgcccgccgggtgagccagcgatctgagccaggcgggggcggcccgacctttcccgcccagcctgggtcagaggaagccgaaagcggcctcagcaagtgggttcgttccgggcctccagctatcagctcccgatctcgtgtttgagggtagcgaccccgatttctgtttgcatgcacagccagcagccctagcgccagatcctaaagctggatatcttttaactgggctaccagcccgggcctcaaagttttgagtgagggccgccaggctcaggccccagcgaagccccgagcgccatggccgacccgcaggctggctccgcggccggggactgggagatcgatgtcgagagcctggagctggaagaggacgtctgcggggcgccgcggtccacgccccccgggcccagcccgccgccggcggacggggactgcgaggacgacgaagatgacgacggggtggacgaagacgcggaagaagagggcgacggcgaggaggcaggcgcgtcccccgggatgcccggccagccggagcagcgggggggaccgcagccgaggccgccgctcgcgcctcaggcctcacccgccggcaccggtccccgagagcgctgcactcccgcgggcggcggcgcggagccgcgcaagctgagccgcacgcccaagtgcgcgcgctgccgcaaccacggcgtggtgtcctgcctgaagggccacaagcgcttctgtcgctggcgcgactgccagtgcgccaactgcctgctggtggtggagcggcagcgcgtcatggccgcccaggtggcgctccggaggcagcaggccaccgaggacaagaaggggctttccgggaaacagaataatttcgagcgcaaagctgtgtaccagaggcaagtcagagcccccagtttgctggccaaaagcattttagaagttctccttggattattctacagctattatgtgtacataatgaaccatctttagaaaataaaagtgacatcagctctaggctatcgccccattccagcggagacttatgtaggagggaccttccctctacctcccccagttagtgacaggatgaggaaaagaagagcctttgctgataaagagttggagaacattatgctggagagagaatataaagaaagggagatgttggaaacttctcaagctgctgctctgtttctgcccaaccgcatggtgcctggacctgactacaattcctacaaaagtgcctacagccccagcccagtggaaccaccaagcaaggacttctgtaattttttgcccacctgccttgatttaaccatgcagtattcagggtctgggaatatggaactaatttcttctaatgtcagcgtggccacaacttatagacagtatcccttgtcctcaagatttttagtttggcccaagtgtggccccattagcgacaccctcctctaccagcaatgcctgctaaatgccaccacctcagttcaagccctgaagcctggggccagctgggacttgaagggagcacgagtccaggatggactcagtgcagagcaggacatgatgccatcgaaattggaaggttccctggtgctgcctcacactcctgagatccagaccacgagaagtgaccttcagggtcatcaggctgtcccagagaggtccgcgttctccccaccccgacggaatttctctcccattgttgacacggactccctggcagctcaagggcatgtcttaacgaagatcagcaaagaaaacaccaggcaccctctgccacttagacataatccattccactcattattccagcaaacacttactgacaaatcgggtcctgagttgaaaacaccatttgtcaaagaggcctttgaagagacccctaagaaacacagagagtgtttagttaaggacaaccagaagtacacatttacaatagatagatgtgcaaaagacctttttgtagccaaacaagttggaacaaaactctcggtgaatgaaccactgtcattttctgttgagtctattcttaagaggccttcatctgccatcactcgtgtctctcagtgaaaggctgcttaaacagaaagctggattttctgcagtcttagagcattatagccatttgctactttttttaaaagttaagatgtttgtgtaaagaaatttctaatgtaaagatgatgattttgaaaaattttatatattcctaatatgcatgtactttttcttatcacatatatttaaacttacagatggaaattgcccaatgtgcaaattgttaagtaccacactttacacagcatttcaaaaagcaataaaattgacactgtcttctcaaaga

SEQ ID NO: 8798 - DNA, 1244 bp, Homo sapiens
  source 1..1244: mol_type = unassigned DNA
ccagtggcgctgcgctgaatgcaactgcgcgcgcccgccgggtgagccagcgatctgagccaggcgggggcggcccgacctttcccgcccagcctgggtcagaggaagccgaaagcggcctcagcaaggtgaggcgcccgaggctgcagaagaccgagcagaactttgcagagttcgggatgtgctgggctaggtcgctgaggacttgactggcttcctccctccttccctccacctaccttctccctccccctccaccatccagtgggttcgttccgggcctccagctatcagctcccgatctcgtgtttgagggtagcgaccccgatttctgtttgcatgcacagccagcagccctagcgccagatcctaaagctggatatcttttaactgggctaccagcccgggcctcaaagttttgagtgagggccgccaggctcaggccccagcgaagccccgagcgccatggccgacccgcaggctggctccgcggccggggactgggagatcgatgtcgagagcctggagctggaagaggacgtctgcggggcgccgcggtccacgccccccgggcccagcccgccgccggcggacggggactgcgaggacgacgaagatgacgacggggtggacgaagacgcggaagaagagggcgacggcgaggaggcaggcgcgtcccccgggatgcccggccagccggagcagcgggggggaccgcagccgaggccgccgctcgcgcctcaggcctcacccgccggcaccggtccccgagagcgctgcactcccgcgggcggcggcgcggagccgcgcaagctgagccgcacgcccaagtgcgcgcgctgccgcaaccacggcgtggtgtcctgcctgaagggccacaagcgcttctgtcgctggcgcgactgccagtgcgccaactgcctgctggtggtggagcggcagcgcgtcatggccgcccaggtggcgctccggaggcagcaggccaccgaggacaagaaggggctttccgggaaacagaataatttcgagcgcaaagctgtgtaccagaggcaagtcagagcccccagtttgctggccaaaagcattttagaagttctccttggattattctacagctattatgtgtacataatgaaccatctttagaaaataaaagtgacatcagctctaggtatagatatattttttaataatgaaaaaagatgacatggataataataaaacattgattgatacaagataaa

SEQ ID NO: 8799 - DNA, 8552 bp, Homo sapiens
  source 1..8552: mol_type = unassigned DNA
agggaaggttggcagagggatccatgtgactgaggccggagcacggcaaagatgagcctgcccgcccgcctgctgcctggatgcggagggtgagggctggcgcacgggaggccgctggctgcgcattctgggcgccgagtgcccgggatgagctcacgcccgcgtctgcggctctctccacctgccgacctgccgggggcccactgagctgacggcgcacctgggctccggccgcagcgtggggcgcggcgcccgggagcaggtgtgcaggagcgcagcgcgcggcgagcgcagccctcgctccggagcccggccgcgccgcgtgcccgggcggctaggcagcggcggcggcggcggcgggcggcgggcgggcggcggcccccgggcaggtgccgagcggcgagcggagccgggccgggcggagcgcggggggcgaggccggcgcgtcgctcgcgggaggccggggagcggcaggggcatgtggatactggctctctccttgttccagagcttcgcgaatgttttcagtgaagacctacactccagcctctactttgtcaatgcatctctgcaagaggtagtgtttgccagcaccacggggactctggtgccctgccccgcagcaggcatccctcctgtgactctcagatggtacctagccacgggcgaggagatctacgatgtccccgggatccgccacgtccaccccaacggcactctccaaattttccccttccctccttcaagcttcagtaccttaatccatgataatacttattattgcacagctgaaaatccttcagggaaaattagaagtcaggatgtccacatcaaggctgttttacgggagccctatacagtccgtgtggaggaccagaaaaccatgagaggcaatgttgcggtcttcaagtgcattatcccctcctcggtggaggcgtacatcactgtcgtctcatgggagaaagacactgtttcacttgtctcaggatctagatttctcatcacatccacgggagccttgtatattaaagatgtacagaatgaagatggattgtataactaccgctgcatcacgcggcatcgatacaccggagagacgaggcagagcaacagcgccagactttttgtatcagacccagcgaactcagccccatccatactggatgggtttgaccatcgcaaagccatggctgggcagcgtgtggagctgccttgcaaagcgctcgggcaccctgagccagattaccgctggctgaaggacaacatgcccctggaactttcagggaggttccagaagaccgtgacggggctgctcattgagaacattcgcccctcggactcaggcagctatgtttgtgaagtgtccaacagatacggaactgctaaggtgataggccgcctgtacgtgaaacagccactgaaagccaccatcagtcccaggaaggttaaaagcagcgtgggtagccaagtttccttgtcctgcagcgtgacaggaactgaggaccaggaactctcctggtaccgcaatggtgaaatcctcaaccctggaaaaaatgtgaggatcacagggatcaaccacgaaaaccttataatggatcacatggtcaaaagtgacgggggcgcataccagtgctttgtgcgcaaggacaagctgtccgctcaagactatgtgcaggtggtccttgaagatggaactcccaaaattatttctgcctttagtgaaaaggtggtgagtccagcagagccggtttcccttatgtgcaacgtgaagggaacacctttgcccacgatcacgtggaccctggacgatgacccgattctcaagggtggcagtcaccgcatcagccagatgatcacgtcggaggggaacgtggtcagctacctgaacatctccagctcccaggtccgggacgggggagtctaccgctgcactgccaacaactcggcgggagtcgtcctgtaccaggctcgaataaacgtaagagggcctgcaagcattcgaccaatgaaaaacatcacagcaatagcaggacgggacacatacattcactgtcgtgtgattggctatccgtattactccattaaatggtacaagaactctaacctgcttcctttcaaccaccgccaagtggcatttgagaacaatggaactcttaaactttcagatgtgcaaaaggaagtggacgagggggagtacacgtgcaacgtgttggttcaaccacaactctccaccagccagagcgtccacgtgaccgtgaaagttccgcctttcatacaaccctttgagtttccaagattctccattgggcagcgggtcttcatcccctgtgttgtggtctcaggggacttacccatcacgatcacctggcagaaggatggccggccaatccctgggagccttggggtgaccattgacaatattgacttcacgagctccttgaggatttccaatctctcgctcatgcacaatgggaattacacctgcatagcccggaatgaggccgccgctgtggagcaccaaagccagttgattgtcagagttcctcccaagtttgtggttcagccacgggaccaggacgggatttatggcaaagcagtcatcctcaattgttctgctgagggttaccctgtacctaccatcgtgtggaaattctctaaaggtgctggggttccccagttccagccaattgccctaaatggccgaatccaagttctcagcaatgggtcgttgctgatcaagcatgtcgtggaggaagacagtggctactacctctgcaaggtcagcaacgatgtgggcgcagacgtcagcaagtccatgtacctcacggttaaaattcctgcgatgataacatcctatccaaatactaccctggccacgcaggggcagaaaaaggagatgagctgcacggcgcatggtgagaagcccattatagtccgctgggagaaggaggaccgaatcattaaccctgagatggcccgttatcttgtgtccaccaaggaggtgggagaagaggtgatttctactctgcagattttgccaactgtgagagaagattctggtttcttttcctgccatgctattaattcttatggggaggaccgtggaataattcagctcacagtgcaagagcccccagaccctcccgaaattgagatcaaagatgtcaaagcacgcacaattacgctcaggtggaccatggggtttgatggaaacagtcccatcacaggctacgatattgaatgcaaaaataaatcagactcctgggattctgctcagagaaccaaagatgtttcccctcagctgaactcggccaccatcattgatatccacccttcctccacctacagcatccgcatgtacgccaagaaccggattggcaagagcgagcccagcaacgagctcaccatcacggcggacgaggcagctcctgatggtccacctcaggaagttcacctggagcctatatcatctcagagcatcagggtcacatggaaggctcccaagaaacatttgcaaaatgggattatccgtggctaccaaataggttaccgagagtacagcactgggggtaacttccaattcaacattatcagtgtcgacaccagcggggacagtgaggtttacaccctggacaacctgaataagttcactcagtacggcctggtggtgcaggcctgtaaccgggccggcacggggccttcttctcaggaaatcatcaccaccactctcgaggatgtgcccagttacccccccgaaaatgtccaagccatagcaacatcaccagaaagcatatcaatatcctggtccacactttccaaggaagccttgaatggaattctccaggggttcagagtcatttactgggccaacctcatggacggagagctgggtgagattaaaaacatcaccaccacacagccttcactggagctggacgggctggaaaagtacaccaactacagcatccaggtgctggccttcacccgcgcaggagacggggtcaggagtgagcagatcttcacccggaccaaagaggatgttccaggtcctcccgcgggtgtgaaggcagcggcggcctcagcctccatggtctttgtgtcctggcttccccctctcaagctgaacggcatcatccgaaagtacactgtattctgctcccacccctatcccacagtgatcagcgagtttgaggcctctcccgactcgttttcctacagaattcccaacctgagtaggaatcgtcagtacagcgtctgggtggtggctgttacttcagccggaagaggcaacagcagtgaaatcatcacagtcgagccactagcaaaagctcctgcacgaatcctgaccttcagtgggacagtgactactccatggatgaaagacattgtcttgccttgtaaggctgttggggacccttctcctgcagtcaaatggatgaaagacagtaacgggacacccagtctagtaacgattgatgggcggaggagcatctttagcaacggaagcttcattattcgcacggtgaaagcagaagactccggctattacagctgcattgccaataacaactggggatctgatgaaattattttaaacttacaagtacaagttccaccagatcagcctcggcttacagtctccaagaccacgtcttcctccatcaccctttcttggctccctggagacaacgggggcagctctatcagaggatacatactgcagtactccgaggacaatagtgagcagtgggggagttttccaatcagccccagcgaacgttcctatcgcttggaaaatctcaaatgtgggacttggtataagttcacactgacagcccaaaatggagtgggcccagggcgcataagtgaaatcatagaagcaaagaccttaggaaaagagccccagttctcaaaggagcaggagctgtttgccagcatcaacaccacacgcgtgaggctgaacctcattggctggaatgatggcggctgccccatcacctccttcacactagagtacaggccctttgggaccacagtttggaccacagctcagaggacctctctctccaagtcctacatcctgtatgacctgcaggaagccacctggtatgagctgcagatgcgggtgtgcaacagtgcgggctgcgcggagaagcaggccaacttcgctacgctgaactacgatggcagtacaattcctccactcattaagtcagttgtccaaaacgaagaagggctgacgaccaacgaggggctcaagatgctggtgaccatctcctgtatcctggtgggggtcttgctgctgtttgtgctcctgctggttgtgcggaggaggcggcgggagcagaggctaaagaggctgcgagatgcaaagagtttagctgaaatgctcatgagtaagaatacccggacttcagatacgttaagcaagcaacagcagaccctgcgaatgcacatcgacatacccagggctcagcttttgattgaagagagagacacgatggagaccattgatgatcgctccacggttctgttgacggatgctgactttggagaggcagctaagcagaagtccctgacggtcactcacacggtccattaccaatcggtgtctcaggccactgggcccttagtggatgtttcagacgctcggccgggaacgaatcccaccaccaggaggaatgccaaggctgggcccacagcgagaaaccgctatgccagccagtggaccctcaaccgaccccaccccaccatctcagcacacaccctcaccacagactggaggctgccaacacccagggctgcaggatcagtagacaaagagagcgacagttacagcgtcagcccctcgcaagacacagatcgagcaagaagcagcatggtctccacagaaagtgcctcctccacttacgaagaactggccagggcctacgaacacgccaagatggaagagcaactgaggcacgccaagttcaccatcacggagtgcttcatatcagacacgtcatcggagcagttgacggcagggacaaatgagtacacggacagtctgacctccagcaccccttccgaatcgggaatctgcaggttcactgcatctccccccaaacctcaggatggaggaagagtaatgaatatggcagttccaaaggcacatcggccaggtgacctcatacatttgcctccataccttagaatggactttttgttaaaccgaggtggtccaggcaccagcagggacctgagcttaggacaagcatgcttggaacctcagaaaagccggaccctgaagcgccccacggtcctggagcccatcccgatggaagccgcctcctccgcctcctccacgagagaaggacagtcgtggcagccgggggccgtggccacattacctcagcgggagggagcagagctgggacaggcagctaaaatgagcagctcccaagaatcactgctcgactcccggggccatttgaaaggaaacaatccttacgcaaaatcttacaccctggtataacagacagcatgactggacagcggttgtaaatacaattcaaacaattcaatcaaagctaccttttttttacggaattccaatatttataattaaagaaaattgccaaaatatattaaaaaaaaaaaagagaaaatactgaaaccacagacagtgcaaagactctcctgctttttttctgtctgagtgtgagctccatccgcctgggcatctgattttttgggaaagaagtccagttttatgatcttcacaggctattgcatttttactgattttctacaaaagtgcatgggggggattaattaaaccttctgactggaagttctatcacacaagaggcaagaaagaaaacagggtgggtgggaaatcagcctatttgtgaatttaaaaggaacaccgatttgcgggcaggggaaaacttcagtcacgtttgcacacctttctttcccattagaaaccgggttctcaatttggtcttcttttgttgttaattaggatgagtgccgtcagtgaaggggtggggggaatcaatttggttttctctcttgtttcttttttaatttaatgagacactctttgcattttgtctaagcgaaataaaaaagaaaaggttgtctgcctttatttccatgtctgcttctctcgtcttctgccagtggcctggtcctccttcccattgacacttctgtttggaaacaccaggcctgaacccagagcccaattcaataaaccagagtcgatactaacaccctgaactcctcaggaatctccaggaagcacaaagaaggtgcagctcctgctctcaagctggagaggacaaaatgcaggctggtctccaccgcaaccagaggccagcccaagtattcgaagcccgtcgcaaagctctgccccttgcctgcccatggccagagttcaactgactgtggcctatgggccaaatccagcctcctgctgttttttaaataaagttttattgaaacaaggccacatgcactatttgctattgtctatggctgctttcatggcacaatggtagagctgaatagttgcagcagagatggtatagcccatgaagcctaaaatatttattacctggcccattacaggaaacatttgccagacccgtgctctggagtctgaaatgtagccccagcttgcgtgacaaggggcaagatcgtgcatcttaccctccatgacttttcctatctccactatgcctggtatgcaaatttgtgatagaccatcttaataaacattgcctgaatcctctgtaaccagaggaaagtgatgttcctctaaaatctaagtttttactttcctttccctcactttatctcccatgtggctcatcctaagagagaatttactcataaatagtcggaactgcattctttatcccacaaccctcacagggtttgctttatgaaagaggatgtaatcctcccctggctgcaacactccattccaggctcacttccataaaatggaaagataaacaggtctttgtgtcagagatttggcattaaccagaaaacatgatcaaatatccacagctgctcagtctcccaggctgaagattctctacaggcttccattaaggccaccaacatagactggtgccagttattaccatcttgggaacatattcagaaatgtctttccttccctccctccctccttctttcccatcctttcttccttctatttattttccaggcaggcccatttgtctgcttagattcagtgacacagaatgggtccaggaccatgtcaagaccacctgctgatgctagtgttagatgactccaggaatgtgaggtgtgcatccatggtttcagaatgtaatccgtgttgacgtgtactgtttgcatactctcagactgttttttttttatgcaaaagaaatgttactttctgggggaaaaaattaaaagtctatctttcatcaacctaaaacttctatatcccccaaacatagaagtttacctttttaacatttttctctcaacctgtacaaaaataaaaaaattctacatta

SEQ ID NO: 8800 - DNA, 6899 bp, Homo sapiens
  source 1..6899: mol_type = unassigned DNA
ggatgacaggagccggggagccgaggagggaggagccgccgccgcagccgagcgctgggctgaggagcagagagagcggggcgccgagtgcgggcggctgggagcgcgctgagcgggggagaggcgctgccgcacggccggccacaggaccacctccccggagaatagggcctctttatggcatgtggctggtaactttcctcctgctcctggactctttacacaaagcccgccctgaagatgttggcaccagcctctactttgtaaatgactccttgcagcaggtgaccttttccagctccgtgggggtggtggtgccctgcccggccgcgggctcccccagcgcggcccttcgatggtacctggccacaggggacgacatctacgacgtgccgcacatccggcacgtccacgccaacgggacgctgcagctctaccccttctccccctccgccttcaatagctttatccacgacaatgactacttctgcaccgcggagaacgctgccggcaagatccggagccccaacatccgcgtcaaagcagttttcagggaaccctacaccgtccgggtggaggatcaaaggtcaatgcgtggcaacgtggccgtcttcaagtgcctcatcccctcttcagtgcaggaatatgttagcgttgtatcttgggagaaagacacagtctccatcatcccagaacacaggttttttattacctaccacggcgggctgtacatctctgacgtacagaaggaggacgccctctccacctatcgctgcatcaccaagcacaagtatagcggggagacccggcagagcaatggggcacgcctctctgtgacagaccctgctgagtcgatccccaccatcctggatggcttccactcccaggaagtgtgggccggccacaccgtggagctgccctgcaccgcctcgggctaccctatccccgccatccgctggctcaaggatggccggcccctcccggctgacagccgctggaccaagcgcatcacagggctgaccatcagcgacttgcggaccgaggacagcggcacctacatttgtgaggtcaccaacaccttcggttcggcagaggccacaggcatcctcatggtcattgatccccttcatgtgaccctgacaccaaagaagctgaagaccggcattggcagcacggtcatcctctcctgtgccctgacgggctccccagagttcaccatccgctggtatcgcaacacggagctggtgctgcctgacgaggccatctccatccgcgggctcagcaacgagacgctgctcatcacctcggcccagaagagccattccggggcctaccagtgcttcgctacccgcaaggcccagaccgcccaggactttgccatcattgcacttgaggatggcacgccccgcatcgtctcgtccttcagcgagaaggtggtcaaccccggggagcagttctcactgatgtgtgcggccaagggcgccccgccccccacggtcacctgggccctcgacgatgagcccatcgtgcgggatggcagccaccgcaccaaccagtacaccatgtcggacggcaccaccatcagccacatgaacgtcacaggcccccagatccgcgacgggggcgtgtaccggtgcacagcgcggaacttggtgggcagtgctgaatatcaggcgcgaataaacgtaagaggcccacccagcatccgggctatgcggaacatcacagcagtcgccgggcgggacacccttatcaactgcagggtcatcggctatccctactactccatcaagtggtacaaggatgccctgctgctgccagacaaccaccgccaggtggtgtttgagaatgggaccctcaagctgactgacgtgcagaagggcatggatgagggggagtacctgtgcagtgtcctcatccagccccagctctccatcagccagagcgttcacgtagccgtcaaagtgccccctctgatccagcccttcgaattcccacccgcctccatcggccagctgctctacattccctgtgtggtgtcctcgggggacatgcccatccgtatcacctggaggaaggacggacaggtgatcatctcaggctcgggcgtgaccatcgagagcaaggaattcatgagctccctgcagatctctagcgtctccctcaagcacaacggcaactatacatgcatcgccagcaacgcagccgccaccgtgagccgggagcgccagctcatcgtgcgtgtgccccctcgatttgtggtgcaacccaacaaccaggatggcatctacggcaaagctggtgtgctcaactgctcggtggacggctaccccccacccaaggtcatgtggaagcatgccaaggggagcgggaacccccagcagtaccaccctgtgcccctcactggccgcatccagatcctgcccaacagctcgctgctgatccgccacgtcctagaagaggacatcggctactacctctgccaggccagcaacggcgtaggcaccgacatcagcaagtccatgttcctcacagtcaagatcccggccatgatcacttcccaccccaacaccaccatcgccatcaagggccatgcgaaggagctaaactgcacggcacggggtgagcggcccatcatcatccgctgggagaagggggacacagtcatcgaccctgaccgcgtcatgcggtatgccatcgccaccaaggacaacggcgacgaggtcgtctccacactgaagctcaagcccgctgaccgtggggactctgtgttcttcagctgccatgccatcaactcgtatggggaggaccggggcttgatccaactcactgtgcaagagccccccgaccccccagagctggagatccgggaggtgaaggcccggagcatgaacctgcgctggacccagcgattcgacgggaacagcatcatcacgggcttcgacattgaatacaagaacaaatcagattcctgggacttcaagcagtccacacgcaacatctcccccaccatcaaccaggccaacattgtggacttgcacccggcatctgtgtacagcatccgcatgtactctttcaacaagattggccgcagtgaaccaagcaaggagctcaccatcagcactgaggaggccgctcccgatgggccccccatggatgttaccttgcagccagtgacctcacagagcatccaggtgacctggaaggcacccaagaaggagctgcagaacggtgtcatccggggctaccagattggctacagagagaacagccccggcagcaacgggcagtacagcatcgtggagatgaaggccacgggggacagcgaggtctacaccctggacaacctcaagaagttcgcccagtatggggtggtggtccaagccttcaatcgggctggcacggggccctcttccagcgagatcaatgccaccactctggaggatgtgcccagccagccccctgagaacgtccgggccctgtccatcacttctgacgtggccgtcatctcctggtcagagcccccgcgcagcaccctcaatggcgtcctcaaaggctatcgggtcatcttctggtccctctatgttgatggggagtggggcgagatgcagaacatcaccaccacgcgggagcgggtggagctgcggggcatggagaagttcaccaactacagcgtccaggtgctggcctacacccaggctggggacggcgtacgcagcagtgtgctctacatccagaccaaggaggacgttccaggtccccctgctggcatcaaagctgtcccttcatcagctagcagtgtggttgtgtcttggctcccccctaccaagcccaacggggtgatccgcaagtacaccatcttctgttccagccccgggtctggccagccggctcccagcgagtacgagacgagtccagagcagctcttctaccggatcgcccacctaaaccgcggtcagcagtatctgctgtgggtggccgccgtcacctctgccggccggggcaacagcagcgagaaggtgaccatcgagcctgctggcaaggccccagcaaagatcatctcctttgggggcaccgtgacaacaccttggatgaaagatgttcggctgccttgcaattcagtgggagatccagcccctgctgtgaagtggaccaaggacagtgaagactcggccattccagtgtccatggatgggcaccggctcatccacaccaatggcacactgctgctgcgtgcagtgaaggctgaggactctggctactacacgtgcacggccaccaacactggtggctttgacaccatcatcgtcaaccttctggtgcaagttcccccggaccagccccgcctcactgtctccaaaacctcagcttcgtccatcaccctgacctggattccaggtgacaatgggggcagctccatccgaggcttcgtgctacagtactcggtggacaacagcgaggagtggaaggatgtgttcatcagctccagcgagcgctccttcaagctggacagcctcaagtgtggcacgtggtacaaggtgaagctggcagccaagaacagcgtgggctctgggcgcatcagcgagatcatcgaggccaagacccacgggcgggagccctccttcagcaaagaccaacacctcttcacccacatcaactccacgcatgctcggcttaacctgcagggctggaacaatgggggctgccctatcacagccatcgttctggagtaccggcccaaggggacctgggcctggcagggcctccgggccaacagctccggggaggtgtttctgacggaactgcgagaggccacgtggtacgagctgcgcatgagggcttgcaacagtgcgggctgcggcaatgaaacagcccagttcgccaccctggactacgatggcagcaccattccacccatcaagtctgctcaaggtgaaggggatgatgtgaagaagctgttcaccatcggctgccctgtcatcctggccacactgggggtggcactgctcttcatcgtacgcaagaagaggaaggagaaacggctgaagcgactccgagatgcaaagagtttggcagaaatgttgataagcaagaacaatagaagctttgacacccctgtgaaagggccaccccagggcccacggctacacattgacatccccagggtccagctgctcatcgaggacaaagaaggcatcaagcaactgggagatgacaaggccaccatccctgtgacagatgctgagttcagccaagctgtcaacccacagagcttctgtactggcgtctccttgcaccacccaaccctcatccagagcacaggacccctcatcgacatgtctgacatccggccaggaaccaatccagtgtccaggaagaatgtgaagtcagcccacagcacccggaaccggtactcaagccagtggaccctgaccaagtgccaggcctccacacctgcccgcaccctcacctccgactggcgcaccgtgggctcccagcatggtgtcacggtcactgagagtgacagctacagtgccagcctgtcccaggacacagacaaaggaaggaacagcatggtgtccactgagagtgcctcttccacctacgaggagctggcccgggcctatgagcatgccaagctggaggagcagctgcagcacgccaagtttgagatcaccgagtgcttcatctctgacagttcctctgaccagatgaccacaggcaccaacgagaacgccgacagcatgacatccatgagcacaccctcagagcctggcatctgccgctttaccgcctcaccacccaagccccaggatgcggaccggggcaaaaacgtggctgtgcccatccctcaccgggccaacaagagtgactactgcaacctgcccctgtatgccaagtcagaggccttctttcgaaaggcagatggacgtgagccctgccccgtggtcccaccccgtgaggcctccatccggaacctggctcgaacctaccacacccaggctcgccacctgaccctggaccctgccagcaagtccttgggccttccccacccaggggcccccgctgccgcctccacagccaccttacctcagaggactctggccatgccagcccccccagccggcacagcccccccagcccccggccccacccctgctgagccacccaccgcccccagcgctgcccctccggcccccagcaccgagcctccacgagccgggggcccacacaccaaaatggggggctccagggactcgcttctcgagatgagcacatcgggggtagggaggtctcagaagcagggggccggggcctactccaaatcctacaccctggtgtagggcccgcaggaagagcagccacgcctggaccgcgccgcgccgcagccccacacgccagctcggctgtttttctgcattatttatattcaactgacagacaaaaaccaaccaacgacaaaacaaaaacccccaatcatgaacgcctgtacatagaactcttttgtacaaatgaaactattttcttcttctccatgaagccagggcacaaagaatttgacagtacaagtcaaatcccccaccccacaaaatatgtgtggagatatatatacatatatagacagacaggaacgcgtccacgagctatatatctatatatttctctcaccctattttgagacagaggcacaaagactcagcaatttttttccctcctcctcaccttccccccagtctaggtggttttgacaaagaccaaaatcccaactcagagacactgcatgcgattttactgttccaagaaaaccaggagttgcttcaatttgcagatgcttatgtgttaatacctttttctatgaaaaaagacccagcgccgtgtgcaataaaggttatgtttct

SEQ ID NO: 8801 - DNA, 6086 bp, Homo sapiens
  source 1..6086: mol_type = unassigned DNA
cctctttatggcatgtggctggtaactttcctcctgctcctggactctttacacaaagtgccctgaagatgttgccttattgggccggccacaccgtggagctgccctgcaccgcctcgggctaccctatccccgccatccgctggctcaaggatggccggcccctcccggctgacagccgctggaccaagcgcatcacagggctgaccatcagcgacttgcggaccgaggacagcggcacctacatttgtgaggtcaccaacaccttcggttcggcagaggccacaggcatcctcatggtcattgatccccttcatgtgaccctgacaccaaagaagctgaagaccggcattggcagcacggtcatcctctcctgtgccctgacgggctccccagagttcaccatccgctggtatcgcaacacggagctggtgctgcctgacgaggccatctccatccgcgggctcagcaacgagacgctgctcatcacctcggcccagaagagccattccggggcctaccagtgcttcgctacccgcaaggcccagaccgcccaggactttgccatcattgcacttgaggatggcacgccccgcatcgtctcgtccttcagcgagaaggtggtcaaccccggggagcagttctcactgatgtgtgcggccaagggcgccccgccccccacggtcacctgggccctcgacgatgagcccatcgtgcgggatggcagccaccgcaccaaccagtacaccatgtcggacggcaccaccatcagccacatgaacgtcacaggcccccagatccgcgacgggggcgtgtaccggtgcacagcgcggaacttggtgggcagtgctgaatatcaggcgcgaataaacgtaagaggcccacccagcatccgggctatgcggaacatcacagcagtcgccgggcgggacacccttatcaactgcagggtcatcggctatccctactactccatcaagtggtacaaggatgccctgctgctgccagacaaccaccgccaggtggtgtttgagaatgggaccctcaagctgactgacgtgcagaagggcatggatgagggggagtacctgtgcagtgtcctcatccagccccagctctccatcagccagagcgttcacgtagccgtcaaagtgccccctctgatccagcccttcgaattcccacccgcctccatcggccagctgctctacattccctgtgtggtgtcctcgggggacatgcccatccgtatcacctggaggaaggacggacaggtgatcatctcaggctcgggcgtgaccatcgagagcaaggaattcatgagctccctgcagatctctagcgtctccctcaagcacaacggcaactatacatgcatcgccagcaacgcagccgccaccgtgagccgggagcgccagctcatcgtgcgtgtgccccctcgatttgtggtgcaacccaacaaccaggatggcatctacggcaaagctggtgtgctcaactgctcggtggacggctaccccccacccaaggtcatgtggaagcatgccaaggggagcgggaacccccagcagtaccaccctgtgcccctcactggccgcatccagatcctgcccaacagctcgctgctgatccgccacgtcctagaagaggacatcggctactacctctgccaggccagcaacggcgtaggcaccgacatcagcaagtccatgttcctcacagtcaagatcccggccatgatcacttcccaccccaacaccaccatcgccatcaagggccatgcgaaggagctaaactgcacggcacggggtgagcggcccatcatcatccgctgggagaagggggacacagtcatcgaccctgaccgcgtcatgcggtatgccatcgccaccaaggacaacggcgacgaggtcgtctccacactgaagctcaagcccgctgaccgtggggactctgtgttcttcagctgccatgccatcaactcgtatggggaggaccggggcttgatccaactcactgtgcaagagccccccgaccccccagagctggagatccgggaggtgaaggcccggagcatgaacctgcgctggacccagcgattcgacgggaacagcatcatcacgggcttcgacattgaatacaagaacaaatcagattcctgggacttcaagcagtccacacgcaacatctcccccaccatcaaccaggccaacattgtggacttgcacccggcatctgtgtacagcatccgcatgtactctttcaacaagattggccgcagtgaaccaagcaaggagctcaccatcagcactgaggaggccgctcccgatgggccccccatggatgttaccttgcagccagtgacctcacagagcatccaggtgacctggaaggcacccaagaaggagctgcagaacggtgtcatccggggctaccagattggctacagagagaacagccccggcagcaacgggcagtacagcatcgtggagatgaaggccacgggggacagcgaggtctacaccctggacaacctcaagaagttcgcccagtatggggtggtggtccaagccttcaatcgggctggcacggggccctcttccagcgagatcaatgccaccactctggaggatgtgcccagccagccccctgagaacgtccgggccctgtccatcacttctgacgtggccgtcatctcctggtcagagcccccgcgcagcaccctcaatggcgtcctcaaaggctatcgggtcatcttctggtccctctatgttgatggggagtggggcgagatgcagaacatcaccaccacgcgggagcgggtggagctgcggggcatggagaagttcaccaactacagcgtccaggtgctggcctacacccaggctggggacggcgtacgcagcagtgtgctctacatccagaccaaggaggacgttccaggtccccctgctggcatcaaagctgtcccttcatcagctagcagtgtggttgtgtcttggctcccccctaccaagcccaacggggtgatccgcaagtacaccatcttctgttccagccccgggtctggccagccggctcccagcgagtacgagacgagtccagagcagctcttctaccggatcgcccacctaaaccgcggtcagcagtatctgctgtgggtggccgccgtcacctctgccggccggggcaacagcagcgagaaggtgaccatcgagcctgctggcaaggccccagcaaagatcatctcctttgggggcaccgtgacaacaccttggatgaaagatgttcggctgccttgcaattcagtgggagatccagcccctgctgtgaagtggaccaaggacagtgaagactcggccattccagtgtccatggatgggcaccggctcatccacaccaatggcacactgctgctgcgtgcagtgaaggctgaggactctggctactacacgtgcacggccaccaacactggtggctttgacaccatcatcgtcaaccttctggtgcaagttcccccggaccagccccgcctcactgtctccaaaacctcagcttcgtccatcaccctgacctggattccaggtgacaatgggggcagctccatccgaggcttcgtgctacagtactcggtggacaacagcgaggagtggaaggatgtgttcatcagctccagcgagcgctccttcaagctggacagcctcaagtgtggcacgtggtacaaggtgaagctggcagccaagaacagcgtgggctctgggcgcatcagcgagatcatcgaggccaagacccacgggcgggagccctccttcagcaaagaccaacacctcttcacccacatcaactccacgcatgctcggcttaacctgcagggctggaacaatgggggctgccctatcacagccatcgttctggagtaccggcccaaggggacctgggcctggcagggcctccgggccaacagctccggggaggtgtttctgacggaactgcgagaggccacgtggtacgagctgcgcatgagggcttgcaacagtgcgggctgcggcaatgaaacagcccagttcgccaccctggactacgatggcagcaccattccacccatcaagtctgctcaaggtgaaggggatgatgtgaagaagctgttcaccatcggctgccctgtcatcctggccacactgggggtggcactgctcttcatcgtacgcaagaagaggaaggagaaacggctgaagcgactccgagatgcaaagagtttggcagaaatgttgataagcaagaacaatagaagctttgacacccctgtgaaagggccaccccagggcccacggctacacattgacatccccagggtccagctgctcatcgaggacaaagaaggcatcaagcaactgggagatgacaaggccaccatccctgtgacagatgctgagttcagccaagctgtcaacccacagagcttctgtactggcgtctccttgcaccacccaaccctcatccagagcacaggacccctcatcgacatgtctgacatccggccaggaaccaatccagtgtccaggaagaatgtgaagtcagcccacagcacccggaaccggtactcaagccagtggaccctgaccaagtgccaggcctccacacctgcccgcaccctcacctccgactggcgcaccgtgggctcccagcatggtgtcacggtcactgagagtgacagctacagtgccagcctgtcccaggacacagacaaaggaaggaacagcatggtgtccactgagagtgcctcttccacctacgaggagctggcccgggcctatgagcatgccaagctggaggagcagctgcagcacgccaagtttgagatcaccgagtgcttcatctctgacagttcctctgaccagatgaccacaggcaccaacgagaacgccgacagcatgacatccatgagcacaccctcagagcctggcatctgccgctttaccgcctcaccacccaagccccaggatgcggaccggggcaaaaacgtggctgtgcccatccctcaccgggccaacaagagtgactactgcaacctgcccctgtatgccaagtcagaggccttctttcgaaaggcagatggacgtgagccctgccccgtggtcccaccccgtgaggcctccatccggaacctggctcgaacctaccacacccaggctcgccacctgaccctggaccctgccagcaagtccttgggccttccccacccaggggcccccgctgccgcctccacagccaccttacctcagaggactctggccatgccagcccccccagccggcacagcccccccagcccccggccccacccctgctgagccacccaccgcccccagcgctgcccctccggcccccagcaccgagcctccacgagccgggggcccacacaccaaaatggggggctccagggactcgcttctcgagatgagcacatcgggggtagggaggtctcagaagcagggggccggggcctactccaaatcctacaccctggtgtagggcccgcaggaagagcagccacgcctggaccgcgccgcgccgcagccccacacgccagctcggctgtttttctgcattatttatattcaactgacagacaaaaaccaaccaacgacaaaacaaaaacccccaatcatgaacgcctgtacatagaactcttttgtacaaatgaaactattttcttcttctccatgaagccagggcacaaagaatttgacagtacaagtcaaatcccccaccccacaaaatatgtgtggagatatatatacatatatagacagacaggaacgcgtccacgagctatatatctatatatttctctcaccctattttgagacagaggcacaaagactcagcaatttttttccctcctcctcaccttccccccagtctaggtggttttgacaaagaccaaaatcccaactcagagacactgcatgcgattttactgttccaagaaaaccaggagttgcttcaatttgcagatgcttatgtgttaatacctttttctatgaaaaaagacccagcgccgtgtgcaataaaggttatgtttct

SEQ ID NO: 8802 - DNA, 3672 bp, Homo sapiens
  source 1..3672: mol_type = unassigned DNA
cacgcaggggccgcacccctgagggtgaccggaaccgctcccgcgggaagggcagggtgcggcgcctggccgcagacagacaagggggcgccggctcttcagaaccccagggagaaagcggtggagggctagagttgaggagactaaggacatttgaggagggcaggcattaccaagttaaaacctcctgaaagacaactccattgggcgaccgtctgcgccgcacagcctgacgggagcgtcatccttcctgcgcaggctgcaaccgacagacaggctcggctccgcctccagccgcggggcacgcggggagagccgttcctccctccctccgctaacccggacagcaaaggagcatttccggcgtaagactgtccctacggaaggggtggggctagcttggccccgtctttcacgcccagagggggcggggtgaaccgtgacagcgcttcggcccgcactaaggccggctcttgtgccggaaggaggaaggcgtgggcattcgcccctcggagctagggagtgtgtgcgacgccgctgcgaggtcacgtgagccactgccggcagagagggaaaggggcggggcccagaacgaagcggggaggcgccccttgtttccctggggtcacgcgcagccggaagtggcggctgctgcggagaattggagatggggaccgccctggacatcaagattaaaagagcgaataaagtttatcacgccggggaagtgctctctggcgtggtggtcatatcgagtaaggattcagtccaacaccagggagtgtctttgaccatggaaggaactgtaaacctccagctcagtgccaaaagtgtgggtgtgtttgaagctttttataattctgttaagcctatccagattatcaacagcaccatagaaatggtgaagccggggaaatttcccagcggcaaaacagaaatcccttttgaatttcctctgcacttgaagggtaacaaagttctgtatgagacgtatcatggcgtgtttgtcaacattcagtatacactgcgctgtgacatgaagcggtctctgttggccaaggacttgacaaagacctgtgaatttatcgttcactccgctcctcagaaggggaagtttactcccagtcccgtggacttcacgattacacctgaaaccttacagaacgtcaaagagagagctttgcttcccaaatttctccttcgaacatctcaactcaacaaactgtgtcatcacgcagccactaacgggagagctggtggtggagagctcggaagccgccatcagaagcgtggagctgcagctggtgcgcgtggagacgtgcgggtgtgcagatatgcccgcgacgccacggagattcagaacattcagatcgccgacggggatgtgtgcaggggcctctctgtccccatctacatggtcttccctaggctgttcacctgccctacactggagaccaccaacttcaaagtggaatttgaggttaacatcgtggtgctgcttcaccctgaccacctcatcacggagaacttcccgctgaagctctgcaggatatagcccggaggagggaagcatagagaacgggagtggccatctggaaatccagctggttatccaaatcctaaggggagctacagccagcggcatatacttgtttttgtgattattctgtatcagaaatgaaacagaccctcaaattaactttccttcctcatttcttgaggcttctgcttccaacaggcacctctaatcagaccttttctttgaaattcaacaagatttcttaatgctatttgccaagaccatttcacagaaaacattgactgtggctcttgccttatctgttcctttttaggtacagtaaaacaattgtgacagcagtttgagcttgctggagagtggcatcatggggacaaaaggaaacctctgacttgctaatggatgtagccagggactccccatagcaaagggtctgtggccagttgacatccaggatggctgcaagcgcacttgatggtcaggaagtttgcagatactcgccaaggcagagcgcaaagtgctagccactggaaatgcatgacttccctccacccctactctattctgtagttttttggttttgtttctgagacggagtctcagtctgtcacccaggctggagtgatctcagctcactgcaacctccacctcccaggttcaagcgactctcctgcctcagcctcccgagtagttgggattacaggtgactgccaccgtgcccggctaatgtttgtatttttagtagagacggggcttcaccatcttggccaggctggtcttgaactcctgacctcgtgacccacccgccttggcctcccaaagtgctgggattacaggtgtgagccaccacacccagcctctgtagttctttttacaacatttttcattataactttaaattttttaagcaactggaaaagtgttccttgctctcttggggggatttggctggtgccgaagtgtttctgaagtctcaagaactgccataaaatctcacgctgccatttccctgaacagatacatacatagagagagacagttttccaaactgtgtcacgcaggctgagtgcactggcaggatcacagctcacggcagcctcaacctccctggctcaagcgatccctcccctcagcctcctgagtagctgagactacaggtgagtgccaccacactcagctaattttcaaattttttgtagacagggtctccctatgttgcccaggctggtcttgaactcctagactcaagtgatcctcctgtcttggcctcccaaagtgctgagattacaggtgtgagccactgtgcccagcagtttcccagaatatatttaaatgcaaagttacatgaggggaaaacatgtatgtttgctcctgttgttactgggtaggttctgaacagcagaaacccatgtgcagggtgggctggtgaaggcccctctccgcaaggtggtagcaggaaaaggtccttgacttgatgaatttggtctgcctctgagccactggaggaagctgttttgagccagggttttttggcctaaagccagcatttcctcagtctccctttgtggttcgaaggatatggactattgcaatacatttcttccttcaaatcctgccactgttttgttggcccacaactaataggacctcaaaataagccatgctgctttgcacacacactagccttcttttgtacttttcattctggatgggcttggccaaaacaggctcaggccaaagacctcccaagctgtatgtacttccagtatcctgaaacagtgtttggtgacataatgccaagggtaaacaagcctgatttaggcactgctttatccaggggcttcacccatgaaattaataaaacttatctgagtcacttgaaacttggttcccagaaaacacatttctggtttataatctccttttatgctcacctgacattaattatctatccttgatgatgtgtttaaactgagtagcagaaaacagaggccacactttctgggaaattttaaaggaagaaaccatttttaatgagatgaaaatatttaacgaatttaaaaagctaatgacaattttgagaaaaggtttgggatgtatattgctatgtaatttaataaactgattttatggat

SEQ ID NO: 8803 - DNA, 3256 bp, Homo sapiens
  source 1..3256: mol_type = unassigned DNA
ggggtgaaccgtgacagcgcttcggcccgcactaaggccggctcttgtgccggaaggaggaaggcgtgggcattcgcccctcggagctagggagtgtgtgcgacgccgctgcgaggtcacgtgagccactgccggcagagagggaaaggggcggggcccagaacgaagcggggaggcgccccttgtttccctggggtcacgcgcagccggaagtggcggctgctgcggagaattggagatggggaccgccctggacatcaagattaaaagagcgaataaagtttatcacgccggggaagtgctctctggcgtggtggtcatatcgagtaaggattcagtccaacaccagggagtgtctttgaccatggaaggaactgtaaacctccagctcagtgccaaaagtgtgggtgtgtttgaagctttttataattctgttaagcctatccagattatcaacagcaccatagaaatggtgaagccggggaaatttcccagcggcaaaacagaaatcccttttgaatttcctctgcacttgaagggtaacaaagttctgtatgagacgtatcatggcgtgtttgtcaacattcagtatacactgcgctgtgacatgaagcggtctctgttggccaaggacttgacaaagacctgtgaatttatcgttcactccgctcctcagaaggggaagtttactcccagtcccgtggacttcacgattacacctgaaaccttacagaacgtcaaagagagagctttgcttcccaaatttctccttcgaggacatctcaactcaacaaactgtgtcatcacgcagccactaacgggagagctggtggtggagagctcggaagccgccatcagaagcgtggagctgcagctggtgcgcgtggagacgtgcgggtgtgcagaaggctatgcccgcgacgccacggagattcagaacattcagatcgccgacggggatgtgtgcaggggcctctctgtccccatctacatggtcttccctaggctgttcacctgccctacactggagaccaccaacttcaaagtggaatttgaggttaacatcgtggtgctgcttcaccctgaccacctcatcacggagaacttcccgctgaagctctgcaggatatagcccggaggagggaagcatagagaacgggagtggccatctggaaatccagctggttatccaaatcctaaggggagctacagccagcggcatatacttgtttttgtgattattctgtatcagaaatgaaacagaccctcaaattaactttccttcctcatttcttgaggcttctgcttccaacaggcacctctaatcagaccttttctttgaaattcaacaagatttcttaatgctatttgccaagaccatttcacagaaaacattgactgtggctcttgccttatctgttcctttttaggtacagtaaaacaattgtgacagcagtttgagcttgctggagagtggcatcatggggacaaaaggaaacctctgacttgctaatggatgtagccagggactccccatagcaaagggtctgtggccagttgacatccaggatggctgcaagcgcacttgatggtcaggaagtttgcagatactcgccaaggcagagcgcaaagtgctagccactggaaatgcatgacttccctccacccctactctattctgtagttttttggttttgtttctgagacggagtctcagtctgtcacccaggctggagtgatctcagctcactgcaacctccacctcccaggttcaagcgactctcctgcctcagcctcccgagtagttgggattacaggtgactgccaccgtgcccggctaatgtttgtatttttagtagagacggggcttcaccatcttggccaggctggtcttgaactcctgacctcgtgacccacccgccttggcctcccaaagtgctgggattacaggtgtgagccaccacacccagcctctgtagttctttttacaacatttttcattataactttaaattttttaagcaactggaaaagtgttccttgctctcttggggggatttggctggtgccgaagtgtttctgaagtctcaagaactgccataaaatctcacgctgccatttccctgaacagatacatacatagagagagacagttttccaaactgtgtcacgcaggctgagtgcactggcaggatcacagctcacggcagcctcaacctccctggctcaagcgatccctcccctcagcctcctgagtagctgagactacaggtgagtgccaccacactcagctaattttcaaattttttgtagacagggtctccctatgttgcccaggctggtcttgaactcctagactcaagtgatcctcctgtcttggcctcccaaagtgctgagattacaggtgtgagccactgtgcccagcagtttcccagaatatatttaaatgcaaagttacatgaggggaaaacatgtatgtttgctcctgttgttactgggtaggttctgaacagcagaaacccatgtgcagggtgggctggtgaaggcccctctccgcaaggtggtagcaggaaaaggtccttgacttgatgaatttggtctgcctctgagccactggaggaagctgttttgagccagggttttttggcctaaagccagcatttcctcagtctccctttgtggttcgaaggatatggactattgcaatacatttcttccttcaaatcctgccactgttttgttggcccacaactaataggacctcaaaataagccatgctgctttgcacacacactagccttcttttgtacttttcattctggatgggcttggccaaaacaggctcaggccaaagacctcccaagctgtatgtacttccagtatcctgaaacagtgtttggtgacataatgccaagggtaaacaagcctgatttaggcactgctttatccaggggcttcacccatgaaattaataaaacttatctgagtcacttgaaacttggttcccagaaaacacatttctggtttataatctccttttatgctcacctgacattaattatctatccttgatgatgtgtttaaactgagtagcagaaaacagaggccacactttctgggaaattttaaaggaagaaaccatttttaatgagatgaaaatatttaacgaatttaaaaagctaatgacaattttgagaaaaggtttgggatgtatattgctatgtaatttaataaactgattttatggatataaata

SEQ ID NO: 8804 - DNA, 821 bp, Homo sapiens
  source 1..821: mol_type = unassigned DNA
cttgtttccctggggtcacgcgcagccggaagtggcggctgctgcggagaattggagatggggaccgccctggacatcaagattaaaagagcgaataaagtttatcacgccgggcctcagaaggggaagtttactcccagtcccgtggacttcacgattacacctgaaaccttacagaacgtcaaagagagagctttgcttcccaaatttctccttcgaggacatctcaactcaacaaactgtgtcatcacgcagccactaacgggagagctggtggtggagagctcggaagccgccatcagaagcgtggagctgcagctggtgcgcgtggagacgtgcgggtgtgcagaaggctatgcccgcgacgccacggagattcagaacattcagatcgccgacggggatgtgtgcaggggcctctctgtccccatctacatggtcttccctaggctgttcacctgccctacactggagaccaccaacttcaaagtggaatttgaggttaacatcgtggtgctgcttcaccctgaccacctcatcacggagaacttcccgctgaagctctgcaggatatagcccggaggagggaagcatagagaacgggagtggccatctggaaatccagctggttatccaaatcctaaggggagctacagccagcggcatatacttgtttttgtgattattctgtatcagaaatgaaacagaccctcaaattaactttccttcctcatttcttgaggcttctgcttccaacaggcacctctaatcagaccttttctttgaaattcaacaagatttcttaatgctatttgccaaga

SEQ ID NO: 8805 - DNA, 937 bp, Homo sapiens
  source 1..937: mol_type = unassigned DNA
ttccctggggtcacgcgcagccggaagtggcggctgctgcggagaattggagatggggaccgccctggacatcaagattaaaagagcgaataaagtttatcacgccggggaagtgctctctggcgtggtggtcatatcgagtaaggattcagtccaacaccagggagtgtctttgaccatggaaggaactgtaaacctccagctcagtgccaaaagtgtgggtgtgtttgaagctttttataattctgttaagcctatccagattatcaacagcaccatagaaatggtgaagccggggaaatttcccagcggcaaaacagaaatcccttttgaatttcctctgcacttgaagggtaacaaagttctgtatgagacgtatcatggcgtgtttgtcaacattcagcctcagaaggggaagtttactcccagtcccgtggacttcacgattacacctgaaaccttacagaacgtcaaagagagagctttgcttcccaaatttctccttcgaggacatctcaactcaacaaactgtgtcatcacgcagccactaacgggagagctggtggtggagagctcggaagccgccatcagaagcgtggagctgcagctggtgcgcgtggagacgtgcgggtgtgcagaaggctatgcccgcgacgccacggagattcagaacattcagatcgccgacggggatgtgtgcaggggcctctctgtccccatctacatggtcttccctaggctgttcacctgccctacactggagaccaccaacttcaaagtggaatttgaggttaacatcgtggtgctgcttcaccctgaccacctcatcacggagaacttcccgctgaagctctgcaggatatagcccggaggagggaagcatagagaacgggagtggccatctggaaatccagctggttatccaaatcctaagggg

SEQ ID NO: 8806 - DNA, 980 bp, Homo sapiens
  source 1..980: mol_type = unassigned DNA
aagtggcggctgctgcggagaattggagatggggaccgccctggacatcaagattaaaagagcgaataaagtttatcacgccggggaagtgctctctggcgtggtggtcatatcgagtaaggattcagtccaacaccagggagtgtctttgaccatggaaggaactgtaaacctccagctcagtgccaaaagtgtgggtgtgtttgaagctttttataattctgttaagcctcagaaggggaagtttactcccagtcccgtggacttcacgattacacctgaaaccttacagaacgtcaaagagagagctttgcttcccaaatttctccttcgaggacatctcaactcaacaaactgtgtcatcacgcagccactaacgggagagctggtggtggagagctcggaagccgccatcagaagcgtggagctgcagctggtgcgcgtggagacgtgcgggtgtgcagaaggctatgcccgcgacgccacggagattcagaacattcagatcgccgacggggatgtgtgcaggggcctctctgtccccatctacatggtcttccctaggctgttcacctgccctacactggagaccaccaacttcaaagtggaatttgaggttaacatcgtggtgctgcttcaccctgaccacctcatcacggagaacttcccgctgaagctctgcaggatatagcccggaggagggaagcatagagaacgggagtggccatctggaaatccagctggttatccaaatcctaaggggagctacagccagcggcatatacttgtttttgtgattattctgtatcagaaatgaaacagaccctcaaattaactttccttcctcatttcttgaggcttctgcttccaacaggcacctctaatcagaccttttctttgaaattcaacaagatttcttaatgctatttgccaagaccatttcacagaaaacattgactgtggctcttgccttatctgtt

SEQ ID NO: 8807 - DNA, 1098 bp, Homo sapiens
  source 1..1098: mol_type = unassigned DNA
cagtcacgggccagcctttcccttaaggatgtctgagagctggtctcctcactcttttcttccgcctattaaactttccgcttcttaactcacccatgtgtgtccatgtcgttaatcatcttgacgagagatgatgaaccccggatatttaccccagacagtgatgccgcttcaccagcattgcactctacttccccgcttcctgatcctgcctcagcttctcctctccacagagaagaaaaaattctgcctaaagtctgcaacatcgtttcctgcctgagtttcagcctgccagcttctcctacggattctggacttgccagccccacaatcataaccagagaggggcagcaattttgggcaaaatgtctgatttggaaataccaactttacctccatgggctccacaagaaatcagatgggagaagggacaagcagataagcgcaagcccatcaacctgaaggcataaaccacatccagccacctccttctgatcagcagcaaagctgacgttttgatctccatctgtctgattcttgtgtctacttctcagtttacaactccagtgggaaagaaagagctttatttacagacccataaaaatcccatcagtgtcgtcccctgctgagaggccatgtgagaccatatggaaaaacaacagccataatggcagcatggcagtggaagggtttgtcttgtgcccaggccttgcggtcatgcaagtttcttgtggatcctgttgggaccagccactcaccaaggctgagtaggtccacaaataatggggactttctaccagactcacagagaactgctgggtttttgggaagggtgtgcgtgtctttggggcatgcaagttggggttatagtggagacccagaggatgagaaaacttctctgcctcagcagaagagtggcagctgagagagaggcaagaaactcgcacccactgtggactggggcagagagattttgaggagaatgaaatccagaaactctgtgtggtattagtttgtatccagagggtgaccctcttctcaaggaaatgggtgtcatcaattttctacactattaaagatataaagttcttggcatta

SEQ ID NO: 8808 - DNA, 2235 bp, Homo sapiens
  source 1..2235: mol_type = unassigned DNA
ctccgacccgggcttttccttcgtaccctgcggccccctccgcacccctcacggagctcctcgggtcctgccccctcccagcgcttgcccgcgccgccccgcccccgtttttaaacctggcgcgcgggtaggtgagcgcgttagcccgagtggatctaggcgcgctcgtaggccggcgccgcagcaaggggcgcgggctccgccggcaccatggagcccgaagcggcggccggagcccggaaggcgcgggggcgcggctgtcactgccccggggacgctccctggaggcctccgccaccgcgcgggccggagagccccgcgccgtggcgaccttggatccagacacctggagatgctgagctgaccagaactggaaggccgcttgaacctagggctgaccaacacacttttggatcaaagggagcctttgggtttcagcatcctgtaagagtctatttacccatgtcaaagcgtcaagaatacctgcggagttccggggagcaagtactggccagtttcccagtgcaagccacgattgacttctacgacgatgagtctactgagtctgcttccgaagctgaagagccagaggaaggacccccacccctccatcttctgccccaggaggtgggaggtcggcaggaaaatggcccagggggaaagggcagagaccagggcatcaaccaagggcagcgatcctcaggagggggtgaccactggggggagggtccgctccctcaaggtgtctcctcaaggggtggcaagtgctcctcatccaaatgaatcagtctctgtctcctgggccctgctctgggacctgcccctcacgttctcttggggacacccgagccaggacactacgcatccctgctgagtgtgcagaggctagaggcttctcgggcagcccctggcctgcacactactcatgacagaaagtcagcttttacttttctttcccctggcaattcgtttttggtgcactcatgcatgcctttgagaaaggattctaggagaaagagaaggtctatgtcaacagagttgttatctcatagagccagttttcaaagctccttctgcattgtcactcactgatcaggtgatgaattcttcctagatagtcgcccactccacctcctacttaacctgagactcattatttagctatttctgcttttgtaaaaataattcagatattaaactccaattttaatctatcatccaagggtagatgtagttgcttagtagcattttggaaaaaaaagaaaaaaaggtttggtttggttttgtgacggagttttgctcttgtctcccaggctggagtgcagtgacacaatctcggctcactgcaacctccacttcttgggttcaagtgattctcctgtctcagcctcccaagtagctgggattacaggcatgagctaccacgcctggctaattttttgtatttttagtagagactcggtttcaccatgttggtcaggctggctttgaactcctgacctcaggtgatccacccgccttggcctcccaaagtgctgggattacaggcgtgagccactgagcccggccaaaaaaaaatgtatttattaaaaaaaaatttttttaacccgccgaataattcccataagagtaacaaaaaggaccagcctgaccaacgtggagaaactctgtctctactaaaaatacaaaattagccaggcgtgatggctcatgcctgtaatcccagctactcgggaggctgaggcaggagaatggctagaacccgggaggcggaggttgccgtgagtcgagatcgcaccattgcattccagcctgggcaacaagagcgaaactccgtctcaaaaaaaaaaaaaaaaaaaaagaaagaaaagagtaacagaaagatagggatttttaggagacaattagataaaaatgtatgtgatgactgtataaggaggcctgtgtgtatgaatttatagggagtagaaccgtctctcttcttagttggtgactgtttggggcctggtattttaatagatgaacactacttttttaattttttatttttttaaccctacccttaacccatgaacactatttttaattaaagtatctgatgtaaaattattttgagtttttaatattttgataaacgtgtattcctgaaactttttgacttacttatcttacatgtggtgtcttcctgtatatagtacattatatcaatttctacttgaaataaatattttgaaa

SEQ ID NO: 8809 - DNA, 552 bp, Homo sapiens
  source 1..552: mol_type = unassigned DNA
accccaccctaatcttgttatgcaaataggcttcccacttggcaggggccgtcttgtccactcgtttctgtaaacatgggtggcaaaaagagaagatggagctgccatttagaacatgcctaatcccagcttcatcttgctgagcaaaaatgaaggagcctggacccaactttgttactgtgagaaagggtcttcattcattcaagatggcatttgttaagcacctacttctctttctgtcacctaggctggagtgcagtggttcaatcacggatcactgcagcctccacctcccagttcaagaaattctcatgtctcagcctcctgagcagctaggattacagacaaaccttggaaatcaagaaagttctggaatgatgaagctgttcatgccaagaccgaaagtgctggcccagtatgagtccattcagttcatgccgtgacaattttcttggaactcctttttattgttagttctcacttgtttccatatttagtgaatgtacatttaattgcaaagctgtcattaataaaaattcttatagtacctca

SEQ ID NO: 8810 - DNA, 534 bp, Homo sapiens
  source 1..534: mol_type = unassigned DNA
accccaccctaatcttgttatgcaaataggcttcccacttggcaggggccgtcttgtccactcgtttctgtaaacatgggtggcaaaaagagaagatggagctgccatttagaacatgcctaatcccagcttcatcttgctgagcaaaaatgaaggagcctggacccaactttgttactgtgagaaagggtcttcattcattcaagatggcatttgttaagcacctactgctggagtgcagtggttcaatcacggatcactgcagcctccacctcccagttcaagaaattctcatgtctcagcctcctgagcagctaggattacagacaaaccttggaaatcaagaaagttctggaatgatgaagctgttcatgccaagaccgaaagtgctggcccagtatgagtccattcagttcatgccgtgacaattttcttggaactcctttttattgttagttctcacttgtttccatatttagtgaatgtacatttaattgcaaagctgtcattaataaaaattcttatagtacctca

SEQ ID NO: 8811 - DNA, 1647 bp, Homo sapiens
  source 1..1647: mol_type = unassigned DNA
aaaccttccctggcatctggagggaccaccgttgccgcgtcttcggcttccacgatctgcgttcgggctacgcggccacggcggcagccactgcgactcccactgtgcctggctctgtccatattagttcccaggcggccgtcgccgttccagcagcggcagcggcagcggcagcggcggacatgttgtgaggcggcggcgcgggtgtctgaaggatggtttggccgaggcggcggcaacggctgctggcggcggcgacagcgcccgcccctctgaggagacacgaaggtggttccccagccgctcaaatttccggaccaccgcgctttcccctcctcagcctgggctgtgctctctctagaatcctcgggcccccactttcttcccaaactcatcctaaatctctcacacacgcgagtgttcccagccctcaagccagctgctcctccgttcattttctgcaccctcttcgcaaagcaccccccgggatcactctccgagggcgactttttgagaaatctcggtggagtagtggaccagagctggggagtttttaaaagccggggcgcgagaaacaggaaggtactatggcttcctcgtctggcaacgatgatgatctcactatccccagagctgctatcaataaaatgatcaaagagactcttcctaatgtccgggtggccaacgatgctcgagagctggtggtgaactgctgcactgaattcattcaccttatatcttctgaagccaatgagatttgtaacaaatcggaaaagaagaccatctcaccagagcatgtcatacaagcactagaaagtttgggatttggctcttacatcagtgaagtaaaagaagtcttgcaagagtgtaaaacagtagcattaaaaagaagaaaggccagttctcgtttggaaaaccttggcattcctgaagaagagttattgagacagcaacaagaattatttgcaaaagctagacagcaacaagcagaattggcccaacaggaatggcttcaaatgcagcaagctgcccaacaagcccagcttgctgctgcctcagccagtgcatctaatcaggcgggatcttctcaggatgaagaagatgatgatgatatctgaaattcaccagctgagtttctatttcttctataaatgtttttccctgcacaacaaaaacagtgaaagaaatgcttatctgtaattttgtatgcatcttggtggacttgtcattggtattctagggatgtctgctattaagtttcatctattgtgtgctatacatgtaaaaactgtctctttgaactattgaaaatttaaggttcagtataatatcaattttgaatttttaatggtgtttatgaaattttagatagcagcgagtccttcgtttgatcaataaacagtgttacagataacttcaagtttataaaaatacagtgaaatttctacaaagctctaaatctgcatttgcatttcctctgcccttttaactaaactaaaacttgtgaattttaaattattaaggggggggtgctgtgtgaatcagtagacattggattgggttggtgaaagagttcagttctgtagtatctgaatttgtcttttaaaatgagtacatatataggcaataaatatatatgctcagatc

SEQ ID NO: 8812 - DNA, 3242 bp, Homo sapiens
  source 1..3242: mol_type = unassigned DNA
gaacgaggcttccggtggcgcaaagggtgtcgggagcggcttcctgcaaaccttccctggcatctggagggaccaccgttgccgcgtcttcggcttccacgatctgcgttcgggctacgcggccacggcggcagccactgcgactcccactgtgcctggctctgtccatattagttcccaggcggccgtcgccgttccagcagcggcagcggcagcggcagcggcggacatgttgtgaggcggcggcgcgggtgtctgaaggatggtttggccgaggcggcggcaacggctgctggcggcggcggcagcggcagcggggcctcgggctctatagagccgagcccgctgggtacccgcccggtaccgcggcgaggccagtgcccctggatcttgcctctgctccgacgccgttggggaccagttaggcgacagcgcccgcccctctgaggagacacgaaggtggttccccagccgctcaaatttccggaccaccgcgctttcccctcctcagcctgggctgtgctctctctagaatcctcgggcccccactttcttcccaaactcatcctaaatctctcacacacgcgagtgttcccagccctcaagccagctgctcctccgttcattttctgcaccctcttcgcaaagcaccccccgggatcactctccgagggcgactttttgagaaatctcggtggagtagtggaccagagctggggagtttttaaaagccggggcgcgagaaacaggaaggtactatggcttcctcgtctggcaacgatgatgatctcactatccccagagctgctatcaataaaatgatcaaagagactcttcctaatgtccgggtggccaacgatgctcgagagctggtggtgaactgctgcactgaattcattcaccttatatcttctgaagccaatgagatttgtaacaaatcggaaaagaagaccatctcaccagagcatgtcatacaagcactagaaagtttgggatttggctcttacatcagtgaagtaaaagaagtcttgcaagagtgtaaaacagtagcattaaaaagaagaaaggccagttctcgtttggaaaaccttggcattcctgaagaagagttattgagacagcaacaagaattatttgcaaaagctagacagcaacaagcagaattggcccaacaggaatggcttcaaatgcagcaagctgcccaacaagcccagcttgctgctgcctcagccagtgcatctaatcaggcgggatcttctcaggatgaagaagatgatgatgatatctgaaattcaccagctgagtttctatttcttctataaatgtttttccctgcacaacaaaaacagtgaaagaaatgcttatctgtaattttgtatgcatcttggtggacttgtcattggtattctagggatgtctgctattaagtttcatctattgtgtgctatacatgtaaaaactgtctctttgaactattgaaaatttaaggttcagtataatatcaattttgaatttttaatggtgtttatgaaattttagatagcagcgagtccttcgtttgatcaataaacagtgttacagataacttcaagtttataaaaatacagtgaaatttctacaaagctctaaatctgcatttgcatttcctctgcccttttaactaaactaaaacttgtgaattttaaattattaaggggggggtgctgtgtgaatcagtagacattggattgggttggtgaaagagttcagttctgtagtatctgaatttgtcttttaaaatgagtacatatataggcaataaatatatatgctcagatcaatatacttgtttagaaaaacttcaagacattcaaaaactaggaaggagtatgtttaatagtatttgtataaatttggtggttatgtttttttattttgtttctgttttgtgtagaggtaaaaactatagttttattacagcataattcattttgagctccactatgacatttcaaagactgcccagtttggaagtctgtcatgatttttactctttcactccaattcagtaattgttgatagtattacttacctagtccatccatactcatattattcaaatatataggtggtacttttgaaacaattacattggttctcttggtttaactgaggtttatgaatattcaaacctttgctgggggaaagaaatgaaagttaatgagcatgcttgctatgagagagggatttttaatttaacttgtagttatagtttacttattgtttttagaattacttttacattttcccaactagatggcctagagtccaacattaccttttgagatgacattattgtctccataattgagtgatagctttaaaaaaaagattagttttgcttaagaagttatgttacaactgatcagccctatatgaattaactgatcagccctatatgaaacataagttgtgttataacttatcagccgtatatggaacataaatagtttctacctgcttgttagagaagctttaatttggttctaataaatacagtatggtagtgtttataggaatccaggatgttgaagaaatggcataatgtctatattttggaaacagaaaggaaaagtcacttaagatagtattaagtaattaaattcctatgtcagttgccaaatcttttaaacttatgtattcaccaagcccaaaaatagattgtggctcccaggattccaattttaattggagagctaagtaagtaaagttttataactgttaggtttcttaatgatcatattttgcagttttagtaaaagggaaatattgttatacatttattaaatatacttcccccatgaagtgaaaaggttaattttgctgaatgttttaagttgaagttacttcatggatgtcatacccatgaagtgcatttggatgagatagaagaaattgttttttaaaaagtttaagtaccaaaggtagtctagtctagaacgataagttaatacgtgttggcttttctaatttgtactgtaacatccttatactttctattttaagtatatctgtttcttaagtaaacaacttagatattttccacacctttttttttttttctgatgcagagttcaggttaatattttactgcatctgataatgtattatacgtttgaagcctagtgacttttcattttgacattcttgtgatttcatatgctgtattcttcaagcaataaaattgtgatgtgttttataaa

SEQ ID NO: 8813 - DNA, 2472 bp, Homo sapiens
  source 1..2472: mol_type = unassigned DNA
agaaacagtagttaggatggctgaaggggatactcaccggctgaaggccgactgtgattccccctacccccacaaggcgattttgaccccctgagggctgctctagaggactcaggccccgaagctgtcccagggaggtccccgctgcatcccaccacccaagctgtgcctcatggagtcgatgtttagcagccctgccgaggcggcgctgcagcgagagaccggggtgccaggactgcttactcctcttccggacctggacggagtgtacgagctggagcgagtcgctggatttgtccgcgacctggggtgtgaacgagttgccttgcagttccctgaccagctattgggagatgctgtggctgtggctgcacgactggaggagacgacagggtcaaagatgttcattctgggtgacacagcctacggcagctgctgcgtggatgtgctgggtgctgagcaagctggagctcaggctctcatacattttggccctgcctgcttaagccctccagcccgcccactgcccgttgccttcgtgcttcgtcaacgttctgtggccttggagctctgtgtcaaggcctttgaggcccagaacccagaccccaaagcgcctgtggtgctgctgagtgagccggcctgtgcccatgccctggaggctttggctactctcctgcgcccacggtacctggacctgctagtctccagcccagcttttccccaaccagtgggttccctgagtccagagcctatgcccctagagcgttttgggcgccgcttcccccttgccccagggaggcgtctagaagagtatggtgccttctatgtagggggctctaaggccagccctgacccagaccttgacccagacctgagtcggctgctcttggggtgggcaccaggtcaacccttctcctcctgctgtccagatacagggaagactcaggatgagggtgcccgggctggacggctaagggcacgaagacgatatctggtagagagggccagagatgcccgcgtggtagggctgctggcaggcacactgggtgtagcccaacaccgtgaggcactggcccacttgcggaacctgactcaggctgctggcaagcgtagctatgtgttggccctggggcggcccacccctgccaagcttgccaacttccctgaggtggatgtctttgtgctattagcctgtcctctgggtgctctagccccccagctttctggtagcttcttccagcctatactggcaccatgtgagctggaagctgcctgcaaccctgcctggccacctccaggcctggctccccacctcacacattatgcggacttattgcctggctctcccttccacgtggctctcccaccacctgagtcagagctgtgggaaaccccagacgtgtcactcattactggagatctccgacccccacctgcctggaagtcatcaaatgatcatggaagcttggctctgaccccacggccccagctggagctggctgagagcagtcctgcagcctcattccttagttcccggagctggcaagggctggagccccgcctgggtcagacgccagtgacagaagctgtgagtggaagacgagggattgccatcgcctatgaggatgagggaagcggctgataccatgtggggctggagacatagatggacttatgaatggctgctaggacctttagtgctccctgcaccaacctcccatccccctgccaagatccttgaaggaccctggaaggagggagagcaggcagcccttcacaggataggatccgtctctgtcctgtcctggcactggcacaagctcagcacatgcccagtaatgcgtgttgtttggctgatggaataaagggcttagggacttccctgaggcctctggacccatctgtcttcctgagggcagcccaggacctttggccaatcccagttcccaggctgcagttgagggtctgtccttgtcaaaaggcaggtgctagacagtctagaccagggtttctcaaactcgtacttgacatttggggccagataattctttgttgtggggctgtctggtgtatggtagggtgctcagcagcatccctggcctctgcccactagacatcagaagcactcccccagttgtgacaaccaaaaatatctccagaccttggcaaatgttatctgtgggggaaaattgccctcaattgagaaccactggtctagctagacctgcactgtccagtacagtagccactaaatacatgtggctaaacttaaatttaagttaattaagattaaaagctcagtttctcagtcacattagtcattcaagtgttcagacagccacatgaggggacagtgcagctacaggatatgccatcatggcagaaagttctattggttggacagcgttggtctatactgactcttatttctcagggagatcacagcaacctaaataaaccagataccttttc

SEQ ID NO: 8814 - DNA, 1738 bp, Homo sapiens
  source 1..1738: mol_type = unassigned DNA
tgaaggggatactcaccggctgaaggccgactgtgattccccctacccccacaaggcgattttgaccccctgagggctgctctagaggactcaggccccgaagctgtcccagggaggtccccgctgcatcccaccacccaagctgtgcctcatggagtcgatgtttagcagccctgccgaggcggcgctgcagcgagagaccggggtgccaggactgcttactcctcttccggacctggacggagtgtacgagctggagcgagtcgctggatttgtccgcgacctggggtgtgaacgagttgccttgcagttccctgaccagctattgggagatgctgtggctgtggctgcacgactggaggagacgacagggtcaaagatgttcattctgggtgacacagcctacggcagctgctgcgtggatgtgctgggtgctgagcaagctggagctcaggctctcatacattttggccctgcctgcttaagccctccagcccgcccactgcccgttgccttcgtgcttcgtcaacgttctgtggccttggagctctgtgtcaaggcctttgaggcccagaacccagaccccaaagcgcctgtggtgctgctgagtgagccggcctgtgcccatgccctgggctctcccttccacgtggctctcccaccacctgagtcagagctgtgggaaaccccagacgtgtcactcattactggagatctccgacccccacctgcctggaagtcatcaaatgatcatggaagcttggctctgaccccacggccccagctggagctggctgagagcagtcctgcagcctcattccttagttcccggagctggcaagggctggagccccgcctgggtcagacgccagtgacagaagctgtgagtggaagacgagggattgccatcgcctatgaggatgagggaagcggctgataccatgtggggctggagacatagatggacttatgaatggctgctaggacctttagtgctccctgcaccaacctcccatccccctgccaagatccttgaaggaccctggaaggagggagagcaggcagcccttcacaggataggatccgtctctgtcctgtcctggcactggcacaagctcagcacatgcccagtaatgcgtgttgtttggctgatggaataaagggcttagggacttccctgaggcctctggacccatctgtcttcctgagggcagcccaggacctttggccaatcccagttcccaggctgcagttgagggtctgtccttgtcaaaaggcaggtgctagacagtctagaccagggtttctcaaactcgtacttgacatttggggccagataattctttgttgtggggctgtctggtgtatggtagggtgctcagcagcatccctggcctctgcccactagacatcagaagcactcccccagttgtgacaaccaaaaatatctccagaccttggcaaatgttatctgtgggggaaaattgccctcaattgagaaccactggtctagctagacctgcactgtccagtacagtagccactaaatacatgtggctaaacttaaatttaagttaattaagattaaaagctcagtttctcagtcacattagtcattcaagtgttcagacagccacatgaggggacagtgcagctacaggatatgccatcatggcagaaagttctattggttggacagcgttggtctatactgactcttatttctcagggagatcac

SEQ ID NO: 8815 - DNA, 1596 bp, Homo sapiens
  source 1..1596: mol_type = unassigned DNA
acagtagttaggatggctgaaggggatactcaccggctgaaggccgactgtgattccccctacccccacaaggcgattttgaccccctgagggctgctctagaggactcaggccccgaagctgtcccagggaggtccccgctgcatcccaccacccaagctgtgcctcatggagtcgatgtttagcagccctgccgaggcggcgctgcagcgagagaccggggtgccaggactgcttactcctcttccggacctggacggagtgtacgagctggagcgagtcgctggatttgtccgcgacctggggtgtgaacgagttgccttgcagttccctgaccagctattgggagatgctgtggctgtggctgcacgactggaggagacgacagggtcaaagatgttcattctgggtgacacagcctacggcagaggctttggctactctcctgcgcccacggtacctggacctgctagtctccagcccagcttttccccaaccagtgggttccctgagtccagagcctatgcccctagagcgttttgggcgccgcttcccccttgccccagggaggcgtctagaagagtatggtgccttctatgtagggggctctaaggccagccctgacccagaccttgacccagacctgagtcggctgctcttggggtgggcaccaggtcaacccttctcctcctgctgtccagatacagggaagactcaggatgagggtgcccgggctggacggctaagggcacgaagacgatatctggtagagagggccagagatgcccgcgtggtagggctgctggcaggcacactgggtgtagcccaacaccgtgaggcactggcccacttgcggaacctgactcaggctgctggcaagcgtagctatgtgttggccctggggcggcccacccctgccaagcttgccaacttccctgaggtggatgtctttgtgctattagcctgtcctctgggtgctctagccccccagctttctggtagcttcttccagcctatactggcaccatgtgagctggaagctgcctgcaaccctgcctggccacctccaggcctggctccccacctcacacattatgcggacttattgcctggctctcccttccacgtggctctcccaccacctgagtcagagctgtgggaaaccccagacgtgtcactcattactggagatctccgacccccacctgcctggaagtcatcaaatgatcatggaagcttggctctgaccccacggccccagctggagctggctgagagcagtcctgcagcctcattccttagttcccggagctggcaagggctggagccccgcctgggtcagacgccagtgacagaagctgtgagtggaagacgagggattgccatcgcctatgaggatgagggaagcggctgataccatgtggggctggagacatagatggacttatgaatggctgctaggacctttagtgctccctgcaccaacctcccatccccctgccaagatccttgaaggaccctggaaggagggagagcaggcagcccttcacaggataggatccgtctctgtcctgtcctggcactggcacaagctca

SEQ ID NO: 8816 - DNA, 3052 bp, Homo sapiens
  source 1..3052: mol_type = unassigned DNA
gatgccgagcccaggccggttccggcgaagttaaaccctcggagctggcctcggactgctggggcgttaccccttcggccacccccgctgaccatggcagtgtttcatgacgaggtggaaatcgaggacttccaatatgacgaggactcggagacgtatttctatccctgcccatgtggagataacttctccatcaccaaggatcagtttgtgtgtggagaaacagtcccagccccttcagccaacaaagaattagttaaatgctgaagaagccttcaggaatccaaatcctgaacatttggaatgagcccagatagaaatatcgaatgcaaagctactggcttcacagagacaaccatttatgatttgctgttctgtaagagtgtggattctttctatcaactgctgatatcatcttcaggaagcaagtccataacatgacatatctggattttgtgcttagaaccttaaattggaagcattcttaattatgcatctaaatttaaaagaagataatttcaaaacagtgctttctttcccttggtttcatcattttcatatcttaaaccaaattacttcggtatctgacaacagcatcatctacctcagtcattaggatttcttaataaaaaagagattgtatttttgacttggttattaagattattaaaattagcccttcctttgaaatatgacatcagctttgctgttctaaatttaaaattagttgcttcatcagtaccacacttccagtttctataccaagccagtctcctcagttttcccattagaatggacatgttctgttcagcgtgtcatttctgtaatgcttcatgcagagagtttggtcatagtattaaagagaaaatacagtgaggtcacaatgtctccagagctaaaagttagtgaacaagaaagaaagtccaaaatgaagtgatgaaagaatgaggacttttcttatattctgcatattccttggaagtcaggacaagatgaaaagaaaaacatccaaaagaagtgaaattggtgacagaatgagaggagcaaagcataccagtgtagtaagtggaatgtttgaatgactttgccaggtcagagcaagtaatatttctgtatctgagtttttgtttgtgttttgataaggctaatgaaattgcattccaggtaggggttaacgtcaaatttccatggctggtagctgtgcttttggcatatcacagtgttgtgtcactactacaaggtaaagcatctacagcggagaatgagcttgaaaatgagagacctattgtgaataaatatgcccatgagagcatatttaataagcctctataacatgcagccaaaccagacattcactcctgcagagaaatgttgccctggagaaaaagaaatatataaagataggctatcacccttcttttgctgcagtactaagcatagcaagaaattagaatcatttacattggaaatttgaaaattccctttatatacacaactttactgtgtataaataaaaaatatttattaatgcagtgatgtccgtcaggttgttttaggaatggcttctgcaattagaaaaatagcttgctagaatgtaaatgttctgttactggtaaatgtactgcacacattcattggacgttaaaacaagtgagtagccttttttacctgccagcagcatggctgtgtgcagccactaggctgagacaataaattaccaaaaattataatgtaccgagctgaaaatgctcagtacattatgtggcatattctggatgtgatgagaaatctcattgccatttgggacactgacatcccagaagtaatccacaactgctttgcaaaagcaaagtgactgctcagatgaacagagcagagtactcactcactatggtggcatcagctgcaaagcaaaatgaactgtcccatgatcatgttgatggttttctagatactgccaacatgttagctctttctgatgctgatgagtttcaaacacgaacagacacccttgatgtgggtttgctaagaacatagaagaacaggaagaaaagttgccaggttcacacatcccaggaaaaaagaagcataaaaagcattagcagtcagtgactgatgataatgctgcaataatgggaatggttttgtttctaaaccaaattatttctaaatcaaatcatttattgctttgtttctaaagcaattgagtcactaagtttgtgaactgtaggagaacacatcaagattgaatcctgtgttaagcagaaggtaaaaccagagccaggcgcagtggctcgtgcctgtaatcccagctactcaggaagctaaggcaggaggatcatgtgaggccaggagttcaagactagcctgggcaacatagaaagaccctgtctctaaaaaatcttcttttaattagcaaggtgtggggccttgagcaaattgcttgggcccaggagtttgaggctgtggtgagctgtgatcacaccactgcgttccagcctgtgtgacagggcaagacctcatgcctaaaaaataaagagaaagcagagtaaaactggactctgagatacgactaaagttctgtgtgatacgtgtgccttatttagctcaagacattcctggagcacctataaaaactgacttgtaatccaggctatgtctctttttagcttcgtaatctttggcaaggccattggattcttcagctgtacaattaggagactcgatcaggtgattgcctttctcagctgtcagttctctaatttcaggcttggtagcttgtaggaactgaaattgcaattaaaacctttataaactcaaactaaatcatgaattacagaaaaagtccattcttccaaaacttgatgttaccacacttacaagtttaaaatatgaagtcgactgtttaaaggattctgcatatattctagtgtgcacattcagaaacatttttcttggaaaaagtacccaacattttttataactgcacatattaatttattgccagaataaattgcattgcatgctaaataaagtcagataattcaaatcc

SEQ ID NO: 8817 - DNA, 3131 bp, Homo sapiens
  source 1..3131: mol_type = unassigned DNA
gatgatgccgagcccaggccggttccggcgaagttaaaccctcggagctggcctcggactgctggggcgttaccccttcggccacccccgctgaccatggcagtgtttcatgacgaggtggaaatcgaggacttccaatatgacgaggactcggagacgtatttctatccctgcccatgtggagataacttctccatcaccaaggaagatttggagaatggggaagacgtggcaacgtgtcctagctgctctctcattataaaagtgatttatgacaaagatcagtttgtgtgtggagaaacagtcccagccccttcagccaacaaagaattagttaaatgctgaagaagccttcaggaatccaaatcctgaacatttggaatgagcccagatagaaatatcgaatgcaaagctactggcttcacagagacaaccatttatgatttgctgttctgtaagagtgtggattctttctatcaactgctgatatcatcttcaggaagcaagtccataacatgacatatctggattttgtgcttagaaccttaaattggaagcattcttaattatgcatctaaatttaaaagaagataatttcaaaacagtgctttctttcccttggtttcatcattttcatatcttaaaccaaattacttcggtatctgacaacagcatcatctacctcagtcattaggatttcttaataaaaaagagattgtatttttgacttggttattaagattattaaaattagcccttcctttgaaatatgacatcagctttgctgttctaaatttaaaattagttgcttcatcagtaccacacttccagtttctataccaagccagtctcctcagttttcccattagaatggacatgttctgttcagcgtgtcatttctgtaatgcttcatgcagagagtttggtcatagtattaaagagaaaatacagtgaggtcacaatgtctccagagctaaaagttagtgaacaagaaagaaagtccaaaatgaagtgatgaaagaatgaggacttttcttatattctgcatattccttggaagtcaggacaagatgaaaagaaaaacatccaaaagaagtgaaattggtgacagaatgagaggagcaaagcataccagtgtagtaagtggaatgtttgaatgactttgccaggtcagagcaagtaatatttctgtatctgagtttttgtttgtgttttgataaggctaatgaaattgcattccaggtaggggttaacgtcaaatttccatggctggtagctgtgcttttggcatatcacagtgttgtgtcactactacaaggtaaagcatctacagcggagaatgagcttgaaaatgagagacctattgtgaataaatatgcccatgagagcatatttaataagcctctataacatgcagccaaaccagacattcactcctgcagagaaatgttgccctggagaaaaagaaatatataaagataggctatcacccttcttttgctgcagtactaagcatagcaagaaattagaatcatttacattggaaatttgaaaattccctttatatacacaactttactgtgtataaataaaaaatatttattaatgcagtgatgtccgtcaggttgttttaggaatggcttctgcaattagaaaaatagcttgctagaatgtaaatgttctgttactggtaaatgtactgcacacattcattggacgttaaaacaagtgagtagccttttttacctgccagcagcatggctgtgtgcagccactaggctgagacaataaattaccaaaaattataatgtaccgagctgaaaatgctcagtacattatgtggcatattctggatgtgatgagaaatctcattgccatttgggacactgacatcccagaagtaatccacaactgctttgcaaaagcaaagtgactgctcagatgaacagagcagagtactcactcactatggtggcatcagctgcaaagcaaaatgaactgtcccatgatcatgttgatggttttctagatactgccaacatgttagctctttctgatgctgatgagtttcaaacacgaacagacacccttgatgtgggtttgctaagaacatagaagaacaggaagaaaagttgccaggttcacacatcccaggaaaaaagaagcataaaaagcattagcagtcagtgactgatgataatgctgcaataatgggaatggttttgtttctaaaccaaattatttctaaatcaaatcatttattgctttgtttctaaagcaattgagtcactaagtttgtgaactgtaggagaacacatcaagattgaatcctgtgttaagcagaaggtaaaaccagagccaggcgcagtggctcgtgcctgtaatcccagctactcaggaagctaaggcaggaggatcatgtgaggccaggagttcaagactagcctgggcaacatagaaagaccctgtctctaaaaaatcttcttttaattagcaaggtgtggggccttgagcaaattgcttgggcccaggagtttgaggctgtggtgagctgtgatcacaccactgcgttccagcctgtgtgacagggcaagacctcatgcctaaaaaataaagagaaagcagagtaaaactggactctgagatacgactaaagttctgtgtgatacgtgtgccttatttagctcaagacattcctggagcacctataaaaactgacttgtaatccaggctatgtctctttttagcttcgtaatctttggcaaggccattggattcttcagctgtacaattaggagactcgatcaggtgattgcctttctcagctgtcagttctctaatttcaggcttggtagcttgtaggaactgaaattgcaattaaaacctttataaactcaaactaaatcatgaattacagaaaaagtccattcttccaaaacttgatgttaccacacttacaagtttaaaatatgaagtcgactgtttaaaggattctgcatatattctagtgtgcacattcagaaacatttttcttggaaaaagtacccaacattttttataactgcacatattaatttattgccagaataaattgcattgcatgctaaataaagtcagataattcaaatcca

SEQ ID NO: 8818 - DNA, 1143 bp, Homo sapiens
  source 1..1143: mol_type = unassigned DNA
cgcttttgcagttgcttctgcggaaaggtggtagttaagaatttgtaaaggccagagaactacctacgattctctcagcggtctctcttctcctcaagtttgaaatgctttatctcatcgggttgggcctgggagatgccaaggacatcacagtcaagggcctggaagttgttagacgctgcagtcgagtgtatctggaagcctacacctcagtcctaactgtagggaaggaagccttggaagagttttatggaagaaaattggttgttgctgatagagaagaagtggaacaagaagcagataatattttaaaggatgctgatatcagtgatgttgcattccttgtggttggtgatccatttggggccacaacacacagtgatcttgttctaagagcaacaaagctgggaattccttatagagttattcacaatgcctccataatgaatgctgtaggctgctgtggtttacagttatataagtttggagagacagtttctattgttttttggacagacacttggagaccagaaagcttctttgacaaagtgaagaagaacagacaaaatggcatgcacacattatgtttactagacatcaaagtaaaggagcagtctttggaaaatctaatcaagggaaggaagatctatgaacctccacggtatatgagtgtaaaccaagcagcccagcagcttctggagattgttcaaaatcaaagaatacgaggagaagaaccagttaccgaggagacactttgtgttggcttagccagggttggagccgacgaccagaaaattgcagcaggcactttaaggcaaatgtgcactgtggacttgggagaaccattgcattccttgatcatcacaggaggcagcatacatccaatggagatggagatgctaagtctgttttccataccagaaaatagctcagaatctcaaagcatcaatggactttgaacatagatatttaccattgtctgatgtaaatttcagccatatatggattgatatggtttggatgtatccccacccaagtctcatcttgaattttaatcctcataattcccaggtgttgtggtaggtaattgaatcatgggggcagtttccctcatgctattctcatgatagtgagctttcatga

SEQ ID NO: 8819 - DNA, 1316 bp, Homo sapiens
  source 1..1316: mol_type = unassigned DNA
cggagccggcgcttttgcagttgcttctgcggaaaggtggtagttaagaatttgtaaaggccagagaactacctacgattctctcagcggtctctcttctcctcaagtttgaaatgctttatctcatcgggttgggcctgggagatgccaaggacatcacagtcaagggcctggaagttgttagacgctgcagtcgagtgtatctggaagcctacacctcagtcctaactgtagggaaggaagccttggaagagttttatggaagaaaattggttgttgctgatagagaagaagtggaacaagaagcagataatattttaaaggatgctgatatcagtgatgttgcattccttgtggttggtgatccatttggggccacaacacacagtgatcttgttctaagagcaacaaagctgggaattccttatagagttattcacaatgcctccataatgaatgctgtaggctgctgtggtttacagttatataagtttggagagacagtttctattgttttttggacagacacttggagaccagaaagcttctttgacaaagtgaagaagaacagacaaaatggcatgcacacattatgtttactagacatcaaagtaaaggagcagtctttggaaaatctaatcaagggaaggaagatctatgaacctccacggtatatgagtgtaaaccaagcagcccagcagcttctggagattgttcaaaatcaaagaatacgaggagaagaaccagcagttaccgaggagacactttgtgttggcttagccagggttggagccgacgaccagaaaattgcagcaggcactttaaggcaaatgtgcactgtggacttgggagaaccattgcattccttgatcatcacaggaggcagcatacatccaatggagatggagatgctaagtctgttttccataccagaaaatagctcagaatctcaaagcatcaatggactttgaacatagatatttaccattgtctgatgtaaatttcagccatatatggattgatatggtttggatgtatccccacccaagtctcatcttgaattttaatcctcataattcccaggtgttgtggtaggtaattgaatcatgggggcagtttccctcatgctattctcatgatagtgagctttcatgagatctgatggttttataagtgcctggcatttcccctactggctctcattctcactcttgccgccctgtgaagaggtgccttccaccgtgattgttaagtttcctgaggccttcccagccatgtggaactgtgagtcgaaaattaaacctcttttataatta

SEQ ID NO: 8820 - DNA, 1162 bp, Homo sapiens
  source 1..1162: mol_type = unassigned DNA
cggagccggcgcttttgcagttgcttctgcggaaaggtggtagttaagaatttgtaaaggccagagaactacctacgattctctcagcggtctctcttctcctcaagtttgaaatgctttatctcatcgggttgggcctgggagatgccaaggacatcacagtcaagggcctggaagttgttagacgctgcagtcgagtgtatctggaagcctacacctcagtcctaactgtagggaaggaagccttggaagagttttatggaagaaaattggttgttgctgatagagaagaagtggaacaagaagcagataatattttaaaggatgctgatatcagtgatgttgcattccttgtggttggtgatccgacagacacttggagaccagaaagcttctttgacaaagtgaagaagaacagacaaaatggcatgcacacattatgtttactagacatcaaagtaaaggagcagtctttggaaaatctaatcaagggaaggaagatctatgaacctccacggtatatgagtgtaaaccaagcagcccagcagcttctggagattgttcaaaatcaaagaatacgaggagaagaaccagcagttaccgaggagacactttgtgttggcttagccagggttggagccgacgaccagaaaattgcagcaggcactttaaggcaaatgtgcactgtggacttgggagaaccattgcattccttgatcatcacaggaggcagcatacatccaatggagatggagatgctaagtctgttttccataccagaaaatagctcagaatctcaaagcatcaatggactttgaacatagatatttaccattgtctgatgtaaatttcagccatatatggattgatatggtttggatgtatccccacccaagtctcatcttgaattttaatcctcataattcccaggtgttgtggtaggtaattgaatcatgggggcagtttccctcatgctattctcatgatagtgagctttcatgagatctgatggttttataagtgcctggcatttcccctactggctctcattctcactcttgccgccctgtgaagaggtgccttccaccgtgattgttaagtttcctgaggccttcccagccatgtggaactgtgagtcgaaaattaaacctcttttataatt

SEQ ID NO: 8821 - DNA, 609 bp, Homo sapiens
  source 1..609: mol_type = unassigned DNA
gacatcaaagtaaaggagcagtctttggaaaatctaatcaacagttaccgaggagacactttgtgttggcttagccagggttggagccgacgaccagaaaattgcagcaggcactttaaggcaaatgtgcactgtggacttgggagaaccattgcattccttgatcatcacaggaggcagcatacatccaatggagatggagatgctaagtctgttttccataccagaaaatagctcagaatctcaaagcatcaatggactttgaacatagatatttaccattgtctgatgtaaatttcagccatatatggattgatatggtttggatgtatccccacccaagtctcatcttgaattttaatcctcataattcccaggtgttgtggtaggtaattgaatcatgggggcagtttccctcatgctattctcatgatagtgagctttcatgagatctgatggttttataagtgcctggcatttcccctactggctctcattctcactcttgccgccctgtgaagaggtgccttccaccgtgattgttaagtttcctgaggccttcccagccatgtggaactgtgagtcgaaaattaaacctcttttataatt

SEQ ID NO: 8822 - DNA, 1312 bp, Homo sapiens
  source 1..1312: mol_type = unassigned DNA
cggagccggcgcttttgcagttgcttctgcggaaaggtggtagttaagaatttgtaaaggccagagaactacctacgattctctcagcggtctctcttctcctcaagtttgaaatgctttatctcatcgggttgggcctgggagatgccaaggacatcacagtcaagggcctggaagttgttagacgctgcagtcgagtgtatctggaagcctacacctcagtcctaactgtagggaaggaagccttggaagagttttatggaagaaaattggttgttgctgatagagaagaagtggaacaagaagcagataatattttaaaggatgctgatatcagtgatgttgcattccttgtggttggtgatccatttggggccacaacacacagtgatcttgttctaagagcaacaaagctgggaattccttatagagttattcacaatgcctccataatgaatgctgtaggctgctgtggtttacagtatataagtttggagagacagtttctattgttttttggacagacacttggaccagaaagcttctttgacaaagtgaagaagaacagacaaaatggcatgcacacattatgtttactagacatcaaagtaaaggagcagtctttggaaaatctaatcaagggaaggaagatctatgaacctccacggtatatgagtgtaaaccaagcagcccagcagcttctggagattgttcaaaatcaaagaatacgaggagaagaaccagcagttaccgaggagacactttgtgttggcttagccagggttggagccgacgaccagaaaattgcagcaggcactttaaggcaaatgtgcactgtggacttgggagaaccattgcattccttgatcatcacaggaggcagcatacatccaatggagatggagatgctaagtctgttttccataccagaaaatagctcagaatctcaaagcatcaatggactttgaacatagatatttaccattgtctgatgtaaatttcagccatatatggattgatatggtttggatgtatccccacccaagtctcatcttgaattttaatcctcataattcccaggtgttgtggtaggtaattgaatcatgggggcagtttccctcatgctattctcatgatagtgagctttcatgagatctgatggttttataagtgcctggcatttcccctactggctctcattctcactcttgccgccctgtgaagaggtgccttccaccgtgattgttaagtttcctgaggccttcccagccatgtggaactgtgagtcgaaaattaaacctcttttataatt

SEQ ID NO: 8823 - DNA, 1034 bp, Homo sapiens
  source 1..1034: mol_type = unassigned DNA
ccggcgcttttgcagttgcttctgcggaaaggtggtagttaagaatttgtaaaggccagagaactacctacgattctctcagcgggtaattggctgctcctagtctctcttctcctcaagtttgaaatgctttatctcatcgggttgggcctgggagatgccaaggacatcacagtcaagggcctggaagttgttagacgctgcagtcgagtgtatctggaagcctacacctcagtcctaactgtagggaaggaagccttggaagagttttatggaagaaaattggttgttgctgatagagaagaagtggaacaagaagcagataatattttaaaggatgctgatatcagtgatgttgcattccttgtggttggtgatccatttggggccacaacacacagtgatcttgttctaagagcaacaaagctgggaattccttatagagttattcacaatgcctccataatgaatgctgtaggctgctgtggtttacagttatataagtttggagagacagtttctattgttttttggacagacacttggagaccagaaagcttctttgacaaagtgaagaagaacagacaaaatggcatgcacacattatgtttactagacatcaaagtaaaggagcagtctttggaaaatctaatcaagggaaggaagatctatgaacctccacggtatatgagtgtaaaccaagcagcccagcagcttctggagattgttcaaaatcaaagaatacgaggagaagaaccagcagttaccgaggagacactttgtgttggcttagccagggttggagccgacgaccagaaaattgcagcaggcactttaaggcaaatgtgcactgtggacttgggagaaccattgcattccttgatcatcacaggaggcagcatacatccaatggagatggagatgctaagtctgttttccataccagaaaatagctcagaatctcaaagcatcaatggactttgaacatagatatttaccattgtctgatgtaaatttcagccatatatggattg

SEQ ID NO: 8824 - DNA, 4870 bp, Homo sapiens
  source 1..4870: mol_type = unassigned DNA
ccctaagtggccgctccgggcgccttctccctgccccgccgcgtctcgcctgcgcgggctccaagcgcagccttaacaggctccgaaacttgaatcagcgccccgatcccgagagggctcttccttcggccccatcactcccacaatggaagggcggccgcctccggaaggccgtccgcccccgcgtcctcgcaccggccgagccccgcgcgggcgccgaagagctgtttttgcagcagtgttgcactggagccatataacacacctctttgaaaatgaccgtcatttttctcacctctcaacattggaaagggagatggcttttcgcactgaaatgggactatattattcctatttcaagactattgtggaagcaccctcatttttgaatggagtatggatgattatgaatgataaactgactgaatacccccttgtcattaatacattaaaaagattcaatctttaccctgaggtaattttggccagttggtaccggatttataccaaaataatggacttgattggtattcaaaccaagatatgttggacggttaccagaggagaaggactcagtcctattgaaagctgtgaaggattgggagatcctgcttgcttttatgttgctgtaatttttattttaaatggactaatgatggcattattcttcatatatggcacatatttaagtggcagccgattaggaggcctggttacagtgttgtgcttctttttcaatcatggagagtgtacccgtgtaatgtggacaccacctctccgtgaaagcttctcatatccatttcttgttcttcagatgttgctagtgactcatattctcagggctacaaaactttatagaggaagcttgattgcactctgcatttccaatgtatttttcatgcttccttggcagtttgctcagtttgtacttcttactcagattgcatcattatttgcagtatatgttgtcgggtacattgatatatgtaaattacggaagatcatttatatacacatgatttctcttgcactttgttttgttttgatgtttgggaactcaatgttattaacttcttattatgcttcttctttggtaattatttggggtattctggcaatgaaaccacatttcctgaaaataaatgtatctgaacttagtttatgggttattcaaggatgtttttggttatttggaactgtcatacttaaatacttgacatctaaaatttttggtattgcagatgacgctcatattggcaacttactaacatcaaaattctttagttataaggattttgatactttattgtatacctgtgcagcggagtttgactttatggaaaaagagactccactgagatacacaaagacattattgcttccagttgttcttgtagtgtttgttgctattgttagaaagattattagtgatatgtggggtgtcttagctaaacaacagacacatgtaagaaaacaccagtttgatcatggagagctggtttaccatgcattgcaattgttagcatatacagcccttggtattttaattatgagactaaaactcttcttgacaccacacatgtgtgttatggcatcactgatctgctcaagacagctatttggatggctcttttgcaaagtacatcctggtgctattgtgtttgctatattagcagcaatgtcaatacaaggttcagcaaatctgcaaacccagtggaatattgtaggggagttcagcaatttgccccaagaagaacttatagaatggatcaaatatagtactaaaccagatgcagtgtttgcgggtgccatgcccacgatggcaagtgttaagctctctgcacttcggcccattgtgaatcatccacattatgaagacgcaggcttgagagccagaacaaaaatagtatactcaatgtatagtcggaaagcagccgaagaagtgaagcgagaactgataaagttaaaagtgaactattacattctagaagagtcatggtgtgtaagaagatccaagcctggttgcagtatgcctgaaatttgggatgtagaagatcctgccaatgctgggaaaactcccttatgtaacctcttggtgaaggattccaaacctcacttcaccactgtattccagaacagtgtttacaaagtcctagaagttgtaaaagaatgactgctacatgacctgctgcctacggagaactacatctgtaatggttttaatgttttgctaagtcatgtgttgttcatatcccaaaaacttttataggtaactgttttcaaatagaaaacgttttatttggtcaatttgaatgtcattctaattataaaaatgacttacacctttatcaattggttactatttcaatgcaccctttaaaatttgctatgcaaatgagtatatgcttgtacttgactttaatatttgtgctaaagtgagcaaagctacctgtataaagaaaacacagtgggttgtgacaaggatgacatgaaaatacaggacaattctgacaatgtaggggctgattttatagtgtaagaactattaatgccccttgcttcttttttctgcctcttgctcttgtcttttggacatttcagtgattgtaagttcttcggtcatgtcagcccctgtcatcaacttgagttacagtagatggggcagacatggagtgtttgctatatagaactatctgtttgttttacttccttgtgcgctttttgttctctgttctcttgttaatgaagcttttcctgcccattattaatccaaactcttggaccttgtggttaggaaattcccttaacttccagccatatggcattatcgtgtctctttctctctctctcttgctctctctcttctcctcttccccatattttctgtcaaataagtactgtttactcatttagttgcttatcaagtacttattcttggttttaaaaaaaattaatggtaactgtatttttctcatttttagcattattcaaatgtttatattttaatacctttaaaccactttaaagttttttcatgtttaattatagttttaagaaaaactattttgaacaaccccaaatatagtgcatctagaaactaatgtatatttgattagacatcatttatagtggaacagtagactgtagtacatggtaatttttcttttactattaagatacaataaaacatgactaattttgctgtcaaaaatgtaaagaataatgataaatggagtttttatattttacttttaagattgcctgtctttaataagacaaagccttaagccttatgttataattttggttctaaaaaccatcatttcagtataaggaataagtatatttcgtcctcctctttagtttttttcttcctatttatttttattttgaaaaatttctacaccttctttgaattccttgtatgaatttttgtttcttagaagttaatttgtgtgaaatgagattcttcaaaacgatgaaacctcatagctctgagaaaaggttttagggttttaaattctaagcaaagcgtgactatggctgacagactacacatttaattatacagcttctctttcttaaccacaggcagattaacctcattgtggattgtccttcagaccttagtcctcaggcatggtttctggtgcccactcctggaagccgctgttccctttctaccttcttaccagagcccaagggcaggcctggtcccggggaagcagcagcttgctgacataagtcagctgcaaaggctgaggagtgtgccctcagagaagcaccgccccccagtcttgtgccagcgcctagagccgcagctcccagggatgctccttccctggaggcagcccaggagagggactctggcagcgttcttcagatttgtggccactgtttctcatttgctggttgactgtttttatttcttaggcttttgctagttttagaaaatagggaagcagcccttgatttgtggattaaaagcaacatttgagcgatgatgcacaacagtccaggaaaatgggcggtggacacttgaggctgaggatgggagttgacatgagcagggagagggaggtgcgcgctgcttatctgtgattgttgctcacctgagtgtggctgattgtgtacatccagcagttacaatttttaaaaattatacttttacatttattttatatttttctcacccccagtaatttccttccaaagaagttcacatgtaataagtagaaattctgtataggaaaaaagcattaaaaatactattataactgcttcatttgctgggaaccattaaaagtaatataaattagctttttccagaaggatccttttgtagcagtgtttatgaatgtaacccccagcaaaatatggctatatattaggggagccagtttggagcagaggcctgaaggtccctgctatgcagccgtggccacagctcgcagcccaagcactgtggagcatccacacctttgatggcaatgcagattggtagcaggttccataggcgtacaaaacagtattaaagctcagtgttttgcatattgttagcatttacaaatatttttgctttagtatgaggaaagtaaggatgggcaaagaagcgatcaaaatagctattgctacaacattttcgaaaacaaagttggggctgtatttctttaaaaagataagcctctaaaaatgcttggcaaaaaaaatatagtgttaaaataggccagtgatattaatgagaaaatgaaagtatgtatcaggaataaagtgatattgcataggagtattgtatttttatgaattttatgccagttgtttacatgtactatatatgttaaattaaaaaaaatcatgagtaatgagggaa

SEQ ID NO: 8825 - DNA, 652 bp, Homo sapiens
  source 1..652: mol_type = unassigned DNA
ggaatgtttcaaaaggatatgatgaactgaggcttatcgagtcagggagcagaaagctgaaataagaccgctaagctctaaacaaatccgttaaagcttcacagggcagagccagaacaaaaatagtatactcaatgtatagtcggaaagcagccgaagaagtgaagcgagaactgataaagttaaaagtgaactattacattctagaagagtcatggtgtgtaagaagatccaagcctggttgcagtatgcctgaaatttgggatgtagaagatcctgccaatgctgggaaaactcccttatgtaacctcttggtgaaggattccaaacctcacttcaccactgtattccagaacagtgtttacaaagtcctagaagttgtaaaagaatgactgctacatgacctgctgcctacggagaactacatctatgactagacattcactttgcaaataattgttgtgactctatgtttgctccagacacagagcttttattgtcacccaaagatgcctatgggaaccaaaagaatcaagctgaaccaagatttctgccagaatcaatttcctcaagccagaaggctttatcattcagtctgtgcaacggatttttttttaaataaaaacagacttctttgttgatttctcccttt

SEQ ID NO: 8826 - DNA, 4060 bp, Homo sapiens
  source 1..4060: mol_type = unassigned DNA
gcgaatggcttccaacgcatgcgccccaccccacatttcacagtcgccatgacgaccgggaggtccgcaacggctgcggggacaagtccgttgaggctgccaggcgagtcaggtctctctggacctcgcctgactcggctgggctgtgcctgaaattgacccagctccaccatactccttgattatgagaaaacaaggagtaagctcaaagcggctgcaatcttccggccgcagccagtctaaggggcggcgcggggcctccctcgcccgggagccggaggtagaggaggagatggaaaagtcggccctaggcggcgggaaactgccaaggggctcctggaggtcctccccggggaggatccaaagtctgaaagagcgaaaaggcttggagctagaggtggtggccaagacctttcttctcggccccttccagttcgtccgtaattccctggcgcagctccgggaaaaggtgcaggaactgcaggcgcggcggttctccagcagaaccactctcggcatcgctgtctttgtggcaattttacattggttacatttagtaacactttttgaaaatgatcgtcatttctctcacctctcatctttggaacgggagatgacttttcgcactgaaatgggactttattattcatacttcaagaccattattgaagcaccttcgtttttggaaggactgtggatgattatgaatgacaggcttactgaatatcctcttataattaatgcaataaaacgcttccatctttatccagaggtaatcatagcctcctggtattgcacattcatgggaataatgaatttatttggactagaaactaagacctgctggaatgtcaccagaatagaacctcttaatgaagttcaaagctgtgaaggattgggagatcctgcttgcttttatgttggtgtaatctttattttaaatggactaatgatgggattgttcttcatgtatggagcatacctgagtgggactcaactgggaggtcttattacagtactgtgcttctttttcaaccatggagaggccacccgtgtgatgtggacaccacctctccgtgaaagtttttcctatcctttccttgtacttcagatgtgtattttaactttgattctcaggacctcaagcaatgatagaaggcccttcattgcactctgtctttccaatgttgcttttatgcttccctggcaatttgctcagtttatactttttacacagatagcatcattatttcccatgtatgttgtgggatacattgaaccaagcaaatttcagaagatcatttatatgaacatgatttcagttacccttagtttcattttgatgtttggaaattcaatgtacttatcttcttattattcttcatctttgttaatgacgtgggcaataattctaaagagaaatgaaattcaaaaactgggagtatctaaactcaacttttggctaattcaaggtagtgcctggtggtgtggaacaatcattttgaaatttctgacatctaaaatcttaggcgtttcagaccacattcgcctgagtgatcttatagcagccagaatcttaaggtatacagattttgatactttaatatatacctgtgctcccgaatttgacttcatggaaaaagcgactccgctgagatacacaaagacattattgcttccagttgttatggtgattacatgttttatctttaaaaagactgttcgtgatatttcatatgttttagctacaaacatttatctaagaaaacagctccttgaacacagtgagctggcttttcacacattgcagttgttagtgtttactgcccttgccattttaattatgaggctaaagatgtttttgacaccgcacatgtgtgttatggcttccttgatatgctctcgacagctctttggctggctttttcgcagagttcgttttgagaaggttatctttggcattttaacagtgatgtcaatacaaggttatgcaaacctccgtaatcaatggagcataataggagaatttaataatttgcctcaggaagaacttttacagtggatcaaatacagtaccacatcagatgctgtctttgcaggtgccatgcctacaatggcaagcatcaagctgtctacacttcatcccattgtgaatcatccacattacgaagatgcagacttgagggctcggacaaaaatagtttattctacatatagtcgaaaatctgccaaagaagtaagagataaattgttggagttacatgtgaattattatgttttagaagaggcatggtgtgttgtgagaactaagcctggttgcagtatgcttgaaatctgggatgtggaagacccttccaatgcagctaaccctcccttatgtagcgtcctgctcgaagacgccaggccttacttcaccacagtatttcagaatagtgtgtacagagtattaaaggttaactgagaaggatactacccattttactatggcacaatgccgtgtgtcaaaaacaatcaccctttggcttattcacattaataaaaatcacaagctttaataacagacacttaaaaataagataaaaatggattggaaatttttctgattactaaaaggtaaattacttttctgttcattgaatgtcagccttattaagcttgtcatataagttattaaatcattcatgtcatactgcataaacaaatgttcatttcagaattttaaagagaaatgtatataaaagaacaatgaattttaataaatcaggggtatgtaagtcctttttcatccaactaggtgaattgcttcagattttctctagtaccagagggtacctcctcaaactctttgaaccacttaaggcagaagaatgcaagctctgaaatgacatccttaaaatgctgatactggtcacagcctctttacctctgtgaggaaattgtaacagtgtgtcttttaaggtgtttttattttaccagcccttaagaaagatctctaataccttttaatacttttttttaataatttcaagttgaagtgtttttaaaaacactttgttttgtaatgttttgaatctcttgagatgtgtttaccccactagatacatatttgccactggttagttctccatctaagctcaagaggttattcatctctctttagattccagtggcttttcttttaacatccaggtaaaacagaaactgctatggtatacaaccaagttttggggttaaacataatcagaaaagaaaatccagttaaatttatgaagtgagattttcagatcctagatcttgaataaaggaaaggtcttttcatcttgatggccccaaagcttgttggtcatggtctttatttctggccactatcttcttaaataatatatttttaagccctcatttatttttggttttgggtgaggaaagtcatgttttctaagtcctctcccctaataaaacctacccaacaatagtgctttgaaaagtggtagttatcttgaagatactcttgccaaatgcaaagataaacattctttttgtctgctttataaatatgaaatatgccagatctatagtattttaatgtgcatctactttaaatgagtcatcttggggtttttataattcccttatgttcttgcccctctacacttgaaataacaaaatgccttaattttatggattagttctcttatagtagacaggcagctatatgcagcaaaaccaataaagttatttttcaactttcatagttgtaaaatatcttataacagaatacaaaacagctaagaaaacatgccacattttattttagcattttcaaataatttgtttttggtgtaagcacaggataaaaaaggagagcgtcaaagaaaagagacataacacctaacattcataaaaattaacaaagtatattttggatgatgtttttacaggaaatattttaaataagttggtagaacttttaaaatggtactgtattagctaataaaatattcagtacaaatatatgtttggatttatgcattaaaaaactaataaaattatttccaacttt

SEQ ID NO: 8827 - DNA, 1339 bp, Homo sapiens
  source 1..1339: mol_type = unassigned DNA
tacactgtatatataggttgaatagaaggtcatcctattcatttattaatgagaggtacaatctctagggatctgtaaaatctattttgtcttaaccaaagaacaaatttttgacatatcttgaataggatgactataaattatgacttttaaattgttgtaatttttgtactattatctgatatttttatttttatgtattttcgtaagtagtttagagatagtcacattttaaaaatctaagatcaagcaaatgaagcttatttttatgtattcatagtataaaagaccttcagtaaataggtaatatttttgttttattctagaaaacagctccttgaacacagtgagctggcttttcacacattgcagttgttagtgtttactgcccttgccattttaattatgaggctaaagatgtttttgacaccgcacatgtgtgttatggcttccttgatatgctctcgacagctctttggctggctttttcgcagagttcgttttgagaaggttatctttggcattttaacagtgatgtcaatacaaggttatgcaaacctccgtaatcaatggagcataataggagaatttaataatttgcctcaggaagaacttttacagtggatcaaatacagtaccacatcagatgctgtctttgcaggtgccatgcctacaatggcaagcatcaagctgtctacacttcatcccattgtgaatcatccacattacgaagatgcagacttgagggctcggacaaaaatagtttattctacatatagtcgaaaatctgccaaagaagtaagagataaattgttggagttacatgtgaattattatgttttagaagaggcatggtgtgttgtgagaactaagcctggttgcagtatgcttgaaatctgggatgtggaagacccttccaatgcagctaaccctcccttatgtagcgtcctgctcgaagacgccaggccttacttcaccacagtatttcagaatagtgtgtacagagtattaaaggttaactgagaaggatactacccattttactatggcacaatgccgtgtgtcaaaaacaatcaccctttggcttattcacattaataaaaatcacaagctttaataacagacacttaaaaataagataaaaatggattggaaatttttctgattactaaaaggtaaattacttttctgttcattgaatgtcagccttattaagcttgtcatataagttattaaatcattcatgtcatactgcataaacaaatgttcatttcagaattttaaagagaaatgtatataaaagaacaatgaattttaataaatcaggggtatgtaagtc

SEQ ID NO: 8828 - DNA, 505 bp, Homo sapiens
  source 1..505: mol_type = unassigned DNA
cccaatgaagcgcgtgaagggcaagcggtgatgggttctgcgccagtggggctgggagcccgtccggggctgtacatggggctgcgcgcaagtcgccatgacgaccgggaggtccgcaacggctgcggggacaagtccgttgaggctgccaggcgagtcaggtctctctggacctcgcctgactcggctgggctgtgcctgaaattgacccagctccaccatactccttgattatgagaaaacaaggagtaagctcaaagcggctgcaatcttccggccgcagccagtctaaggggcggcgcggggcctccctcgcccgggagccggaggtagaggaggagatggaaaagtcggccctaggcggcgggaaactgccaaggggctcctggaggtcctccccggggaggatccaaagtctgaaagagcgaaaaggcttggagctagaggtggtggccaagacctttcttctcggccccttccagttcgtccgtaattccctggcgca

SEQ ID NO: 8829 - DNA, 1824 bp, Homo sapiens
  source 1..1824: mol_type = unassigned DNA
gttgacgccccccagcccctcatttccacaaagctccgcggcggttctgccctccttgtacccgcggcgcgctgcggcccgtggcgcggccccgttcccgcctagccccgtcggcctccttcccctcccggagccgcgcgtgaggacggctgaggccgcaggagtgatttggagaacaatgcatgtaagtctgacatcatgatgtccatccggcaaagaagagaaataagagccacagaagtttctgaagactttccagcccaagaagaaaatgtgaagttggaaaataaattgccatctggttgtaccagtagaagattatggaagattttgtcattgacaattggtggaaccattgccctttgcattggacttcttacatctgtctaccttgccacgttacatgaaaatgatttatggttttctaatattaaggaagtggagcgagaaatctcattcagaacagagtgtggcctgtattactcctactacaagcagatgctgcaggctccaaccctcgtgcaaggttttcatggcctaatatatgataataaaactgaatctatgaagacaattaacctccttcagcgaatgaatatttaccaagaggtttttctcagtattttatatagagttctacccatacagaaatatttagagccagtttatttttatatttacaccttatttgggctccaggcgatctatgtcacagctctctacataaccagctggctactcagtggtacatggctgtcaggactgttggcagctttctggtatgtcacaaatagaatagataccacaagagttgagtttaccatcccactgagggagaactgggcgctgccattctttgcaattcagatagcagcaattacatatttcctgagaccaaacttacagcctctttctgaaaggctgacacttcttgccattttcatatcaacttttctctttagtctgacatggcaatttaatcaatttatgatgctgatgcaagcattagtgctgttcacactggactccctggacatgctgccagcagtgaaggcgacatggctgtatggaatacagataacaagtttactcctggtctgcattcttcagttttttaattccatgattcttggatcactgcttatcagttttaacctttcagtattcattgcaagaaaacttcagaaaaatctgaaaactggaagcttccttaataggcttgggaaacttttgttacatttatttatggttttatgtttgacactttttctcaacaacataattaagaaaattcttaacctgaagtcagatgaacacatatttaaatttctgaaggcaaaatttgggcttggagcaacaagggattttgatgcaaatctctatctgtgtgaagaagcttttggcctcctgccttttaatacatttggaaggctttcagatactctgcttttttatgcttacatattcgttctgtccatcacagtgattgtagcattcgttgttgcctttcataatctcagtgattctacaaatcaacaatccgtgggtaaaatggaaaaaggcacagttgacctgaaaccagaaactgcctacaacttaatacataccattctgtttggattcttggcattgagtacaatgagaatgaagtacctctggacgtcacacatgtgtgtgttcgcatcattcggcctatgtagccctgaaatatgggagttacttctgaagtcagtccatctttataacccaaagaggatatgtataatgcgatattcagtaccgatattaatactgctgtatctatgctataagaatcagaaatct

SEQ ID NO: 8830 - DNA, 6024 bp, Homo sapiens
  source 1..6024: mol_type = unassigned DNA
ggaaggaccaagtttgcggagcggcttctgctcgtcggccgtgcggcgaggcagggcctgggctgcgaccccggcggccgctcgcggtcttgggagagctggggcgcgtgcctgaacttcccggctgcccctgtccttggagacctacctgatggggacgccaggtgtgcaggggcgtggcgcgtaggagtgatttggagaacaatgcatgtaagtctgacatcatgatgtccatccggcaaagaagagaaataagagccacagaagtttctgaagactttccagcccaagaagaaaatgtgaagttggaaaataaattgccatctggttgtaccagtagaagattatggaagattttgtcattgacaattggtggaaccattgccctttgcattggacttcttacatctgtctaccttgccacgttacatgaaaatgatttatggttttctaatattaaggaagtggagcgagaaatctcattcagaacagagtgtggcctgtattactcctactacaagcagatgctgcaggctccaaccctcgtgcaaggttttcatggcctaatatatgataataaaactgaatctatgaagacaattaacctccttcagcgaatgaatatttaccaagaggtttttctcagtattttatatagagttctacccatacagaaatatttagagccagtttatttttatatttacaccttatttgggctccaggcgatctatgtcacagctctctacataaccagctggctactcagtggtacatggctgtcaggactgttggcagctttctggtatgtcacaaatagaatagataccacaagagttgagtttaccatcccactgagggagaactgggcgctgccattctttgcaattcagatagcagcaattacatatttcctgagaccaaacttacagcctctttctgaaaggctgacacttcttgccattttcatatcaacttttctctttagtctgacatggcaatttaatcaatttatgatgctgatgcaagcattagtgctgttcacactggactccctggacatgctgccagcagtgaaggcgacatggctgtatggaatacagataacaagtttactcctggtctgcattcttcagttttttaattccatgattcttggatcactgcttatcagttttaacctttcagtattcattgcaagaaaacttcagaaaaatctgaaaactggaagcttccttaataggcttgggaaacttttgttacatttatttatggttttatgtttgacactttttctcaacaacataattaagaaaattcttaacctgaagtcagatgaacacatatttaaatttctgaaggcaaaatttgggcttggagcaacaagggattttgatgcaaatctctatctgtgtgaagaagcttttggcctcctgccttttaatacatttggaaggctttcagatactctgcttttttatgcttacatattcgttctgtccatcacagtgattgtagcattcgttgttgcctttcataatctcagtgattctacaaatcaacaatccgtgggtaaaatggaaaaaggcacagttgacctgaaaccagaaactgcctacaacttaatacataccattctgtttggattcttggcattgagtacaatgagaatgaagtacctctggacgtcacacatgtgtgtgttcgcatcattcggcctatgtagccctgaaatatgggagttacttctgaagtcagtccatctttataacccaaagaggatatgtataatgcgatattcagtaccgatattaatactgctgtatctatgctataagttctggccaggaatgatggatgaactctccgagttgagagaattctatgatccagatacagtggagctgatgaactggattaactctaacactccaagaaaggctgtgtttgcgggaagcatgcagttgctggccggagtcaagctgtgcacgggaaggaccctaaccaaccacccgcactatgaagacagcagcctgagagagcggaccagagcggtttatcagatatatgccaagagggcaccagaggaagtgcatgccctcctaaggtccttcggcactgactacgtaatcctggaagacagcatctgctacgagcggaggcaccgccggggctgccgactccgggacctgctggacattgccaacggccacatgatggatggcccaggagagaatgatcctgatttgaaacctgcagaccaccctcgcttctgtgaagagatcaaaagaaacctgcctccctacgtggcctacttcaccagagtgttccagaacaaaaccttccacgtttacaagctgtccagaaacaagtagcgcagatttctgcccagtgtctatttttgatacggagaaactgcatcatgatgaaactcaatagatgacgtttcctatgtaagtaggtagcccaaaccttcaagctgtgatatgagtaagttctacagatgtttacacaagtgttgccatctttgaaagcatcttctacaagcagaagtctttttcgttgtgtgtctatctttctcattaatgttctttagcctaaatgttaacaactttctaagagtgacctagaattatgttgttggagagaatgatgtgtgttccatggatacctggataggcacataacatgttggaagatgagcacctgctcaggatttgaaatacgtttaattttcaggtgacttaagacagctatgattgaatcaactagagatgatgatcgacttatttaatatgatttcactggtgaagaccaattggtagctttttaaaaagcactttagtgtcctgttttaccttaaaatgttataatattttccagttgtcatgctgtcaacattaacaaaaaaaatcatgttaaggctttgtatcaaacattttgttacactctgtctgaaatgtaatgtggagtacttcagcagtatgtgtcatgtattgtgtgtgtctgtgtgtgtgcatgtgcacacatgtgttttaatgctgggcacagaaaagtgttacaagttccatatcgtaagtccttaaaggggcagaaatatatgtagccaagtagaatttattacattttagtgttattattttaaaacttactgatactctttaacctctcctgcagtaatagttttgctttatttcttactcatttcaatttattgggtttgcaaaattttgtaaactttttgtgtttttagcctttgtattttttacagcctagaatcttgcaaagtctgaatattttttaaatgttctatcttaactagttcactaatacagtatttttagcagacagcattttcagacagcattttcataccaagtttgacttgtggtctccaatcttactgggaaggccctggtagtgtaattcttttccttattaaaaggtaaccaagtgcctctaagtcatgcttatttgtaaacaacaaagaagagtatatgtacctgctcaaaatttttttgataatcgcttatataattaatttctaatgatgaggacatgtaaaagttgccagtaagaacatagtatgcatttaattaaatcaagatggctaatggaattaactttctcccctgttcttgccaggtggaaatgatttaagcatttctccttgcagttgtattgaagtaaattaccataggcatcaagatggctgcatcacattttcaaatgattttatattcagttgctacttataaagcagcattcaaaaagtcttttacactgtcatgttggacacaagcagactcagcttttatcaaaacttgtttaaataaaaaattgacagtagctgggttattaaattatgcaactgaaactcctgaattatatcttttctgtatcccttaataagattggagaccactgccgtttaggataatacaataataaaacgttttaatcagtactaaaactttaattaagccaataatgatgcatgcctgttgtagctgacagcatgggtcagtacatccttcagcgagtgccttactctaattgaaaccaagcacacgtaaggtacaatatgttagactctgtgattttgttttcaaaatcctctgttatggctatatttaaatttattttaaatattcctgtatgtattcatctaagcatttgggcatttggagtcttaatatacaagaaacacgtacttaaatttttatgcttatcaccgcaatgatggcaaacagtgattttttttttcatagtttaggtgtcattgttgccagcacctttagtgctcagtcttcagtgaaaaatataaagtgccaaaaaaatcttgcaagacagaatccatacttaacactctttccaagacactgtgaccatgtacagtagctatttcctgatgaccaaatctctcaacgaatcatgttattaataaatatttttagcactcatcagtattctccaatgtgaccttctcattggagtacacagaaggaaagcaaagaagagcatctgacttctagctctggcttacagcctctctaccaggccgaagcaagagacccgcggcagcagctccccgccactcagacctgggtggtgataacctcaaagaatggctctgttttctattgacagaaaacccacttgattttgcttctgagttagcagtcagaagaccctctaagtacaatagaagtgctcttaacggactctgcctgtgtgactcccaggccccggagtctccatctctctcgtaagccacctgccacagcacagctggaggctgttctctggtgttctcagcgctccggctccctccctggagttgtgcacccgtcccaaactcctccatgcaagttctgcttcctcttataagtacacaactcagttaagtattcacatacacacagaaaatacgggtgtgaaaagaaagaattttctgtaaaaattaagttgaatactttggtaaaaagtgataaaggctgagttgccaataaaagttgcttttaaattaggtgtggctgggaatattataagatattggggaaaatatacaaatcaagaaaatttctgagcttagattgcttcatagatttatttaagtactcatcccacctttaaaacctctaaactgagaagaagggacccaaatcatgttattggtgtgatttatgtgagaagtagaactgtagtcattggacccttaggcaaaggaaaatccgtgtctttatatcagaagatcggcaaacgaatgtatattacacagtttaggttatgattccctactttaacctacttactttattaaatgaccaactactgatactgatcacaatagttattagagattctaatttagttggaaggttctaatcactttcattacaggcatttgaaaaatagggattcatttcgaatatattagccaggagcatagttagatgttacccaggccatttatcatcctgttaatgatgattttcccgacccttgtgagatcagcgtgacaggagtgtgtgtgtgtgtgtgtgtttctgtgggtgtgtggttttggttgggtgctgccaggtggcaaaggcatatgtaaatacatctgatctgcatctttatttcacagttaactaaaagtaaaaatgtctattctgattccatattgattttgtctaagatgtaaaaatttgagttcatctttggccaaaacctacctgaattaacatacaaaatatttgatttttaaaatttaattcaaatctcaaaatcaattaagtattctcagatcctatatcttggttaatatgctcccagatactttaaacatggcaaccttttggcctaagagaatgtttgttcatggaaaaaagcttttgagatgagagggtgtcttactttcttgtggcaattgattttctgttttaacaccctttgggtaaaatcttgcaaagagcttttataatttgttttactgaattgtatggagattgtataccaagtaaagctcttttaaattac

SEQ ID NO: 8831 - DNA, 528 bp, Homo sapiens
  source 1..528: mol_type = unassigned DNA
gcggccgctcgcggtcttgggagagctggggcgcgtgcctgaacttcccggctgcccctgtccttggagacctacctgatggggacgccaggtgtgcaggggcgtggcgcgtaggagtgatttggagaacaatgcatgtaagtctgacatcatgatgtccatccggcaaagaagagaaataagagccacagaagtttctgaagactttccagcccaagaagaaaatgtgaagttggaaaataaattgccatctggttgtaccagtagaagattatggaagattttgtcattgacaattggtggaaccttgccctttgcattggacttcttacatctgtctaccttgccacgttacatgaaaatgatttatggttttctaatattaaggaagtggagcgagaaatctcattcagaacagagtgtggcctgtattactcctactacaagcagatgctgcaggctccaaccctcgtgcaaggttttcatggcctaatatatgataataaaactgaatctatgaagacaatt

SEQ ID NO: 8832 - DNA, 5998 bp, Homo sapiens
  source 1..5998: mol_type = unassigned DNA
gttgacgccccccagcccctcatttccacaaagctccgcggcggttctgccctccttgtacccgcggcgcgctgcggcccgtggcgcggccccgttcccgcctagccccgtcggcctccttcccctcccggagccgcgcgtgaggacggctgaggccgcaggagtgatttggagaacaatgcatgtaagtctgacatcatgatgtccatccggcaaagaagagaaataagagccacagaagtttctgaagactttccagcccaagaagaaaatgtgaagttggaaaataaattgccatctggttgtaccagtagaagattatggaagattttgtcattgacaattggtggaaccattgccctttgcattggacttcttacatctgtctaccttgccacgttacatgaaaatgatttatggttttctaatattaaggaagtggagcgagaaatctcattcagaacagagtgtggcctgtattactcctactacaagcagatgctgcaggctccaaccctcgtgcaaggttttcatggcctaatatatgataataaaactgaatctatgaagacaattaacctccttcagcgaatgaatatttaccaagaggtttttctcagtattttatatagagttctacccatacagaaatatttagagccagtttatttttatatttacaccttatttgggctccaggcgatctatgtcacagctctctacataaccagctggctactcagtggtacatggctgtcaggactgttggcagctttctggtatgtcacaaatagaatagataccacaagagttgagtttaccatcccactgagggagaactgggcgctgccattctttgcaattcagatagcagcaattacatatttcctgagaccaaacttacagcctctttctgaaaggctgacacttcttgccattttcatatcaacttttctctttagtctgacatggcaatttaatcaatttatgatgctgatgcaagcattagtgctgttcacactggactccctggacatgctgccagcagtgaaggcgacatggctgtatggaatacagataacaagtttactcctggtctgcattcttcagttttttaattccatgattcttggatcactgcttatcagttttaacctttcagtattcattgcaagaaaacttcagaaaaatctgaaaactggaagcttccttaataggcttgggaaacttttgttacatttatttatggttttatgtttgacactttttctcaacaacataattaagaaaattcttaacctgaagtcagatgaacacatatttaaatttctgaaggcaaaatttgggcttggagcaacaagggattttgatgcaaatctctatctgtgtgaagaagcttttggcctcctgccttttaatacatttggaaggctttcagatactctgcttttttatgcttacatattcgttctgtccatcacagtgattgtagcattcgttgttgcctttcataatctcagtgattctacaaatcaacaatccgtgggtaaaatggaaaaaggcacagttgacctgaaaccagaaactgcctacaacttaatacataccattctgtttggattcttggcattgagtacaatgagaatgaagtacctctggacgtcacacatgtgtgtgttcgcatcattcggcctatgtagccctgaaatatgggagttacttctgaagtcagtccatctttataacccaaagaggatatgtataatgcgatattcagtaccgatattaatactgctgtatctatgctataagttctggccaggaatgatggatgaactctccgagttgagagaattctatgatccagatacagtggagctgatgaactggattaactctaacactccaagaaaggctgtgtttgcgggaagcatgcagttgctggccggagtcaagctgtgcacgggaaggaccctaaccaaccacccgcactatgaagacagcagcctgagagagcggaccagagcggtttatcagatatatgccaagagggcaccagaggaagtgcatgccctcctaaggtccttcggcactgactacgtaatcctggaagacagcatctgctacgagcggaggcaccgccggggctgccgactccgggacctgctggacattgccaacggccacatgatggatggcccaggagagaatgatcctgatttgaaacctgcagaccaccctcgcttctgtgaagagatcaaaagaaacctgcctccctacgtggcctacttcaccagagtgttccagaacaaaaccttccacgtttacaagctgtccagaaacaagtagcgcagatttctgcccagtgtctatttttgatacggagaaactgcatcatgatgaaactcaatagatgacgtttcctatgtaagtaggtagcccaaaccttcaagctgtgatatgagtaagttctacagatgtttacacaagtgttgccatctttgaaagcatcttctacaagcagaagtctttttcgttgtgtgtctatctttctcattaatgttctttagcctaaatgttaacaactttctaagagtgacctagaattatgttgttggagagaatgatgtgtgttccatggatacctggataggcacataacatgttggaagatgagcacctgctcaggatttgaaatacgtttaattttcaggtgacttaagacagctatgattgaatcaactagagatgatgatcgacttatttaatatgatttcactggtgaagaccaattggtagctttttaaaaagcactttagtgtcctgttttaccttaaaatgttataatattttccagttgtcatgctgtcaacattaacaaaaaaaatcatgttaaggctttgtatcaaacattttgttacactctgtctgaaatgtaatgtggagtacttcagcagtatgtgtcatgtattgtgtgtgtctgtgtgtgtgcatgtgcacacatgtgttttaatgctgggcacagaaaagtgttacaagttccatatcgtaagtccttaaaggggcagaaatatatgtagccaagtagaatttattacattttagtgttattattttaaaacttactgatactctttaacctctcctgcagtaatagttttgctttatttcttactcatttcaatttattgggtttgcaaaattttgtaaactttttgtgtttttagcctttgtattttttacagcctagaatcttgcaaagtctgaatattttttaaatgttctatcttaactagttcactaatacagtatttttagcagacagcattttcagacagcattttcataccaagtttgacttgtggtctccaatcttactgggaaggccctggtagtgtaattcttttccttattaaaaggtaaccaagtgcctctaagtcatgcttatttgtaaacaacaaagaagagtatatgtacctgctcaaaatttttttgataatcgcttatataattaatttctaatgatgaggacatgtaaaagttgccagtaagaacatagtatgcatttaattaaatcaagatggctaatggaattaactttctcccctgttcttgccaggtggaaatgatttaagcatttctccttgcagttgtattgaagtaaattaccataggcatcaagatggctgcatcacattttcaaatgattttatattcagttgctacttataaagcagcattcaaaaagtcttttacactgtcatgttggacacaagcagactcagcttttatcaaaacttgtttaaataaaaaattgacagtagctgggttattaaattatgcaactgaaactcctgaattatatcttttctgtatcccttaataagattggagaccactgccgtttaggataatacaataataaaacgttttaatcagtactaaaactttaattaagccaataatgatgcatgcctgttgtagctgacagcatgggtcagtacatccttcagcgagtgccttactctaattgaaaccaagcacacgtaaggtacaatatgttagactctgtgattttgttttcaaaatcctctgttatggctatatttaaatttattttaaatattcctgtatgtattcatctaagcatttgggcatttggagtcttaatatacaagaaacacgtacttaaatttttatgcttatcaccgcaatgatggcaaacagtgattttttttttcatagtttaggtgtcattgttgccagcacctttagtgctcagtcttcagtgaaaaatataaagtgccaaaaaaatcttgcaagacagaatccatacttaacactctttccaagacactgtgaccatgtacagtagctatttcctgatgaccaaatctctcaacgaatcatgttattaataaatatttttagcactcatcagtattctccaatgtgaccttctcattggagtacacagaaggaaagcaaagaagagcatctgacttctagctctggcttacagcctctctaccaggccgaagcaagagacccgcggcagcagctccccgccactcagacctgggtggtgataacctcaaagaatggctctgttttctattgacagaaaacccacttgattttgcttctgagttagcagtcagaagaccctctaagtacaatagaagtgctcttaacggactctgcctgtgtgactcccaggccccggagtctccatctctctcgtaagccacctgccacagcacagctggaggctgttctctggtgttctcagcgctccggctccctccctggagttgtgcacccgtcccaaactcctccatgcaagttctgcttcctcttataagtacacaactcagttaagtattcacatacacacagaaaatacgggtgtgaaaagaaagaattttctgtaaaaattaagttgaatactttggtaaaaagtgataaaggctgagttgccaataaaagttgcttttaaattaggtgtggctgggaatattataagatattggggaaaatatacaaatcaagaaaatttctgagcttagattgcttcatagatttatttaagtactcatcccacctttaaaacctctaaactgagaagaagggacccaaatcatgttattggtgtgatttatgtgagaagtagaactgtagtcattggacccttaggcaaaggaaaatccgtgtctttatatcagaagatcggcaaacgaatgtatattacacagtttaggttatgattccctactttaacctacttactttattaaatgaccaactactgatactgatcacaatagttattagagattctaatttagttggaaggttctaatcactttcattacaggcatttgaaaaatagggattcatttcgaatatattagccaggagcatagttagatgttacccaggccatttatcatcctgttaatgatgattttcccgacccttgtgagatcagcgtgacaggagtgtgtgtgtgtgtgtgtgtttctgtgggtgtgtggttttggttgggtgctgccaggtggcaaaggcatatgtaaatacatctgatctgcatctttatttcacagttaactaaaagtaaaaatgtctattctgattccatattgattttgtctaagatgtaaaaatttgagttcatctttggccaaaacctacctgaattaacatacaaaatatttgatttttaaaatttaattcaaatctcaaaatcaattaagtattctcagatcctatatcttggttaatatgctcccagatactttaaacatggcaaccttttggcctaagagaatgtttgttcatggaaaaaagcttttgagatgagagggtgtcttactttcttgtggcaattgattttctgttttaacaccctttgggtaaaatcttgcaaagagcttttataatttgttttactgaattgtatggagattgtataccaagtaaagctcttttaaattac

SEQ ID NO: 8833 - DNA, 6197 bp, Homo sapiens
  source 1..6197: mol_type = unassigned DNA
aggagcgggcccccggaggccgaggggttcggcgacgcggagggagggagagtctgggccgcgcgggagccgcagggcgccctagccttcgcagaaacgatggcggaggaagaaggaccacctgtagagctgcgccaaagaaaaaagccaaagtcttcagaaaataaggaatctgccaaagaagagaaaatcagtgacattccaattcctgaaagagctccaaaacatgtattatttcaacgctttgcaaagattttcattggctgtcttgcagcggttactagtggtatgatgtatgctctctacttatcagcataccatgaacggaaattctggttttccaacaggcaggagcttgaacgggaaatcacgtttcagggtgacagtgccatttattactcctattataaagatatgttaaaggcaccttcatttgaaagaggtgtttacgaactgacacacaataacaaaactgtatctctgaagactataaatgcagtgcagcaaatgtctctgtatccggaacttattgctagcattttatatcaagccactggtagcaatgagattattgagccagtgtatttctatattggcattgtttttggattgcaaggaatatatgttactgctttatttgttacaagttggcttatgagtggaacatggctagcaggaatgcttactgttgcgtggttcgttattaacagggtagatacaacaagaattgaatactccattcctttaagagaaaactgggcactaccatattttgcatgccaaattgctgcacttacaggctatttaaaaagcaacttaaatacttatggagagaggttttgctacttgttgatgagtgcttcaacttacacatttatgatgatgtgggagtatagccactatctcctgtttcttcaagcaatatctctattcctgctagataccttttcagtggagcaaagtgacaaggtttatgaagtttataaaatctacatattttccctctttctgggatatttactacagtttgagaatccagctttgttggtatctcctttattaagtttagtagcagccttaatgcttgctaagtgccttcagctgaatgtgaagaaaggaagttttgtagctaaaataataaaagtgattaatttttacttggtgtgtactctgacaataacattgaatattataatgaagatgtttgtcccacacaaagaaaatgggcacatgctgaaattccttgaagtaaaatttggactaaatatgaccaagaattttacaatgaattggctcctctgtcaagaatccctgcaggcaccatctcaagatttttttctgcgattgacacagtcttctttattacctttctacattctagtgttaattatttgttttctttctatgttgcaagttatttttaggaggattaatggtaagtccctgaaggaaactgttactcttgaagatggacgaattggagaaagaccagaaataatttatcatgtaattcacactattttattgggttctcttgcaatggttatagaaggcttgaagtacatctggattccttatgtgtgcatgttagcagcatttggtgtatgttctcccgaactttggatgacacttttcaagtggcttcgattaagaactgtacacccaatattgttggctcttattctgagcatggccgtgcctactataataggtctcagcttatggaaagagttttttcccagattaatgacagaattaatggaactacaggaattctatgacccagatacagtggaacttatgacctggataaaaaggcaagctccagttgcagctgtgtttgcagggagtccacagttaatgggtgcgattaaattatgcactggatggatggtgacaagtttgcctctttacaatgatgatgatcttctcaagagaaatgaaaatatctaccaaatctattcaaagcgatctgctgaggatatttataaaatactgacatcttacaaagctaattacctaattgtagaggatgctatctgcaatgaggtgggacccatgagaggctgtagggttaaagatttattagacattgcaaatggccacatggtttgtgaagaaggtgacaagctaacctactcaaaatatgggcgattttgtcatgaggtcaaaattaactattctccatatgtgaattatttcactagagtatactggaacagatcctactttgtatataaaatcaacactgtgatatccttccagtcttgaaaaataacagagccttcatttcaaagactacctgaagtaaaatgcagttttcttctacctactcggtgtcttttgcagatcagagtatggacatttgaaatattgctgcttctttcccccttctgctgttaactggatccagagttctgtgggaaatagaagatcaagcattactgtcctttgattaaatgtgatatctaccactctgcaatattccagacaggtgtcttccttaccgttacatggtctttaacacttttactgattgcaatattttccccataaaatcttcattctattataatattgatcttgaatttgaatatgtgcaaggtcagatacatttctcaaacataacatttaataaataatgtgatataattatttaatagaaagaataattccgaccttcaagcaagtttctgaaggtattttatgatgtataacaactgaagttttacaataaaaactaatttaaatgttagctgaagatatgtggcatttaaattaaaatggaaattatataaaggaaagtgatttttaaggatatacataaagatatatttagaattttcatgatactgttctcctcatctactgcttatgttaagtgagaactttcttagtaatacataatgcatgatgttactgcattttctaaatgactagtaagtgattagttttttcacttatgcctattaatttgataccaatttaatcatgataaaacaataaccgttaacatatattttgttaaatggacatttaaaagaatgttgttcaggttttttttttaaatactgatatggggcatacaatctattcacatgttttctactgaagtactaagtaaaaaaattaaatcattatcagaataaaaatatgtgttctaaaattagcaacaatttctggggatacatgcagatgttgttaaacgtacctctgcatacagatatattataaaacacaagcaatgttatttatgaaactgtgatgcagtcttcaacatcaagaaaaaatgacaactataataaaatttacaacacagtttcacagtctaaatgctatgttcctttaagtattttcatatttttaatcatttattaagagaaaattgtgaaaagttaatttggccttatagagagattcaggatagatgtagcctatagatgtgtcattttaataagttgggatacatgtttagtttttccttatattcctgttcagtgaacagattttcataattctcacttgttaaagtgctgcaaaaattgcattttcagtactctaaattactacattagaagagagcatttctccattgtctttattttctgttatatatgtgttgtaaaagtacactacattagaagggagcttttccgttgtctttattttctgttatacatgtgttgttaaagtacatgcattcttagactaactctcagatgctttgctcttttggagctgaagaattgtttgatggtgatgtcatatatctgatagattagtttcagtggttctcatttcacttttatacgtaatttcttaactatattaagatagttgcaggcagtgtacctcaggttgactctgtacatctgaatagtgagtcactagtattttgcttcaagccttctgaaaatataaccatagttacctaagcacacagtgaatagtcacatggtagtacttgtgattagagcatgtaaaacaatgtaattgaaaagtcagcttccatattttgtaggggaaatagaacaccctactttttatctagtgtgaaatatttaatcgaatttttgttgatttatattatgttacctgtgctgaattaggtttggtacttgtgttttgtttgacatattagtaagttgcttttgcttctttctgtcaacttattttttaaataaaattgatctggaaaaattgttaatgggatgttttaaataatgaatttttcatccagcatcagttgaaaaggaaaagaaagcttcattatggaaatgacaatattgaatatgacagataagtttatttgcttctgttttaactgcagttaatagtactagacaactttaagtggaaagcatttagtttatttcttcacttatttgtagagtgaacaaatgattcacaattctacaagtaattccacttaggtaacttacagttgttaggtttgacaataaagatctactatgagaggagaagaatttatgggttttgggtggaaggaatttctcaaagaaataaaaaatgttctttgcccttgatactgcaaacccactgatacaagtgccttgaatttattattattattattttttatttttttgagatggagtttcactcttgtctcccaggctggagtgcaatggcgcgatcttggctcactgcaacctccgctcgctgcaacctccgcctcccaggttcaagtgattctcctgcctcagcctccggagtagctgggattacaggcacctgccaccaagcacggctaatttttgtatttttagtagaaacggggtttcgccatgttggccaggctggtctcgaactcctgacctcagatgatccactcaccccagcctcccaaagtgctgggattacagacgtgagccactgcgcccggcgcaagtctttgttaaaagtagagatggaggccaggcgcagtggctcactcctgtaatcccagcactttgggaggctgaggcaggcagatcacgaggtcaggagatcgagaccatcttggctaacacggtgaaaccccgtctctactgaaaatacaaaaaattagccgggcagggtggcgggcgcctgtagtcccagctactccgaggctgaagcaggagaatggcgtcaagcggcgaggcggagcttgcggtgagccgagatcatgccgctgcactccagcctgggcaacagagcaagactccatctcaaaaagaaaaaaaaagtagagatgggatctctagcctcctaagttaatttagcctcccaaatgccagacaaagaatctaacataaaatttaccttgaataagatatatgatattgattctgagctgctttgtattttttctgactttggcatctgtatcttggtgctttctgttagactggtagagtttaagaacctaaggagtatgcattgtacttcagtgctaacttttttcttcatttactttctgtgtatataggcagcatattttttttgtagaacattaacccagattgctaatagcttcatgttacggcattcttccacacagtccagattgatttaaggaaaagcagaaatggaagtcaaagtgtgttataaattgagactgaaaaacatgctttaaaaaatagatttaatttcttacactgtgaatagccattgtattgttttgtttctgataaatcagttgttttgggcccctatttttgaactgttaaaaaattttgatgcttttcgtggataaaagtagtgcctctctttatacaactgatggggttttaaaaagtgtaaattgccttttttgttaaacttattttaaatgctttagtatttaaagggtgtatgttattaattaatctgcatatttgtaacgcaaataactacttcctgatttacatctcaatatattcttctttcatttgcccaatttaaaaaatacgtagtctctattgttgctgtttactaatagttttagatcccaatgtgtattagaattatagctacaaaaagttgcaagtaaaatttagcaatttcctattcaaacaggatctcattagtatgttttttaatgtgtagaattaacactttaaaataaacaggtgtgaaaattataaaggaatatatatgacaattattttctgtacattaatgtctaaacattatacttactttttcataataaaggaaattttggaaccaaa

SEQ ID NO: 8834 - DNA, 631 bp, Homo sapiens
  source 1..631: mol_type = unassigned DNA
acggccggagctgtttgtgctgggagctggtggcgcggtgcagggctcttaagaacgaacggcttgggcgcgggtaatcagctccctttcccccactttctcacttattctaggtacttgggactgtcgtagagtttccagaccccatgtaggcgcccagtcgtggactgtcccactctgctgctctactgctcgtggtgctcccgcgcccagactggtatccggggactgtgacttgcagggtccgccatggagccagagcagatgctggagggacaaacgcaggttgcagaaaatcctcactctgagtacggtctcacagacaacgttgagagaatagtagaaaatgagaagattaatgcagaaaagtcatcaaagcagaaggtagatctccagtctttgccaactcgtgcctacctggatcagacagttgtgcctatcttattacagggacttgctgtgcttgcaaaggaaagaccaccaaatcccattgaatttctagcatcttatcttttaaaaaacaaggcacagtttgaagatcgaaactgacttaatgggaagaacagaaaaatttagttgctactgtagatttacatgattaagaggcagctttaattgccatgatcattcc

SEQ ID NO: 8835 - DNA, 708 bp, Homo sapiens
  source 1..708: mol_type = unassigned DNA
gtcacttacggccggagctgtttgtgctgggagctggtggcgcggtgcagggctcttaagaacgaacggcttgggcgcggactggtatccggggactgtgacttgcagggtccgccatggagccagagcagatgctggagggacaaacgcaggttgcagaaaatcctcactctgagtacggtctcacagacaacgttgagagaatagtagaaaatgagaagattaatgcagaaaagtcatcaaagcagaaggtagatctccagtctttgccaactcgtgcctacctggatcagacagttgtgcctatcttattacagggacttgctgtgcttgcaaaggaaagaccaccaaatcccattgaatttctagcatcttatcttttaaaaaacaaggcacagtttgaagatcgaaactgacttaatgggaagaacagaaaaatttagttgctactgtagatttacatgattaagaggcagctttaattgccatgatcattccctctttttggatgtataagaaccttccggacaacagaacctatttctggaattgcagaagataacatatttcccttattttgatttaatcaccataaaccatacctatttaatgagtgtattctgtgcaatttttttctcagattgtctttaactttgtttttaaaatgaccttcaaaataaactgtcaaaacaccattattttaaagta

SEQ ID NO: 8836 - DNA, 3072 bp, Homo sapiens
  source 1..3072: mol_type = unassigned DNA
ggcggccggacgcggcccggaggcgcggggtcccgatgtggggcccggggccgcgtggccctgcgggagcccatcccccaccctaccccccgggcccgggggacaggtgtgcacggggcggccaagggcaccttcgccaccttcgagcgggcgaggtccgggcggggacggggcggggaccgagctagcggagccagcgcagcctgcccggctcagcccggcccggccacagcacaaaggaaagcgagggcgggggaggagcggagcgggctgggggccgggcgccccgcccaccggggggcctctcggagtgggccgccctccccccgaaacctgggctggagtgaggtggaaggatgtttgctgccacatggcgaccgcgaagtgactcccttaccgccgcgggtcgcggaggaggcagggggaaggtgcccatctggttcctaggcctcctctccctgctggcagatgggaacaggttcttcttgaggaaactgaggcaaagaggagggcaggtctgagggaccccgcttgggctggcctcacccgcacactgggagggcagccaggtggggactctgacctgggggcttctggaggagaggatgagatggctgggcatccatggcatggtactgcagcactggccagcagccaggcctggagggatggacgcgagagacaagctctcgtgtcctgcagggctctgtacacatatgaagatggctccgatgacctcaagcttgcagcatcaggagaagggggcttgcaggagctttcgggacactttgagaaccagaaggtgatgtacggcttctgcagtgtcaaggactcccaagctgctctgccaaaatacgtgctcatcaactgggtgggcgaagatgtgcctgatgcccgcaagtgcgcttgtgccagccacgtggctaaggtggcggagttcttccagggtgtcgacgtgatcgtgaacgccagcagcgtggaagacatagacgcgggtgccatcgggcagcggctctctaacgggctggcgcgactctccagccctgtgctgcaccgactgcggctgcgagaggatgagaacgcagagcccgtgggcaccacctaccagaagacggatgcagctgtggaaatgaagcggattaaccgagagcagttctgggagcaggccaagaaggaagaagagctgcggaaggaggaggagcggaagaaggccctggatgagaggctcaggttcgagcaggagcggatggagcaggagcggcaggagcaagaggagcgcgagcggcgctaccgggagcgggagcagcagatcgaggagcacaggaggaaacagcagactttagaagcggaagaggccaagaggcggttgaaggagcagtctatctttggtgaccatcgggatgaggaggaagagacccacatgaagaagtcagagtcggaggtggaggaggcagcagctattattgcccagcggcctgacaacccaagggagttcttcaagcagcaggaaagagtcgcatcggcctctgcgggcagctgtgatgtaccctcgcccttcaaccatcgaccaggcagccacctggacagccaccggaggatggcgcccactcccatccccacgcggagcccgtctgactccagcaccgcctccacccctgtcgctgagcagatagagcgggccctggatgaggtcacctcctcgcagcctccaccactgccaccgccacccccaccagcccaagagacccaggagcccagccccatcctagacagtgaggagaccagagcagcagcccctcaggcctgggccggccccatggaggagccccctcaggcacaggcgcctccccgggggccaggcagccctgcagaggacttgatgttcatggagtctgcagagcaggctgtcctggctgctcccgtggagcctgccacagctgacgccacggagatccacgatgcagctgacaccattgaaactgacactgccactgctgacaccactgttgccaacaacgtaccccccgccgccaccagcctcattgacctatggcctggcaacggggaaggggcctccacactccagggtgagcccagggcccccacgccaccctcgggtactgaggtcaccctggcagaggtgcccctgctggatgaggtggctccggagccactgctgccagcaggcgaaggctgtgccacccttctcaactttgatgagctgcctgagccgccagccaccttctgtgacccagaggaagtggaaggggagtccctggctgccccccagaccccaactctgccctcagcccttgaggagctggagcaagagcaggagccggagccccacctgctaaccaatggcgagaccacccagaaggaggggacccaggccagtgaggggtacttcagtcaatcacaggaggaggagtttgcccaatcggaagagctctgtgccaaggctccgcctcctgtgttctacaacaagcctccagagatcgacatcacatgctgggatgcagacccagttccagaagaggaggagggcttcgagggtggtgattagcggtggcgccagccctaggctacccttgccaaggccgcccacctgcatcagcctctggccagacggcccgccgtgcctgcattcgcagcagctccgcctggcacccactccggattccggccctggctggggacttggccgcttccctacccacagggcctgacttttacagcttttctctttttttaaaaagttgataggagacttgtacagttgactggctttcctctcgttggtagttgagacgctgttgcaaattccacccctccttccctggtccagattgtagctcttagtcctccctgctcagctggccgggttggaggcctcaccctgcttggggcctggcgtggggggagctctggtgggaaaatgtcccccacctcttttcctagttttatgtttcttgggaaaatatcactttgtattctctgtccagggcttcagatattttgcacgaattttaaaacatggcaataaatggctcgtgggctctggctccctgg

SEQ ID NO: 8837 - DNA, 2995 bp, Homo sapiens
  source 1..2995: mol_type = unassigned DNA
gggcggcgctaggaccgagcgagcggagggagcgagccgggcggagccagcgccccccgccccccgccggccggctcccctcccccggccgctggctcgctcggctcgcgacgctgcagaggctccgaggcggcggcggcgactccctctttccctccctcctcctccgtccgcccgtccgtccgcgcgtctgtccgttcggcccggtccggcccgaagcatggccggcgtcagcttcagcggccaccgcctggagctgctggcggcttacgaggaggtgatccgagaggagagcgcggccgactgggctctgtacacatatgaagatggctccgatgacctcaagcttgcagcatcaggagaagggggcttgcaggagctttcgggacactttgagaaccagaaggtgatgtacggcttctgcagtgtcaaggactcccaagctgctctgccaaaatacgtgctcatcaactgggtgggcgaagatgtgcctgatgcccgcaagtgcgcttgtgccagccacgtggctaaggtggcggagttcttccagggtgtcgacgtgatcgtgaacgccagcagcgtggaagacatagacgcgggtgccatcgggcagcggctctctaacgggctggcgcgactctccagccctgtgctgcaccgactgcggctgcgagaggatgagaacgcagagcccgtgggcaccacctaccagaagacggatgcagctgtggaaatgaagcggattaaccgagagcagttctgggagcaggccaagaaggaagaagagctgcggaaggaggaggagcggaagaaggccctggatgagaggctcaggttcgagcaggagcggatggagcaggagcggcaggagcaagaggagcgcgagcggcgctaccgggagcgggagcagcagatcgaggagcacaggaggaaacagcagactttagaagcggaagaggccaagaggcggttgaaggagcagtctatctttggtgaccatcgggatgaggaggaagagacccacatgaagaagtcagagtcggaggtggaggaggcagcagctattattgcccagcggcctgacaacccaagggagttcttcaagcagcaggaaagagtcgcatcggcctctgcgggcagctgtgatgtaccctcgcccttcaaccatcgaccaggcagccacctggacagccaccggaggatggcgcccactcccatccccacgcggagcccgtctgactccagcaccgcctccacccctgtcgctgagcagatagagcgggccctggatgaggtcacctcctcgcagcctccaccactgccaccgccacccccaccagcccaagagacccaggagcccagccccatcctagacagtgaggagaccagagcagcagcccctcaggcctgggccggccccatggaggagccccctcaggcacaggcgcctccccgggggccaggcagccctgcagaggacttgatgttcatggagtctgcagagcaggctgtcctggctgctcccgtggagcctgccacagctgacgccacggagatccacgatgcagctgacaccattgaaactgacactgccactgctgacaccactgttgccaacaacgtaccccccgccgccaccagcctcattgacctatggcctggcaacggggaaggggcctccacactccagggtgagcccagggcccccacgccaccctcgggtactgaggtcaccctggcagaggtgcccctgctggatgaggtggctccggagccactgctgccagcaggcgaaggctgtgccacccttctcaactttgatgagctgcctgagccgccagccaccttctgtgacccagaggaagtggaaggggagtccctggctgccccccagaccccaactctgccctcagcccttgaggagctggagcaagagcaggagccggagccccacctgctaaccaatggcgagaccacccagaaggaggggacccaggccagtgaggggtacttcagtcaatcacaggaggaggagtttgcccaatcggaagagctctgtgccaaggctccgcctcctgtgttctacaacaagcctccagagatcgacatcacatgctgggatgcagacccagttccagaagaggaggagggcttcgagggtggtgattagcggtggcgccagccctaggctacccttgccaaggccgcccacctgcatcagcctctggccagacggcccgccgtgcctgcattcgcagcagctccgcctggcacccactccggattccggccctggctggggacttggccgcttccctacccacagggcctgacttttacagcttttctctttttttaaaaagttgataggagacttgtacagttgactggctttcctctcgttggtagttgagacgctgttgcaaattccacccctccttccctggtccagattgtagctcttagtcctccctgctcagctggccgggttggaggcctcaccctgcttggggcctggcgtggggggagctctggtgggaaaatgtcccccacctcttttcctagttttatgtttcttgggaaaatatcactttgtattctctgtccagggcttcagatattttgcacgaattttaaaacatggcaataaatggctcgtgggctctggctccctgggaccccctccccgcccttcttttgaccccttcctgtctggcccaaaggaagtagcaggcccagctggggcccctcggctaccccccgtctcctgccgggcaggtcccaggttggaggccctaggcgcggttcaggtcagggctatggatggggcccaggggctttggtggcccctccccaactccttcctctttgcttgggttcctttttcacgtttagtaactgttttttttttttttttttttttttttttggaaagcacaaacttctgtaacgggtcgtgctcatgtctgttaataaagaaatccagatcccttcg

SEQ ID NO: 8838 - DNA, 1403 bp, Homo sapiens
  source 1..1403: mol_type = unassigned DNA
acgctgcagctggaaaccagagggcctggcccccgggtggggagcaggcatttgggagggaggccagtctcccatgctgaggcttggaggtgggaacgggtgtgcctgttctgggaactgactgcgtcgtgctgaggacttgatgtctacatctcacaggtgaccatcgggatgaggaggaagagacccacatgaagaagtcagagtcggaggtggaggaggcagcagctattattgcccagcggcctgacaacccaagggagttcttcaagcagcaggaaagagtcgcatcggcctctgcgggcagctgtgatgtaccctcgcccttcaaccatcgaccaggcagccacctggacagccaccggaggatggcgcccactcccatccccacgcggagcccgtctgactccagcaccgcctccacccctgtcgctgagcagatagagcgggccctggatgaggtcacctcctcgcagcctccaccactgccaccgccacccccaccagcccaagagacccaggagcccagccccatcctagacagtgaggagaccagagcagcagcccctcaggcctgggccggccccatggaggagccccctcaggcacaggcgcctccccgggggccaggcagccctgcagaggacttgatgttcatggagtctgcagagcaggctgtcctggctgctcccgtggagcctgccacagctgacgccacggagatccacgatgcagctgacaccattgaaactgacactgccactgctgacaccactgttgccaacaacgtaccccccgccgccaccagcctcattgacctatggcctggcaacggggaaggggcctccacactccagggtgagcccagggcccccacgccaccctcgggtactgaggtcaccctggcagaggtgcccctgctggatgaggtggctccggagccactgctgccagcaggcgaaggctgtgccacccttctcaactttgatgagctgcctgagccgccagccaccttctgtgacccagaggaagtggaaggggagtccctggctgccccccagaccccaactctgccctcagcccttgaggagctggagcaagagcaggagccggagccccacctgctaaccaatggcgagaccacccagaaggaggggacccaggccagtgaggggtacttcagtcaatcacaggaggaggagtttgcccaatcggaagagctctgtgccaaggctccgcctcctgtgttctacaacaagcctccagagatcgacatcacatgctgggatgcagacccagttccagaagaggaggagggcttcgagggtggtgattagcggtggcgccagccctaggctacccttgccaaggccgcccacctgcatcagcctctggccagacgg

SEQ ID NO: 8839 - DNA, 1044 bp, Homo sapiens
  source 1..1044: mol_type = unassigned DNA
ggcggcggcggcgactccctctttccctccctcctcctccgtccgcccgtccgtccgcgcgtctgtccgttcggcccggtccggcccgaagcatggccggcgtcagcttcagcggccaccgcctggagctgctggcggcttacgaggaggtgatccgagaggagagcgcggccgactgggctctgtacacatatgaagatggctccgatgacctcaagcttgcagcatcaggagggggcttgcaggagctttcgggacactttgagaaccagaaggtgatgtacggcttctgcagtgtcaaggactcccaagctgctctgccaaaatacgtgctcatcaactgggtgggcgaagatgtgcctgatgcccgcaagtgcgcttgtgccagccacgtggctaaggtggcggagttcttccagggtgtcgacgtgatcgtgaacgccagcagcgtggaagacatagacgcgggtgccatcgggcagcggctctctaacgggctggcgcgactctccagccctgtgctgcaccgactgcggctgcgagaggatgagaacgcagagcccgtgggcaccacctaccagaagacggatgcagctgtggaaatgaagcggattaaccgagagcagttctgggagcaggccaagaaggaagaagagctgcggaaggaggaggagcggaagaaggccctggatgagaggctcaggttcgagcaggagcggatggagcaggagcggcaggagcaagaggagcgcgagcggcgctaccgggagcgggagcagcagatcgaggagcacaggaggaaacagcagactttagaagcggaagaggccaagaggcggttgaaggagcagtctatctttggtgaccatcgggatgaggaggaagagacccacatgaagaagtcagagtcggaggtggaggaggcagcagctattattgcccagcggcctgacaacccaagggagttcttcaagcagcaggaaagagtcgcatcggcctctgcgggcagctgtgatgtaccctcgcccttcaaccatcgaccag

SEQ ID NO: 8840 - DNA, 456 bp, Homo sapiens
  source 1..456: mol_type = unassigned DNA
aaaggatctcctagctggccccatctgagagggcacaggcgtggaggggaggagaggcctggaatggagggataatgagctggcatggccggcgtcagcttcagcggccaccgcctggagctgctggcggcttacgaggaggtgatccgagaggagagcgcggccgactgggctctgtacacatatgaagatggctccgatgacctcaagcttgcagcatcaggagaagggggcttgcaggagctttcgggacactttgagaaccagaaggtgatgtacggcttctgcagtgtcaaggactcccaagctgctctgccaaaatacgtgctcatcaactgggtgggcgaagatgtgcctgatgcccgcaagtgcgcttgtgccagccacgtggctaaggtggcggagttcttccagggtgtcgacgtgatcgtgaacgccagcagcgtggaagacata

SEQ ID NO: 8841 - DNA, 4179 bp, Homo sapiens
  source 1..4179: mol_type = unassigned DNA
cacagaatgtcgttccacccgggacgagggtgtccccgaggacgaggaggacatggagccagaccctcagcaccatcctttaggccccaaaatctgaggctgcttcaccctcagcagcctcctgtgcaatatcaatatgaacctccaagtgccccttccaccactttctcaaactctccagcccccaattttctccctccacgaccagactttgtacccttccccccacccatgcctccgtcagcgcaaggccctcttcccccctgcccaatcaggccgcctttccccaaccaccagatgaggcaccccttcccagttcctccttgttttcctcccatgccaccaccaatgccttgtcctaataaccccccagtccctggggcacctcctggacaaggcactttccccttcatgatgccccctccctccatgcctcatcccccgccccctccagtcatgccgcagcaggttaattatcagtaccctccgggctattctcaccacaacttcccacctcccagttttaatagtttccagaacaaccctagttctttcctgcccagtgctaataacagcagtagtcctcatttcagacatctccctccatacccactcccaaaggctcccagtgagagaaggtccccagaaaggctgaaacactatgatgaccacaggcaccgagatcacagtcatgggcgaggtgagaggcatcggtccctggatcggcgggagcgaggccgcagtcccgacaggagaagacaagacagccggtacagatctgattatgaccgagggagaacaccatctcgccaccgcagctacgaacggagcagtcgctccccaagtagggagaagaagagagctcgttgggaggaagaaaaagaccgttggagtgacaaccagagttctggcaaagacaagaactatacctcaatcaaggaaaaagagcccgaggagaccatgcctgacaagaatgaggaggaagaagaagaacttcttaagcctgtgtggattcgatgcactcattcagaaaactactactccagtgaccccatggatcaggtgggagattctacagtggttggaacgagtaggcttcgtgacttatatgacaaatttgaggaggagttggggagcaggcaagaaaaggccaaagctgctcggcctccgtgggaacctccaaagacgaagctcgatgaagatttagagagttccagtgaatccgagtgtgagtctgatgaggacagcacctgttctagcagctcagactctgaagtttttgacgttattgcagaaatcaaacgcaaaaaggcccaccctgaccgacttcatgatgaactttggtacaacgatccaggccagatgaatgatggaccactctgcaaatgcagcgcaaaggcaagacgcacaggaattaggcacagcatttatcctggagaagaggccatcaagccctgtcgtcctatgaccaacaatgctggcagacttttccactaccggatcacagtctccccgcctacgaactttttaactgacaggccaactgttatagaatacgatgatcacgagtatatctttgaaggattttctatgtttgcacatgcccccctgaccaatattccactgtgtaaagtaattagattcaacatagactacacgattcatttcattgaagagatgatgccggagaatttttgtgtgaaagggcttgaactcttttcactgttcctattcagagatattttggaattatatgactggaatcttaaaggtcctttgtttgaagacagccctccctgctgcccaagatttcatttcatgccacgttttgtaagatttcttccagatggaggaaaggaagtgctgtccatgcaccagattctcctgtacttgttaaggtgcagcaaagccctggtgcctgaggaggagattgccaatatgcttcagtgggaggagctggagtggcagaaatatgcagaagaatgcaaaggcatgattgttaccaaccctgggacgaaaccaagctctgtccgtatcgatcaactggatcgtgaacagttcaaccccgatgtgattacttttccgattatcgtccactttgggatacgccctgcacagttgagttatgcaggagacccacagtaccaaaaactgtggaagagttatgtgaaacttcgccacctcctagcaaatagtcccaaagtcaaacaaactgacaaacagaagctggcacagagggaggaagccctccaaaaaatacggcagaagaatacaatgagacgagaagtaacggtggagctaagtagccaaggattctggaaaactggcatccgttctgatgtctgtcagcatgcaatgatgctacctgttctgacccatcatatccgctaccaccaatgcctaatgcatttggacaagttgataggatatactttccaagatcgttgtctgttgcagctggccatgactcatccaagtcatcatttaaattttggaatgaatcctgatcatgccaggaattcattatctaactgtggaattcggcagcccaaatacggagacagaaaagttcatcacatgcacatgcggaagaaagggattaacaccttgataaatatcatgtcacgccttggccaagatgacccaactccctcgaggattaaccacaatgaacggttggaattcctgggtgatgctgttgttgaatttctgaccagcgtccatttgtactatttgtttcctagtctggaagaaggaggattagcaacctatcggactgccattgttcagaatcagcaccttgccatgctagcaaagaaacttgaactggatcgatttatgctgtatgctcacgggcctgacctttgtagagaatcggaccttcgacatgcaatggccaattgttttgaagcgttaataggagctgtttacttggagggaagcctggaggaagccaagcagttatttggacgcttgctctttaatgatccggacctgcgcgaagtctggctcaattatcctctccacccactccaactacaagagccaaatactgatcgacaacttattgaaacttctccagttctacaaaaacttactgagtttgaagaagcaattggagtaatttttactcatgttcgacttctggcaagggcattcacattgagaactgtgggatttaaccatctgaccctaggccacaatcagagaatggaattcctaggtgactccataatgcaactggtagccacagagtacttattcattcatttcccagatcatcatgaaggacacttaactttgttgcgaagctctttggtgaataatagaactcaggccaaggtagcggaggagctgggcatgcaggagtacgccataaccaacgacaagaccaagaggcctgtggcgcttcgcaccaagaccttggcggaccttttggaatcatttattgcagcgctgtacattgataaggatttggaatatgttcatactttcatgaatgtctgcttctttccacgattgaaagagttcattttgaatcaggattggaatgaccccaaatcccagcttcagcagtgttgcttgacacttaggacagaaggaaaagagccagacattcctctgtacaagactctgcagacagtgggcccatcccatgcccgaacctacactgtggctgtttatttcaagggagaaagaataggctgtgggaaaggaccaagtattcagcaagcggaaatgggagcagcaatggatgcgcttgaaaaatataattttccccagatggcccatcagaagcggttcatcgaacggaagtacagacaagagttaaaagaaatgaggtgggaaagagagcatcaagagagagagccagatgagactgaagacatcaagaaataaaggagggcatgcaagtgtggagtatttacttgctcagtaactgtgactgttgtctattgagacctagcctagttttcctgcagacaatgaatgaagtgtgctcattgaaataaaatacagagtcaaatcgctattgttgttttaatgatctgtttttagctggatggtctttattacaaagtattagatttttcttctatttaacggaaaacttgactttggtgaatgtgcattacttccttttattttgctctttaaataataaaattcaagaagcat

SEQ ID NO: 8842 - DNA, 5102 bp, Homo sapiens
  source 1..5102: mol_type = unassigned DNA
gagcttatattctctgtggaagatgtgacatatccaggcggaacatcatgatgcagggaaacacatgtcacagaatgtcgttccacccgggacgagggtgtccccgaggacgaggaggacatggagccagaccctcagcaccatcctttaggccccaaaatctgaggctgcttcaccctcagcagcctcctgtgcaatatcaatatgaacctccaagtgccccttccaccactttctcaaactctccagcccccaattttctccctccacgaccagactttgtacccttccccccacccatgcctccgtcagcgcaaggccctcttcccccctgcccaatcaggccgcctttccccaaccaccagatgaggcaccccttcccagttcctccttgttttcctcccatgccaccaccaatgccttgtcctaataaccccccagtccctggggcacctcctggacaaggcactttccccttcatgatgccccctccctccatgcctcatcccccgccccctccagtcatgccgcagcaggttaattatcagtaccctccgggctattctcaccacaacttcccacctcccagttttaatagtttccagaacaaccctagttctttcctgcccagtgctaataacagcagtagtcctcatttcagacatctccctccatacccactcccaaaggctcccagtgagagaaggtccccagaaaggctgaaacactatgatgaccacaggcaccgagatcacagtcatgggcgaggtgagaggcatcggtccctggatcggcgggagcgaggccgcagtcccgacaggagaagacaagacagccggtacagatctgattatgaccgagggagaacaccatctcgccaccgcagctacgaacggagcagagagcgagaacgggagagacacaggcatcgagacaaccgaagatcaccatctctggaaaggtcctacaaaaaagagtataagagatctggaaggagttacggtttatcggttgttcctgaacctgctggatgcacaccagaattacctggggagattattaaaaatacagattcttgggccccacccctggagattgtgaatcatcgctccccaagtagggagaagaagagagctcgttgggaggaagaaaaagaccgttggagtgacaaccagagttctggcaaagacaagaactatacctcaatcaaggaaaaagagcccgaggagaccatgcctgacaagaatgaggaggaagaagaagaacttcttaagcctgtgtggattcgatgcactcattcagaaaactactactccagtgaccccatggatcaggtgggagattctacagtggttggaacgagtaggcttcgtgacttatatgacaaatttgaggaggagttggggagcaggcaagaaaaggccaaagctgctcggcctccgtgggaacctccaaagacgaagctcgatgaagatttagagagttccagtgaatccgagtgtgagtctgatgaggacagcacctgttctagcagctcagactctgaagtttttgacgttattgcagaaatcaaacgcaaaaaggcccaccctgaccgacttcatgatgaactttggtacaacgatccaggccagatgaatgatggaccactctgcaaatgcagcgcaaaggcaagacgcacaggaattaggcacagcatttatcctggagaagaggccatcaagccctgtcgtcctatgaccaacaatgctggcagacttttccactaccggatcacagtctccccgcctacgaactttttaactgacaggccaactgttatagaatacgatgatcacgagtatatctttgaaggattttctatgtttgcacatgcccccctgaccaatattccactgtgtaaagtaattagattcaacatagactacacgattcatttcattgaagagatgatgccggagaatttttgtgtgaaagggcttgaactcttttcactgttcctattcagagatattttggaattatatgactggaatcttaaaggtcctttgtttgaagacagccctccctgctgcccaagatttcatttcatgccacgttttgtaagatttcttccagatggaggaaaggaagtgctgtccatgcaccagattctcctgtacttgttaaggtgcagcaaagccctggtgcctgaggaggagattgccaatatgcttcagtgggaggagctggagtggcagaaatatgcagaagaatgcaaaggcatgattgttaccaaccctgggacgaaaccaagctctgtccgtatcgatcaactggatcgtgaacagttcaaccccgatgtgattacttttccgattatcgtccactttgggatacgccctgcacagttgagttatgcaggagacccacagtaccaaaaactgtggaagagttatgtgaaacttcgccacctcctagcaaatagtcccaaagtcaaacaaactgacaaacagaagctggcacagagggaggaagccctccaaaaaatacggcagaagaatacaatgagacgagaagtaacggtggagctaagtagccaaggattctggaaaactggcatccgttctgatgtctgtcagcatgcaatgatgctacctgttctgacccatcatatccgctaccaccaatgcctaatgcatttggacaagttgataggatatactttccaagatcgttgtctgttgcagctggccatgactcatccaagtcatcatttaaattttggaatgaatcctgatcatgccaggaattcattatctaactgtggaattcggcagcccaaatacggagacagaaaagttcatcacatgcacatgcggaagaaagggattaacaccttgataaatatcatgtcacgccttggccaagatgacccaactccctcgaggattaaccacaatgaacggttggaattcctgggtgatgctgttgttgaatttctgaccagcgtccatttgtactatttgtttcctagtctggaagaaggaggattagcaacctatcggactgccattgttcagaatcagcaccttgccatgctagcaaagaaacttgaactggatcgatttatgctgtatgctcacgggcctgacctttgtagagaatcggaccttcgacatgcaatggccaattgttttgaagcgttaataggagctgtttacttggagggaagcctggaggaagccaagcagttatttggacgcttgctctttaatgatccggacctgcgcgaagtctggctcaattatcctctccacccactccaactacaagagccaaatactgatcgacaacttattgaaacttctccagttctacaaaaacttactgagtttgaagaagcaattggagtaatttttactcatgttcgacttctggcaagggcattcacattgagaactgtgggatttaaccatctgaccctaggccacaatcagagaatggaattcctaggtgactccataatgcaactggtagccacagagtacttattcattcatttcccagatcatcatgaaggacacttaactttgttgcgaagctctttggtgaataatagaactcaggccaaggtagcggaggagctgggcatgcaggagtacgccataaccaacgacaagaccaagaggcctgtggcgcttcgcaccaagaccttggcggaccttttggaatcatttattgcagcgctgtacattgataaggatttggaatatgttcatactttcatgaatgtctgcttctttccacgattgaaagagttcattttgaatcaggattggaatgaccccaaatcccagcttcagcagtgttgcttgacacttaggacagaaggaaaagagccagacattcctctgtacaagactctgcagacagtgggcccatcccatgcccgaacctacactgtggctgtttatttcaagggagaaagaataggctgtgggaaaggaccaagtattcagcaagcggaaatgggagcagcaatggatgcgcttgaaaaatataattttccccagatggcccatcagaagcggttcatcgaacggaagtacagacaagagttaaaagaaatgaggtgggaaagagagcatcaagagagagagccagatgagactgaagacatcaagaaataaaggagggcatgcaagtgtggagtatttacttgctcagtaactgtgactgttgtctattgagacctagcctagttttcctgcagacaatgaatgaagtgtgctcattgaaataaaatacagagtcaaatcgctattgttgttttaatgatctgtttttagctggatggtctttattacaaagtattagatttttcttctatttaacggaaaacttgactttggtgaatgtgcattacttccttttattttgctctttaaataataaaattcaagaagcatattctatgtggaatagatcctgtttttccatctgtgtcccagattgtgaccctagactttcaattgacaagtaaaaaattgactttactagacattttgactgtgctctagtaacatctatcctttttcaaatctctggatttttaagtagattgttcagctttcatccggtggctgttcatcaagttatcagctgcaaatattgaacttacctctctctaagcagtgagtgttttgtagaaggaatccgtttaacaattaattggctaatgggagaaggggaaagactgatattcaagtcatacagattctttgaatcattagaataggagagaaatcatgattctaagccaggccacactttaaaccaagtgctctcaccctggggttagtggaacctttaagaagttaatgaacagacttcaaggaagtcaaaaacctcccaatactatattcaattttctgtgtgtgtttgagatttgagagggcatggggagcaggaaggaggagggtttatagcttttatcagcctctctaagtgggccctgcagtaaaaggctaacatgacattcaaagacataacattttaaaaaaagttattccaaactaaacatcactggtttcttattaataaaggcaaaacttctttgt

SEQ ID NO: 8843 - DNA, 3558 bp, Homo sapiens
  source 1..3558: mol_type = unassigned DNA
cacagaatgtcgttccacccgggacgagggtgtccccgaggacgaggaggacatggagccagaccctcagcaccatcctttaggccccaaaatctgaggctgcttcaccctcagcagcctcctgtgcaatatcaatatgaacctccaagtgccccttccaccactttctcaaactctccagcccccaattttctccctccacgaccagactttgtacccttccccccacccatgcctccgtcagcgcaaggccctcttcccccctgcccaatcaggccgcctttccccaaccaccagatgaggcaccccttcccagttcctccttgttttcctcccatgccaccaccaatgccttgtcctaataaccccccagtccctggggcacctcctggacaaggcactttccccttcatgatgccccctccctccatgcctcatcccccgccccctccagtcatgccgcagcaggttaattatcagtaccctccgggctattctcaccacaacttcccacctcccagttttaatagtttccagaacaaccctagttctttcctgcccagtgctaataacagcagtagtcctcatttcagacatctccctccatacccactcccaaaggctcccagtgagagaaggtccccagaaaggctgaaacactatgatgaccacaggcaccgagatcacagtcatgggcgaggtgagaggcatcggtccctggatcggcgggagcgaggccgcagtcccgacaggagaagacaagacagccggtacagatctgattatgaccgagggagaacaccatctcgccaccgcagctacgaacggagcagagagcgagaacgggagagacacaggcatcgagacaaccgaagatcaccatctctggaaaggtcctacaaaaaagagtataagagatctggaagtcgctccccaagtagggagaagaagagagctcgttgggaggaagaaaaagaccgttggagtgacaaccagagttctggcaaagacaagaactatacctcaatcaaggaaaaagagcccgaggagaccatgcctgacaagaatgaggaggaagaagaagaacttcttaagcctgtgtggattcgatgcactcattcagaaaactactactccagtgaccccatggatcaggtgggagattctacagtggttggaacgagtaggcttcgtgacttatatgacaaatttgaggaggagttggggagcaggcaagaaaaggccaaagctgctcggcctccgtgggaacctccaaagacgaagctcgatgaagatttagagagttccagtgaatccgagtgtgagtctgatgaggacagcacctgttctagcagctcagactctgaagtttttgacgttattgcagaaatcaaacgcaaaaaggcccaccctgaccgacttcatgatgaactttggtacaacgatccaggccagatgaatgatggaccactctgcaaatgcagcgcaaaggcaagacgcacaggaattaggcacagcatttatcctggagaagaggccatcaagccctgtcgtcctatgaccaacaatgctggcagacttttccactaccggatcacagtctccccgcctacgaactttttaactgacaggccaactgttatagaatacgatgatcacgagtatatctttgaaggattttctatgtttgcacatgcccccctgaccaatattccactgtgtaaagtaattagattcaacatagactacacgattcatttcattgaagagatgatgccggagaatttttgtgtgaaagggcttgaactcttttcactgttcctattcagagatattttggaattatatgactggaatcttaaaggtcctttgtttgaagacagccctccctgctgcccaagatttcatttcatgccacgttttgtaagatttcttccagatggaggaaaggaagtgctgtccatgcaccagattctcctgtacttgttaaggtgcagcaaagccctggtgcctgaggaggagattgccaatatgcttcagtgggaggagctggagtggcagaaatatgcagaagaatgcaaaggcatgattgttaccaaccctgggacgaaaccaagctctgtccgtatcgatcaactggatcgtgaacagttcaaccccgatgtgattacttttccgattatcgtccactttgggatacgccctgcacagttgagttatgcaggagacccacagtaccaaaaactgtggaagagttatgtgaaacttcgccacctcctagcaaatagtcccaaagtcaaacaaactgacaaacagaagctggcacagagggaggaagccctccaaaaaatacggcagaagaatacaatgagacgagaagtaacggtggagctaagtagccaaggattctggaaaactggcatccgttctgatgtctgtcagcatgcaatgatgctacctgttctgacccatcatatccgctaccaccaatgcctaatgcatttggacaagttgataggatatactttccaagatcgttgtctgttgcagctggccatgactcatccaagtcatcatttaaattttggaatgaatcctgatcatgccaggaattcattatctaactgtggaattcggcagcccaaatacggagacagaaaagttcatcacatgcacatgcggaagaaagggattaacaccttgataaatatcatgtcacgccttggccaagatgacccaactccctcgaggattaaccacaatgaacggttggaattcctgggtgatgctgttgttgaatttctgaccagcgtccatttgtactatttgtttcctagtctggaagaaggaggattagcaacctatcggactgccattgttcagaatcagcaccttgccatgctagcaaagaaacttgaactggatcgatttatgctgtatgctcacgggcctgacctttgtagagaatcggaccttcgacatgcaatggccaattgttttgaagcgttaataggagctgtttacttggagggaagcctggaggaagccaagcagttatttggacgcttgctctttaatgatccggacctgcgcgaagtctggctcaattatcctctccacccactccaactacaagagccaaatactgatcgacaacttattgaaacttctccagttctacaaaaacttactgagtttgaagaagcaattggagtaatttttactcatgttcgacttctggcaagggcattcacattgagaactgtgggatttaaccatctgaccctaggccacaatcagagaatggaattcctaggtgactccataatgcaactggtagccacagagtacttattcattcatttcccagatcatcatgaaggacacttaactttgttgcgaagctctttggtgaataatagaactcaggccaaggtagcggaggagctgggcatgcaggagtggagtatttacttgctcagtaactgtgactgttgtctattgagacctagcctagttttcctgcagacaatgaatgaagtgtgctcattgaaataa

SEQ ID NO: 8844 - DNA, 4991 bp, Homo sapiens
  source 1..4991: mol_type = unassigned DNA
gagcttatattctctgtggaagatgtgacatatccaggcggaacatcatgatgcagggaaacacatgtcacagaatgtcgttccacccgggacgagggtgtccccgaggacgaggaggacatggagccagaccctcagcaccatcctttaggccccaaaatctgaggctgcttcaccctcagcagcctcctgtgcaatatcaatatgaacctccaagtgccccttccaccactttctcaaactctccagcccccaattttctccctccacgaccagactttgtacccttccccccacccatgcctccgtcagcgcaaggccctcttcccccctgcccaatcaggccgcctttccccaaccaccagatgaggcaccccttcccagttcctccttgttttcctcccatgccaccaccaatgccttgtcctaataaccccccagtccctggggcacctcctggacaaggcactttccccttcatgatgccccctccctccatgcctcatcccccgccccctccagtcatgccgcagcaggttaattatcagtaccctccgggctattctcaccacaacttcccacctcccagttttaatagtttccagaacaaccctagttctttcctgcccagtgctaataacagcagtagtcctcatttcagacatctccctccatacccactcccaaaggctcccagtgagagaaggtccccagaaaggctgaaacactatgatgaccacaggcaccgagatcacagtcatgggcgaggtgagaggcatcggtccctggatcggcgggagcgaggccgcagtcccgacaggagaagacaagacagccggtacagatctgattatgaccgagggagaacaccatctcgccaccgcagctacgaacggagcagagagcgagaacgggagagacacaggcatcgagacaaccgaagatcaccatctctggaaaggtcctacaaaaaagagtataagagatctggaagtcgctccccaagtagggagaagaagagagctcgttgggaggaagaaaaagaccgttggagtgacaaccagagttctggcaaagacaagaactatacctcaatcaaggaaaaagagcccgaggagaccatgcctgacaagaatgaggaggaagaagaagaacttcttaagcctgtgtggattcgatgcactcattcagaaaactactactccagtgaccccatggatcaggtgggagattctacagtggttggaacgagtaggcttcgtgacttatatgacaaatttgaggaggagttggggagcaggcaagaaaaggccaaagctgctcggcctccgtgggaacctccaaagacgaagctcgatgaagatttagagagttccagtgaatccgagtgtgagtctgatgaggacagcacctgttctagcagctcagactctgaagtttttgacgttattgcagaaatcaaacgcaaaaaggcccaccctgaccgacttcatgatgaactttggtacaacgatccaggccagatgaatgatggaccactctgcaaatgcagcgcaaaggcaagacgcacaggaattaggcacagcatttatcctggagaagaggccatcaagccctgtcgtcctatgaccaacaatgctggcagacttttccactaccggatcacagtctccccgcctacgaactttttaactgacaggccaactgttatagaatacgatgatcacgagtatatctttgaaggattttctatgtttgcacatgcccccctgaccaatattccactgtgtaaagtaattagattcaacatagactacacgattcatttcattgaagagatgatgccggagaatttttgtgtgaaagggcttgaactcttttcactgttcctattcagagatattttggaattatatgactggaatcttaaaggtcctttgtttgaagacagccctccctgctgcccaagatttcatttcatgccacgttttgtaagatttcttccagatggaggaaaggaagtgctgtccatgcaccagattctcctgtacttgttaaggtgcagcaaagccctggtgcctgaggaggagattgccaatatgcttcagtgggaggagctggagtggcagaaatatgcagaagaatgcaaaggcatgattgttaccaaccctgggacgaaaccaagctctgtccgtatcgatcaactggatcgtgaacagttcaaccccgatgtgattacttttccgattatcgtccactttgggatacgccctgcacagttgagttatgcaggagacccacagtaccaaaaactgtggaagagttatgtgaaacttcgccacctcctagcaaatagtcccaaagtcaaacaaactgacaaacagaagctggcacagagggaggaagccctccaaaaaatacggcagaagaatacaatgagacgagaagtaacggtggagctaagtagccaaggattctggaaaactggcatccgttctgatgtctgtcagcatgcaatgatgctacctgttctgacccatcatatccgctaccaccaatgcctaatgcatttggacaagttgataggatatactttccaagatcgttgtctgttgcagctggccatgactcatccaagtcatcatttaaattttggaatgaatcctgatcatgccaggaattcattatctaactgtggaattcggcagcccaaatacggagacagaaaagttcatcacatgcacatgcggaagaaagggattaacaccttgataaatatcatgtcacgccttggccaagatgacccaactccctcgaggattaaccacaatgaacggttggaattcctgggtgatgctgttgttgaatttctgaccagcgtccatttgtactatttgtttcctagtctggaagaaggaggattagcaacctatcggactgccattgttcagaatcagcaccttgccatgctagcaaagaaacttgaactggatcgatttatgctgtatgctcacgggcctgacctttgtagagaatcggaccttcgacatgcaatggccaattgttttgaagcgttaataggagctgtttacttggagggaagcctggaggaagccaagcagttatttggacgcttgctctttaatgatccggacctgcgcgaagtctggctcaattatcctctccacccactccaactacaagagccaaatactgatcgacaacttattgaaacttctccagttctacaaaaacttactgagtttgaagaagcaattggagtaatttttactcatgttcgacttctggcaagggcattcacattgagaactgtgggatttaaccatctgaccctaggccacaatcagagaatggaattcctaggtgactccataatgcaactggtagccacagagtacttattcattcatttcccagatcatcatgaaggacacttaactttgttgcgaagctctttggtgaataatagaactcaggccaaggtagcggaggagctgggcatgcaggagtacgccataaccaacgacaagaccaagaggcctgtggcgcttcgcaccaagaccttggcggaccttttggaatcatttattgcagcgctgtacattgataaggatttggaatatgttcatactttcatgaatgtctgcttctttccacgattgaaagagttcattttgaatcaggattggaatgaccccaaatcccagcttcagcagtgttgcttgacacttaggacagaaggaaaagagccagacattcctctgtacaagactctgcagacagtgggcccatcccatgcccgaacctacactgtggctgtttatttcaagggagaaagaataggctgtgggaaaggaccaagtattcagcaagcggaaatgggagcagcaatggatgcgcttgaaaaatataattttccccagatggcccatcagaagcggttcatcgaacggaagtacagacaagagttaaaagaaatgaggtgggaaagagagcatcaagagagagagccagatgagactgaagacatcaagaaataaaggagggcatgcaagtgtggagtatttacttgctcagtaactgtgactgttgtctattgagacctagcctagttttcctgcagacaatgaatgaagtgtgctcattgaaataaaatacagagtcaaatcgctattgttgttttaatgatctgtttttagctggatggtctttattacaaagtattagatttttcttctatttaacggaaaacttgactttggtgaatgtgcattacttccttttattttgctctttaaataataaaattcaagaagcatattctatgtggaatagatcctgtttttccatctgtgtcccagattgtgaccctagactttcaattgacaagtaaaaaattgactttactagacattttgactgtgctctagtaacatctatcctttttcaaatctctggatttttaagtagattgttcagctttcatccggtggctgttcatcaagttatcagctgcaaatattgaacttacctctctctaagcagtgagtgttttgtagaaggaatccgtttaacaattaattggctaatgggagaaggggaaagactgatattcaagtcatacagattctttgaatcattagaataggagagaaatcatgattctaagccaggccacactttaaaccaagtgctctcaccctggggttagtggaacctttaagaagttaatgaacagacttcaaggaagtcaaaaacctcccaatactatattcaattttctgtgtgtgtttgagatttgagagggcatggggagcaggaaggaggagggtttatagcttttatcagcctctctaagtgggccctgcagtaaaaggctaacatgacattcaaagacataacattttaaaaaaagttattccaaactaaacatcactggtttcttattaataaaggcaaaacttctttgt

SEQ ID NO: 8845 - DNA, 860 bp, Homo sapiens
  source 1..860: mol_type = unassigned DNA
gctttcgttgacgcgccaatcaccgcgcacaaggccctgcggtgggctgaagagttttccctcccttggcccagctttctcaggttgcttttcccggggatgtgaaggatacagaaatgactgtgaatcaacccatatcatcaaggagctgataatctagtggaagagttagacgtgtgcatacttcactatgatatgaggcagtctctgagcttatattctctgtggaagatgtgacatatccaggcggaacatcatgatgcagggaaacacatgtcacagaatgtcgttccacccgggacgagggtgtccccgaggacgaggaggacatggagccagaccctcagcaccatcctttaggccccaaaatctgaggctgcttcaccctcagcagcctcctgtgcaatatcaatatgaacctccaagtgccccttccaccactttctcaaactctccagcccccaattttctccctccacgaccagactttgtacccttccccccacccatgcctccgtcagcgcaaggccctcttcccccctgcccaatcaggccgcctttccccaaccaccagatgaggcaccccttcccagttcctccttgttttcctcccatgccaccaccaatgccttgtcctaataaccccccagtccctggggcacctcctggacaaggcactttccccttcatgatgccccctccctccatgcctcatcccccgccccctccagtcatgccgcagcaggttaattatcagtaccctccgggctattctcaccacaacttcccacctcccagttttaatagtttccagaacaaccctagttctttcctgcccagtgctaataacagcagtagtc

SEQ ID NO: 8846 - DNA, 5305 bp, Homo sapiens
  source 1..5305: mol_type = unassigned DNA
ctgtcttggtacctgcggtagtagcctggctttgctctgacggcgatctcgcggcccgagagccttttataggttgcttttcccggggatgtgaaggatacagaaatgactgtgaatcaacccatatcatcaaggagctgataatctagtggaagagttagacgtgtgcatacttcactatgatatgaggcagtctctgagcttatattctctgtggaagatgtgacatatccaggcggaacatcatgatgcagggaaacacatgtcacagaatgtcgttccacccgggacgagggtgtccccgaggacgaggaggacatggagccagaccctcagcaccatcctttaggccccaaaatctgaggctgcttcaccctcagcagcctcctgtgcaatatcaatatgaacctccaagtgccccttccaccactttctcaaactctccagcccccaattttctccctccacgaccagactttgtacccttccccccacccatgcctccgtcagcgcaaggccctcttcccccctgcccaatcaggccgcctttccccaaccaccagatgaggcaccccttcccagttcctccttgttttcctcccatgccaccaccaatgccttgtcctaataaccccccagtccctggggcacctcctggacaaggcactttccccttcatgatgccccctccctccatgcctcatcccccgccccctccagtcatgccgcagcaggttaattatcagtaccctccgggctattctcaccacaacttcccacctcccagttttaatagtttccagaacaaccctagttctttcctgcccagtgctaataacagcagtagtcctcatttcagacatctccctccatacccactcccaaaggctcccagtgagagaaggtccccagaaaggctgaaacactatgatgaccacaggcaccgagatcacagtcatgggcgaggtgagaggcatcggtccctggatcggcgggagcgaggccgcagtcccgacaggagaagacaagacagccggtacagatctgattatgaccgagggagaacaccatctcgccaccgcagctacgaacggagcagagagcgagaacgggagagacacaggcatcgagacaaccgaagatcaccatctctggaaaggtcctacaaaaaagagtataagagatctggaaggagttacggtttatcggttgttcctgaacctgctggatgcacaccagaattacctggggagattattaaaaatacagattcttgggccccacccctggagattgtgaatcatcgctccccaagtagggagaagaagagagctcgttgggaggaagaaaaagaccgttggagtgacaaccagagttctggcaaagacaagaactatacctcaatcaaggaaaaagagcccgaggagaccatgcctgacaagaatgaggaggaagaagaagaacttcttaagcctgtgtggattcgatgcactcattcagaaaactactactccagtgaccccatggatcaggtgggagattctacagtggttggaacgagtaggcttcgtgacttatatgacaaatttgaggaggagttggggagcaggcaagaaaaggccaaagctgctcggcctccgtgggaacctccaaagacgaagctcgatgaagatttagagagttccagtgaatccgagtgtgagtctgatgaggacagcacctgttctagcagctcagactctgaagtttttgacgttattgcagaaatcaaacgcaaaaaggcccaccctgaccgacttcatgatgaactttggtacaacgatccaggccagatgaatgatggaccactctgcaaatgcagcgcaaaggcaagacgcacaggaattaggcacagcatttatcctggagaagaggccatcaagccctgtcgtcctatgaccaacaatgctggcagacttttccactaccggatcacagtctccccgcctacgaactttttaactgacaggccaactgttatagaatacgatgatcacgagtatatctttgaaggattttctatgtttgcacatgcccccctgaccaatattccactgtgtaaagtaattagattcaacatagactacacgattcatttcattgaagagatgatgccggagaatttttgtgtgaaagggcttgaactcttttcactgttcctattcagagatattttggaattatatgactggaatcttaaaggtcctttgtttgaagacagccctccctgctgcccaagatttcatttcatgccacgttttgtaagatttcttccagatggaggaaaggaagtgctgtccatgcaccagattctcctgtacttgttaaggtgcagcaaagccctggtgcctgaggaggagattgccaatatgcttcagtgggaggagctggagtggcagaaatatgcagaagaatgcaaaggcatgattgttaccaaccctgggacgaaaccaagctctgtccgtatcgatcaactggatcgtgaacagttcaaccccgatgtgattacttttccgattatcgtccactttgggatacgccctgcacagttgagttatgcaggagacccacagtaccaaaaactgtggaagagttatgtgaaacttcgccacctcctagcaaatagtcccaaagtcaaacaaactgacaaacagaagctggcacagagggaggaagccctccaaaaaatacggcagaagaatacaatgagacgagaagtaacggtggagctaagtagccaaggattctggaaaactggcatccgttctgatgtctgtcagcatgcaatgatgctacctgttctgacccatcatatccgctaccaccaatgcctaatgcatttggacaagttgataggatatactttccaagatcgttgtctgttgcagctggccatgactcatccaagtcatcatttaaattttggaatgaatcctgatcatgccaggaattcattatctaactgtggaattcggcagcccaaatacggagacagaaaagttcatcacatgcacatgcggaagaaagggattaacaccttgataaatatcatgtcacgccttggccaagatgacccaactccctcgaggattaaccacaatgaacggttggaattcctgggtgatgctgttgttgaatttctgaccagcgtccatttgtactatttgtttcctagtctggaagaaggaggattagcaacctatcggactgccattgttcagaatcagcaccttgccatgctagcaaagaaacttgaactggatcgatttatgctgtatgctcacgggcctgacctttgtagagaatcggaccttcgacatgcaatggccaattgttttgaagcgttaataggagctgtttacttggagggaagcctggaggaagccaagcagttatttggacgcttgctctttaatgatccggacctgcgcgaagtctggctcaattatcctctccacccactccaactacaagagccaaatactgatcgacaacttattgaaacttctccagttctacaaaaacttactgagtttgaagaagcaattggagtaatttttactcatgttcgacttctggcaagggcattcacattgagaactgtgggatttaaccatctgaccctaggccacaatcagagaatggaattcctaggtgactccataatgcaactggtagccacagagtacttattcattcatttcccagatcatcatgaaggacacttaactttgttgcgaagctctttggtgaataatagaactcaggccaaggtagcggaggagctgggcatgcaggagtacgccataaccaacgacaagaccaagaggcctgtggcgcttcgcaccaagaccttggcggaccttttggaatcatttattgcagcgctgtacattgataaggatttggaatatgttcatactttcatgaatgtctgcttctttccacgattgaaagagttcattttgaatcaggattggaatgaccccaaatcccagcttcagcagtgttgcttgacacttaggacagaaggaaaagagccagacattcctctgtacaagactctgcagacagtgggcccatcccatgcccgaacctacactgtggctgtttatttcaagggagaaagaataggctgtgggaaaggaccaagtattcagcaagcggaaatgggagcagcaatggatgcgcttgaaaaatataattttccccagatggcccatcagaagcggttcatcgaacggaagtacagacaagagttaaaagaaatgaggtgggaaagagagcatcaagagagagagccagatgagactgaagacatcaagaaataaaggagggcatgcaagtgtggagtatttacttgctcagtaactgtgactgttgtctattgagacctagcctagttttcctgcagacaatgaatgaagtgtgctcattgaaataaaatacagagtcaaatcgctattgttgttttaatgatctgtttttagctggatggtctttattacaaagtattagatttttcttctatttaacggaaaacttgactttggtgaatgtgcattacttccttttattttgctctttaaataataaaattcaagaagcatattctatgtggaatagatcctgtttttccatctgtgtcccagattgtgaccctagactttcaattgacaagtaaaaaattgactttactagacattttgactgtgctctagtaacatctatcctttttcaaatctctggatttttaagtagattgttcagctttcatccggtggctgttcatcaagttatcagctgcaaatattgaacttacctctctctaagcagtgagtgttttgtagaaggaatccgtttaacaattaattggctaatgggagaaggggaaagactgatattcaagtcatacagattctttgaatcattagaataggagagaaatcatgattctaagccaggccacactttaaaccaagtgctctcaccctggggttagtggaacctttaagaagttaatgaacagacttcaaggaagtcaaaaacctcccaatactatattcaattttctgtgtgtgtttgagatttgagagggcatggggagcaggaaggaggagggtttatagcttttatcagcctctctaagtgggccctgcagtaaaaggctaacatgacattcaaagacataacattttaaaaaaagttattccaaactaaacatcactggtttcttattaataaaggcaaaacttctttgtaaaac

SEQ ID NO: 8847 - DNA, 1387 bp, Homo sapiens
  source 1..1387: mol_type = unassigned DNA
ctatcgccaggccgagagtgggcgtggccgacgtggggtgggtagcagccgaccgagtcggaccggccagttgggcgcgcttccgggtgtcacctccagagggcgccggctgcggagccgccctcagagtcgcgaggccggacgcagcgcggcgccgccccactcgccccagccgccgccatgaaggccgtggtgcagcgcgtcacccgggccagcgtcacagttggaggagagcagattagtgccattggaaggggcatatgtgtgttgctgggtatttccctggaggatacgcagaaggaactggaacacatggtccgaaagattctaaacctgcgtgtatttgaggatgagagtgggaagcactggtcgaagagtgtgatggacaaacagtacgagattctgtgtgtcagccagtttaccctccagtgtgtcctgaagggaaacaagcctgatttccacctagcaatgcccacggagcaggcagagggcttctacaacagcttcctggagcagctgcgtaaaacatacaggccggagcttatcaaagatggcaagtttggggcctacatgcaggtgcacattcagaatgatgggcctgtgaccatagagctggaatcgccagctcccggcactgctacctctgacccaaagcagctgtcaaagctcgaaaaacagcagcagaggaaagaaaagaccagagctaagggaccttctgaatcaagcaaggaaagaaacactccccgaaaagaagaccgcagtgccagcagcggggctgagggcgacgtgtcctctgaacgggagccgtagctcaggaggcagaattcagtgtgttatcattgggcagaactggatcctgaaaaattcaagatgctaagcacctacactactttaagaatttggaactgaaacatgaagaggaagacagaaataagaatttgggaacctgaatagctctgcaaaaaacaccaaaggaccgttttatcgttttctgttgttgctgtggtggagtgatgcagtgggcactgccggtgggccagggggcgggtgcgcatgtggtagaaggtgtgcgctcgtgcctcccccacagaaaggctttgttggtttctaccacatcttggcttgcttttggaacaggctggcccagcatcatttgtcatcaagtccactgtggtgtattctgcgtgtccatggcgggggttctccaatacactcacactgtccatgttctttttattgccagggcccgtgttgaagtgtcaagagagcaatcatcaatgataatgtattgtgtgagacctttgcatcttgtaaattttctcttttttctaaaaataaataataataaaatcctaaatctcaacaaaccactttattatcaaacaaa

SEQ ID NO: 8848 - DNA, 1440 bp, Homo sapiens
  source 1..1440: mol_type = unassigned DNA
tcacagagcgagaaggtgtcaggagcagcccagttgtgtctctctctctacctctgtgaagggcgcgaatgggcagagcagaacttctagaagggaagatgagcacccaggatccctcagatctgtggagcagatccgatggagaggctgagctgctccaggacttggggtggtatcacggcaacctcacacgccatgctgctgaagctcttctcctctcaaatggatgtgacggcagctaccttctgagggacagcaatgagaccaccgggctgtactctctctctgtgagggccaaagattctgttaaacactttcatgttgaatatactggatattcatttaaatttggctttaatgaattctcatctttgaaggattttgtcaagcattttgcaaatcagcctttgattggaagcgagacaggcactctgatggttctaaaacatccctacccaagaaaagtggaagaaccctccatttatgaatctgtccgggttcacacagcaatgcagacaggaagaacagaagatgaccttgtgcccacagcaccttctctgggcaccaaagaaggttacctcaccaaacagggaggcctggtcaagacctggaaaacaagatggtttactctgcacaggaatgaactgaaatacttcaaagaccagatgtcaccagaaccaattcggatcctagacctaacagaatgttcagctgtacaattcgattattcacaagaaagggtaaactgtttttgtttggtatttccattcaggacattttatctctgtgcaaagaccggagtagaagctgatgagtggatcaagatattacgctggaaattgtcacaaataagaaaacagctcaaccaaggggaaggcacgatccgatctcggtcgttcatctttaaatagatctttcttgccaaggaatgctctggcccaggagcaaggtggaatgtttccctgacgctgtgatctgcagcaggcttcaaatgaaaaccgactaaggattttctttcaaaaacaaatcagaagcagatgctgattgggacccatataccacgttgctgactcacgttgctgcccttccatgatgttgccatctccttgagaacactgaagcaatcaccattctgatagaaagtgcttaaaccaccactcttaggtctgctcactcttagaacacacaatggaagaggaagggtttttgttttcactcattgtggtccccaagcctattgacactagttgcctagagtcccactgtgagtcatggtcagcctgtctgacatccaggttgtgctattaaccaagaaggaaacagatacttggaggcttagatgacttctgcaggatttatattcagatagaaaacatcaaatattttcaggggagaggtttttttttttaatttttccccctttatacaaaaaaaaaagaa

SEQ ID NO: 8849 - DNA, 5738 bp, Homo sapiens
  source 1..5738: mol_type = unassigned DNA
gtggctgagccgagccgggccgtgccttcccctcctcacccccagccccgcccgtcccggcgcagagctgcagaggcaccggacgagagagggctccgcgggcccagctggcagccaggccggagacaagttgcagtcccgggctctggtgacgccgtggccgcagctggaagaggaaaacaaggatcagattggagaagtgatttatctaagatcccacagtggactggcagcagcactgagacctcagcctagtctcctgatccccaagcagggccctgcctaaggaacacactctgcagagtgctgggccaaagcagggttttccaactaatcttagaaggtaaagtccatgaagggtctccattttgggacattctaatccctgagcccctattattttcatcatgggcttctgcctggctctagcatggacacttctggttggggcatggacccctctgggagctcagaaccccatttcgtgggaggtgcagcgatttgatgggtggtacaacaacctcatggagcacagatggggcagcaaaggctcccggctgcagcgcctggtcccagccagctatgcagatggcgtgtaccagcccttgggagaaccccacctgcccaacccccgagaccttagcaacaccatctcaaggggccctgcagggctggcctccctgagaaaccgcacagtgttgggggtcttctttggctatcacgtgctttcagacctggtgagcgtggaaactcccggctgccccgccgagttcctcaacattcgcatcccgcccggagaccccatgttcgaccccgaccagcgcggggacgtggtgctgcccttccagagaagccgctgggaccccgagaccggacggagtcccagcaatccccgggacccggccaaccaggtgacgggctggctggacggcagcgccatctatggttcctcgcattcctggagcgacgcgctgcggagcttctccaggggacagctggcgtcggggcccgaccccgcttttccccgagactcgcagaaccccctgctcatgtgggcggcgcccgaccccgccaccgggcagaacgggccccgggggctgtacgccttcggggcagagagagggaaccgggaacccttcctgcaggcgctgggcctgctctggttccgctaccacaacctgtgggcgcagaggctggcccgccagcacccagactgggaggacgaggagctgttccagcacgcacgcaagagggtcatcgccacctaccagaacatcgctgtgtatgagtggctgcccagcttcctgcagaaaacactcccggagtatacaggataccggccatttctggaccccagcatctcctcagagttcgtggcggcctctgagcagttcctgtccaccatggtgccccctggcgtctacatgagaaatgccagctgccacttccagggggtcatcaatcggaactcaagtgtctccagagctctccgggtctgcaacagctactggagccgtgagcacccaagcctacaaagtgctgaagatgtggatgcactgctgctgggcatggcctcccagatcgcagagcgagaggaccatgtgttggttgaagatgtgcgggatttctggcctgggccactgaagttttcccgcacagaccacctggccagctgcctgcagcggggccgggatctgggcctgccctcttacaccaaggccagggcagcactgggcttgtctcccattacccgctggcaggacatcaaccctgcactctcccggagcaatgacactgtactggaggccacagctgccctgtacaaccaggacttatcctggctagagctgctccctgggggactcctggagagccaccgggaccctggacctctgttcagcaccatcgtccttgaacaatttgtgcggctacgggatggtgaccgctactggtttgagaacaccaggaatgggctgttctccaagaaggagattgaagaaatccgaaataccaccctgcaggacgtgctggtcgctgttatcaacattgaccccagtgctctgcagcccaatgtctttgtctggcataaaggagacccctgtccgcagccgagacagctcagcactgaaggcctgccagcgtgtgctccctctgttgttcgtgactattttgagggcagtggatttggcttcggggtcaccatcgggaccctctgttgcttccctttggtgagcctgctcagtgcctggattgttgcccggctccggatgagaaatttcaagaggctccagggccaggaccgccagagcatcgtgtctgagaagctcgtgggaggcatggaagctttggaatggcaaggccacaaggagccctgccggcccgtgcttgtgtacctgcagcccgggcagatccgtgtggtagatggcaggctcaccgtgctccgcaccatccagctgcagcctccacagaaggtcaacttcgtcctgtccagcaaccgtggacgccgcactctgctgctcaagatccccaaggagtatgacctggtgctgctgtttaacttggaggaagagcggcaggcgctggtggaaaatctccggggagctctgaaggagagcgggttgagcatccaggagtgggagctgcgggagcaggagctgatgagagcagctgtgacacgggagcagcggaggcacctcctggagacctttttcaggcaccttttctcccaggtgctggacatcaaccaggccgacgcagggaccctgcccctggactcctcccagaaggtgcgggaggccctgacctgtgagctgagcagggccgagtttgccgagtccctgggcctcaagccccaggacatgtttgtggagtccatgttctctctggctgacaaggatggcaatggctacctgtccttccgagagttcctggacatcctggtggtcttcatgaaaggctctcctgaggaaaagtctcgccttatgttccgcatgtacgactttgatgggaatggcctcatttccaaggatgagttcatcaggatgctgagatccttcatcgagatctccaacaactgcctgtccaaggcccagctggctgaggtggtggagtccatgttccgggagtcgggattccaggacaaggaggaactgacatgggaagattttcacttcatgctgcgggaccacaatagcgagctccgcttcacgcagctctgtgtcaaaggggtggaggtgcctgaagtcatcaaggacctctgccggcgagcctcctacatcagccaggatatgatctgtccctctcccagagtgagtgcccgctgttcccgcagcgacattgagactgagttgacacctcagagactgcagtgccccatggacacagaccctccccaggagattcggcggaggtttggcaagaaggtaacgtcattccagcccttgctgttcactgaggcgcaccgagagaagttccaacgcagctgtctccaccagacggtgcaacagttcaagcgcttcattgagaactaccggcgccacatcggctgcgtggccgtgttctacgccatcgctggggggcttttcctggagagggcctactactacgcctttgccgcacatcacacgggcatcacagacaccacccgcgtgggaatcatcctgtcgcggggcacagcagccagcatctctttcatgttctcctacatcttgctcaccatgtgccgcaacctcatcaccttcctgcgagaaaccttcctcaaccgctacgtgcccttcgacgccgccgtggacttccatcgcctcattgcctccaccgccatcgtcctcacagtcttacacagtgtgggccatgtggtgaatgtgtacctgttctccatcagccccctcagcgtcctctcttgcctctttcctggcctcttccatgatgatgggtctgagctcccccagaagtattactggtggttcttccagaccgtaccaggcctcacgggggttgtgctgctcctgatcctggccatcatgtatgtctttgcctcccaccacttccgccgccgcagtttccggggcttctggctgacccaccacctctacatcctgctctatgtcctgctcatcatccatggtagctttgccctgatccagctgccccgtttccacatcttcttcctggtcccagcaatcatctatgggggcgacaagctggtgagcctgagccggaagaaggtggagatcagcgtggtgaaggcggagctgctgccctcaggagtgacccacctgcggttccagcggccccagggctttgagtacaagtcagggcagtgggtgcggatcgcttgcctggctctggggaccaccgagtaccaccccttcacactgacctctgcgccccatgaggacacgcttagcctgcacatccgggcagcagggccctggaccactcgcctcagggagatctactcagccccgacgggtgacagatgtgccagatacccaaagctgtaccttgatggaccatttggagagggccaccaggagtggcataagtttgaggtgtcagtgttagtgggagggggcattggggtcaccccttttgcctccatcctcaaagacctggtcttcaagtcatccgtcagctgccaagtgttctgtaagaagatctacttcatctgggtgacgcggacccagcgtcagtttgagtggctggctgacatcatccgagaggtggaggagaatgaccaccaggacctggtgtctgtgcacatctacatcacccagctggctgagaagttcgacctcaggaccactatgctgtacatctgtgagcggcacttccagaaggttctgaaccggagtctattcacaggcctgcgctccatcacccactttggccgtcccccctttgagcccttcttcaactccctgcaggaggtccacccccaggtccggaagatcggggtgtttagctgtggcccccctggcatgaccaagaatgtggaaaaggcctgtcagctcatcaacaggcaggaccggactcacttctcccaccattatgagaacttctaggcccctgcccgggggttctgcccactgcccagttgagcagaggtttgagcccacacctcacctctgttcttcctatttctggctgcctcagccttctctgatttcccacctcccaaccttgttccaggtggccatagtcagtcaccatgtgtgggctcagggacccccaggaccaggatgtgtctcagcctggagaaatggtgggggggcagtgtctagggactagagtgagaagtaggggagctactgatttggggcaaagtgaaacctctgcttccagacttcagaaacaaatctcagaagacaagctgacctgacaagtactatgtgtgtgcatgtctgtatgtgtgttggggcggtgagtgtaaggatgcagtgggagcatggatgctggcatcttagaaccctccctactcccatacctcctcctcttctgggctccccactgtcagacgggctggcaaatgccttgcaggaggtagaggctggacccatggcaagccatttacagaaacccactcggcaccccagtctaacaccacaactaatttcacccaaggttttaagcacgttctttcatcagaccctggcccaatacctatgtatgcaatgctcctcagccctcttctccctgctccagtagtctcccttccaaataaatcacttttctgcctt

SEQ ID NO: 8850 - DNA, 5483 bp, Homo sapiens
  source 1..5483: mol_type = unassigned DNA
gcagagctgcagaggcaccggacgagagagggctccgcgggcccagctggcagccaggccggagacaagttgcagtcccgggctctggtgacgccgtggccgcagggtctccattttgggacattctaatccctgagcccctattattttcatcatgggcttctgcctggctctagcatggacacttctggttggggcatggacccctctgggagctcagaaccccatttcgtgggaggtgcagcgatttgatgggtggtacaacaacctcatggagcacagatggggcagcaaaggctcccggctgcagcgcctggtcccagccagctatgcagatggcgtgtaccagcccttgggagaaccccacctgcccaacccccgagaccttagcaacaccatctcaaggggccctgcagggctggcctccctgagaaaccgcacagtgttgggggtcttctttggctatcacgtgctttcagacctggtgagcgtggaaactcccggctgccccgccgagttcctcaacattcgcatcccgcccggagaccccatgttcgaccccgaccagcgcggggacgtggtgctgcccttccagagaagccgctgggaccccgagaccggacggagtcccagcaatccccgggacccggccaaccaggtgacgggctggctggacggcagcgccatctatggttcctcgcattcctggagcgacgcgctgcggagcttctccaggggacagctggcgtcggggcccgaccccgcttttccccgagactcgcagaaccccctgctcatgtgggcggcgcccgaccccgccaccgggcagaacgggccccgggggctgtacgccttcggggcagagagagggaaccgggaacccttcctgcaggcgctgggcctgctctggttccgctaccacaacctgtgggcgcagaggctggcccgccagcacccagactgggaggacgaggagctgttccagcacgcacgcaagagggtcatcgccacctaccagaacatcgctgtgtatgagtggctgcccagcttcctgcagaaaacactcccggagtatacaggataccggccatttctggaccccagcatctcctcagagttcgtggcggcctctgagcagttcctgtccaccatggtgccccctggcgtctacatgagaaatgccagctgccacttccagggggtcatcaatcggaactcaagtgtctccagagctctccgggtctgcaacagctactggagccgtgagcacccaagcctacaaagtgctgaagatgtggatgcactgctgctgggcatggcctcccagatcgcagagcgagaggaccatgtgttggttgaagatgtgcgggatttctggcctgggccactgaagttttcccgcacagaccacctggccagctgcctgcagcggggccgggatctgggcctgccctcttacaccaaggccagggcagcactgggcttgtctcccattacccgctggcaggacatcaaccctgcactctcccggagcaatgacactgtactggaggccacagctgccctgtacaaccaggacttatcctggctagagctgctccctgggggactcctggagagccaccgggaccctggacctctgttcagcaccatcgtccttgaacaatttgtgcggctacgggatggtgaccgctactggtttgagaacaccaggaatgggctgttctccaagaaggagattgaagaaatccgaaataccaccctgcaggacgtgctggtcgctgttatcaacattgaccccagtgctctgcagcccaatgtctttgtctggcataaaggagacccctgtccgcagccgagacagctcagcactgaaggcctgccagcgtgtgctccctctgttgttcgtgactattttgagggcagtggatttggcttcggggtcaccatcgggaccctctgttgcttccctttggtgagcctgctcagtgcctggattgttgcccggctccggatgagaaatttcaagaggctccagggccaggaccgccagagcatcgtgtctgagaagctcgtgggaggcatggaagctttggaatggcaaggccacaaggagccctgccggcccgtgcttgtgtacctgcagcccgggcagatccgtgtggtagatggcaggctcaccgtgctccgcaccatccagctgcagcctccacagaaggtcaacttcgtcctgtccagcaaccgtggacgccgcactctgctgctcaagatccccaaggagtatgacctggtgctgctgtttaacttggaggaagagcggcaggcgctggtggaaaatctccggggagctctgaaggagagcgggttgagcatccaggagtgggagctgcgggagcaggagctgatgagagcagctgtgacacgggagcagcggaggcacctcctggagacctttttcaggcaccttttctcccaggtgctggacatcaaccaggccgacgcagggaccctgcccctggactcctcccagaaggtgcgggaggccctgacctgtgagctgagcagggccgagtttgccgagtccctgggcctcaagccccaggacatgtttgtggagtccatgttctctctggctgacaaggatggcaatggctacctgtccttccgagagttcctggacatcctggtggtcttcatgaaaggctctcctgaggaaaagtctcgccttatgttccgcatgtacgactttgatgggaatggcctcatttccaaggatgagttcatcaggatgctgagatccttcatcgagatctccaacaactgcctgtccaaggcccagctggctgaggtggtggagtccatgttccgggagtcgggattccaggacaaggaggaactgacatgggaagattttcacttcatgctgcgggaccacaatagcgagctccgcttcacgcagctctgtgtcaaaggggtggaggtgcctgaagtcatcaaggacctctgccggcgagcctcctacatcagccaggatatgatctgtccctctcccagagtgagtgcccgctgttcccgcagcgacattgagactgagttgacacctcagagactgcagtgccccatggacacagaccctccccaggagattcggcggaggtttggcaagaaggtaacgtcattccagcccttgctgttcactgaggcgcaccgagagaagttccaacgcagctgtctccaccagacggtgcaacagttcaagcgcttcattgagaactaccggcgccacatcggctgcgtggccgtgttctacgccatcgctggggggcttttcctggagagggcctactactacgcctttgccgcacatcacacgggcatcacagacaccacccgcgtgggaatcatcctgtcgcggggcacagcagccagcatctctttcatgttctcctacatcttgctcaccatgtgccgcaacctcatcaccttcctgcgagaaaccttcctcaaccgctacgtgcccttcgacgccgccgtggacttccatcgcctcattgcctccaccgccatcgtcctcacagtcttacacagtgtgggccatgtggtgaatgtgtacctgttctccatcagccccctcagcgtcctctcttgcctctttcctggcctcttccatgatgatgggtctgagctcccccagaagtattactggtggttcttccagaccgtaccaggcctcacgggggttgtgctgctcctgatcctggccatcatgtatgtctttgcctcccaccacttccgccgccgcagtttccggggcttctggctgacccaccacctctacatcctgctctatgtcctgctcatcatccatggtagctttgccctgatccagctgccccgtttccacatcttcttcctggtcccagcaatcatctatgggggcgacaagctggtgagcctgagccggaagaaggtggagatcagcgtggtgaaggcggagctgctgccctcaggagtgacccacctgcggttccagcggccccagggctttgagtacaagtcagggcagtgggtgcggatcgcttgcctggctctggggaccaccgagtaccaccccttcacactgacctctgcgccccatgaggacacgcttagcctgcacatccgggcagcagggccctggaccactcgcctcagggagatctactcagccccgacgggtgacagatgtgccagatacccaaagctgtaccttgatggaccatttggagagggccaccaggagtggcataagtttgaggtgtcagtgttagtgggagggggcattggggtcaccccttttgcctccatcctcaaagacctggtcttcaagtcatccgtcagctgccaagtgttctgtaagaagatctacttcatctgggtgacgcggacccagcgtcagtttgagtggctggctgacatcatccgagaggtggaggagaatgaccaccaggacctggtgtctgtgcacatctacatcacccagctggctgagaagttcgacctcaggaccactatgctgtacatctgtgagcggcacttccagaaggttctgaaccggagtctattcacaggcctgcgctccatcacccactttggccgtcccccctttgagcccttcttcaactccctgcaggaggtccacccccaggtccggaagatcggggtgtttagctgtggcccccctggcatgaccaagaatgtggaaaaggcctgtcagctcatcaacaggcaggaccggactcacttctcccaccattatgagaacttctaggcccctgcccgggggttctgcccactgcccagttgagcagaggtttgagcccacacctcacctctgttcttcctatttctggctgcctcagccttctctgatttcccacctcccaaccttgttccaggtggccatagtcagtcaccatgtgtgggctcagggacccccaggaccaggatgtgtctcagcctggagaaatggtgggggggcagtgtctagggactagagtgagaagtaggggagctactgatttggggcaaagtgaaacctctgcttccagacttcagaaacaaatctcagaagacaagctgacctgacaagtactatgtgtgtgcatgtctgtatgtgtgttggggcggtgagtgtaaggatgcagtgggagcatggatgctggcatcttagaaccctccctactcccatacctcctcctcttctgggctccccactgtcagacgggctggcaaatgccttgcaggaggtagaggctggacccatggcaagccatttacagaaacccactcggcaccccagtctaacaccacaactaatttcacccaaggttttaagcacgttctttcatcagaccctggcccaatacctatgtatgcaatgctcctcagccctcttctccctgctccagtagtctcccttccaaataaatcacttttctgcc

SEQ ID NO: 8851 - DNA, 5158 bp, Homo sapiens
  source 1..5158: mol_type = unassigned DNA
gtggctgagccgagccgggccgtgccttcccctcctcacccccagccccgcccgtcccggcgcagagctgcagaggcaccggacgagagagggctccgcgggcccagctggcagccaggccggagacaagttgcagtcccgggctctggtgacgccgtggccgcagctggaagaggaaaacaaggatcagattggagaagtgatttatctaagatcccacagtggactggcagcagcactgagacctcagcctagtctcctgatccccaagcagggccctgcctaaggaacacactctgcagagtgctgggccaaagcagggttttccaactaatcttagaaggtaaagtccatgaagggtctccattttgggacattctaatccctgagcccctattattttcatcatgggcttctgcctggctctagcatggacacttctggttggggcatggacccctctgggagctcagaaccccatttcgtgggaggtgcagcgatttgatgggtggtacaacaacctcatggagcacagatggggcagcaaaggctcccggctgcagcgcctggtcccagccagctatgcagatggcgtgtaccagcccttgggagaaccccacctgcccaacccccgagaccttagcaacaccatctcaaggggccctgcagggctggcctccctgagaaaccgcacagtgttgggggtcttctttggctatcacgtgctttcagacctggtgagcgtggaaactcccggctgccccgccgagttcctcaacattcgcatcccgcccggagaccccatgttcgaccccgaccagcgcggggacgtggtgctgcccttccagagaagccgctgggaccccgagaccggacggagtcccagcaatccccgggacccggccaaccaggtgacgggctggctggacggcagcgccatctatggttcctcgcattcctggagcgacgcgctgcggagcttctccaggggacagctggcgtcggggcccgaccccgcttttccccgagactcgcagaaccccctgctcatgtgggcggcgcccgaccccgccaccgggcagaacgggccccgggggctgtacgccttcggggcagagagagggaaccgggaacccttcctgcaggcgctgggcctgctctggttccgctaccacaacctgtgggcgcagaggctggcccgccagcacccagactgggaggacgaggagctgttccagcacgcacgcaagagggtcatcgccacctaccagaacatcgctgtgtatgagtggctgcccagcttcctgcagaaaacactcccggagtatacaggataccggccatttctggaccccagcatctcctcagagttcgtggcggcctctgagcagttcctgtccaccatggtgccccctggcgtctacatgagaaatgccagctgccacttccagggggtcatcaatcggaactcaagtgtctccagagctctccgggtctgcaacagctactggagccgtgagcacccaagcctacaaagtgctgaagatgtggatgcactgctgctgggcatggcctcccagatcgcagagcgagaggaccatgtgttggttgaagatgtgcgggatttctggcctgggccactgaagttttcccgcacagaccacctggccagctgcctgcagcggggccgggatctgggcctgccctcttacaccaaggccagggcagcactgggcttgtctcccattacccgctggcaggacatcaaccctgcactctcccggagcaatgacactgtactggaggccacagctgccctgtacaaccaggacttatcctggctagagctgctccctgggggactcctggagagccaccgggaccctggacctctgttcagcaccatcgtccttgaacaatttgtgcggctacgggatggtgaccgctactggtttgagaacaccaggaatgggctgttctccaagaaggagattgaagaaatccgaaataccaccctgcaggacgtgctggtcgctgttatcaacattgaccccagtgctctgcagcccaatgtctttgtctggcataaaggagacccctgtccgcagccgagacagctcagcactgaaggcctgccagcgtgtgctccctctgttgttcgtgactattttgagggcagtggatttggcttcggggtcaccatcgggaccctctgttgcttccctttggtgagcctgctcagtgcctggattgttgcccggctccggatgagaaatttcaagaggctccagggccaggaccgccagagcatcgtgtctgagaagctcgtgggaggcatggaagctttggaatggcaaggccacaaggagccctgccggcccgtgcttgtgtacctgcagcccgggcagatccgtgtggtagatggcaggctcaccgtgctccgcaccatccagctgcagcctccacagaaggtcaacttcgtcctgtccagcaaccgtggacgccgcactctgctgctcaagatccccaaggagtatgacctggtgctgctgtttaacttggaggaagagcggcaggcgctggtggaaaatctccggggagctctgaaggagagcgggttgagcatccaggagtgggagctgcgggagcaggagctgatgagagcagctgtgacacgggagcagcggaggcacctcctggagacctttttcaggcaccttttctcccaggtgctggacatcaaccaggccgacgcagggaccctgcccctggactcctcccagaaggtgcgggaggccctgacctgtgagctgagcagggccgagtttgccgagtccctgggcctcaagccccaggacatgtttgtggagtccatgttctctctggctgacaaggatggcaatggctacctgtccttccgagagttcctggacatcctggtggtcttcatgaaaggctctcctgaggaaaagtctcgccttatgttccgcatgtacgactttgatgggaatggcctcatttccaaggatgagttcatcaggatgctgagatccttcatcgagatctccaacaactgcctgtccaaggcccagctggctgaggtggtggagtccatgttccgggagtcgggattccaggacaaggaggaactgacatgggaagattttcacttcatgctgcgggaccacaatagcgagctccgcttcacgcagctctgtgtcaaaggggtggaggtgcctgaagtcatcaaggacctctgccggcgagcctcctacatcagccaggatatgatctgtccctctcccagagtgagtgcccgctgttcccgcagcgacattgagactgagttgacacctcagagactgcagtgccccatggacacagaccctccccaggagattcggcggaggtttggcaagaaggtaacgtcattccagcccttgctgttcactgaggcgcaccgagagaagttccaacgcagctgtctccaccagacggtgcaacagttcaagcgcttcattgagaactaccggcgccacatcggctgcgtggccgtgttctacgccatcgctggggggcttttcctggagagggcctactactacgcctttgccgcacatcacacgggcatcacagacaccacccgcgtgggaatcatcctgtcgcggggcacagcagccagcatctctttcatgttctcctacatcttgctcaccatgtgccgcaacctcatcaccttcctgcgagaaaccttcctcaaccgctacgtgcccttcgacgccgccgtggacttccatcgcctcattgcctccaccgccatcgtcctcacagtcttacacagtgtgggccatgtggtgaatgtgtacctgttctccatcagccccctcagcgtcctctcttgcctctttcctggcctcttccatgatgatgggtctgagctcccccagaagtattactggtggttcttccagaccgtaccaggcctcacgggggttgtgctgctcctgatcctggccatcatgtatgtctttgcctcccaccacttccgccgccgcagtttccggggcttctggctgacccaccacctctacatcctgctctatgtcctgctcatcatccatggtagctttgccctgatccagctgccccgtttccacatcttcttcctggtcccagcaatcatctatgggggcgacaagctggtgagcctgagccggaagaaggtggagatcagcgtggtgaaggcggagctgctgccctcaggagtgacccacctgcggttccagcggccccagggctttgagtacaagtcagggcagtgggtgcggatcgcttgcctggctctggggaccaccgagtaccaccccttcacactgacctctgcgccccatgaggacacgcttagcctgcacatccgggcagcagggccctggaccactcgcctcagggagatctactcagccccgacgggtgacagatgtgccagatacccaaagctgtaccttgatggaccatttggagagggccaccaggagtggcataagtttgaggtgtcagtgttagtgggagggggcattggggtcaccccttttgcctccatcctcaaagacctggtcttcaagtcatccgtcagctgccaagtgttctgtaagaagatctacttcatctgggtgacgcggacccagcgtcagtttgagtggctggctgacatcatccgagaggtggaggagaatgaccaccaggacctggtgtctgtgcacatctacatcacccagctggctgagaagttcgacctcaggaccactatgctgtacatctgtgagcggcacttccagaaggttctgaaccggagtctattcacaggcctgcgctccatcacccactttggccgtcccccctttgagcccttcttcaactccctgcaggaggtccacccccaggtccggaagatcggggtgtttagctgtggcccccctggcatgaccaagaatgtggaaaaggcctgtcagctcatcaacaggcaggaccggactcacttctcccaccattatgagaacttctaggcccctgcccgggggttctgcccactgttcttcctatttctggctgcctcagccttctctgatttcccacctcccaaccttgttccaggtggcca

SEQ ID NO: 8852 - DNA, 436 bp, Homo sapiens
  source 1..436: mol_type = unassigned DNA
agagagggctccgcgggcccagctggcagccaggccggagacaagttgcagtcccgggctctggtgacgccgtggccgcagctggaagaggaaaacaaggatcagattggagaagtgatttatctaagatcccacagtggactggcagcagcactgagacctcagcctagtctcctgatccccaagcagggccctgcctaaggaacacactctgcagagtgctgggccaaagcagggttttccaactaatcttagaagggtctccattttgggacattctaatccctgagcccctattattttcatcatgggcttctgcctggctctagcatggacacttctggttggggcatggacccctctgggagctcagaaccccatttcgtgggaggtgcagcgatttgatgggtggtacaacaacctcatggagcacaga

SEQ ID NO: 8853 - DNA, 4539 bp, Homo sapiens
  source 1..4539: mol_type = unassigned DNA
aaggtcaaagtaaaattttaagatcccttgtgcttgtatagacctctgtcaggcagcactgacagaggggacacccctcaccctgagtggggaatcaacctgcagaagaggaatgtcccaccggtttgggagcaaacagcaggactgggtgggctcagggataaggatgatggtgtggagggagccggctgtctaacctctgaccccattaaccacacccctttcctccccacccccaacctataaagcacccaagcctacaaagtgctgaagatgtggatgcactgctgctgggcatggcctcccagatcgcagagcgagaggaccatgtgttggttgaagatgtgcggggtgagtctgaggctgtccctgcaggttgtgaactcctggcctctgggaagaggctcagctggacttccagaaccagatttctggcctgggccactgaagttttcccgcacagaccacctggccagctgcctgcagcggggccgggatctgggcctgccctcttacaccaaggccagggcagcactgggcttgtctcccattacccgctggcaggacatcaaccctgcactctcccggagcaatgacactgtactggaggccacagctgccctgtacaaccaggacttatcctggctagagctgctccctgggggactcctggagagccaccgggaccctggacctctgttcagcaccatcgtccttgaacaatttgtgcggctacgggatggtgaccgctactggtttgagaacaccaggaatgggctgttctccaagaaggagattgaagaaatccgaaataccaccctgcaggacgtgctggtcgctgttatcaacattgaccccagtgctctgcagcccaatgtctttgtctggcataaaggagacccctgtccgcagccgagacagctcagcactgaaggcctgccagcgtgtgctccctctgttgttcgtgactattttgagggcagtggatttggcttcggggtcaccatcgggaccctctgttgcttccctttggtgagcctgctcagtgcctggattgttgcccggctccggatgagaaatttcaagaggctccagggccaggaccgccagagcatcgtgtctgagaagctcgtgggaggcatggaagctttggaatggcaaggccacaaggagccctgccggcccgtgcttgtgtacctgcagcccgggcagatccgtgtggtagatggcaggctcaccgtgctccgcaccatccagctgcagcctccacagaaggtcaacttcgtcctgtccagcaaccgtggacgccgcactctgctgctcaagatccccaaggagtatgacctggtgctgctgtttaacttggaggaagagcggcaggcgctggtggaaaatctccggggagctctgaaggagagcgggttgagcatccaggagtgggagctgcgggagcaggagctgatgagagcagctgtgacacgggagcagcggaggcacctcctggagacctttttcaggcaccttttctcccaggtgctggacatcaaccaggccgacgcagggaccctgcccctggactcctcccagaaggtgcgggaggccctgacctgtgagctgagcagggccgagtttgccgagtccctgggcctcaagccccaggacatgtttgtggagtccatgttctctctggctgacaaggatggcaatggctacctgtccttccgagagttcctggacatcctggtggtcttcatgaaaggctctcctgaggaaaagtctcgccttatgttccgcatgtacgactttgatgggaatggcctcatttccaaggatgagttcatcaggatgctgagatccttcatcgagatctccaacaactgcctgtccaaggcccagctggctgaggtggtggagtccatgttccgggagtcgggattccaggacaaggaggaactgacatgggaagattttcacttcatgctgcgggaccacaatagcgagctccgcttcacgcagctctgtgtcaaaggggtggaggtgcctgaagtcatcaaggacctctgccggcgagcctcctacatcagccaggatatgatctgtccctctcccagagtgagtgcccgctgttcccgcagcgacattgagactgagttgacacctcagagactgcagtgccccatggacacagaccctccccaggagattcggcggaggtttggcaagaaggtaacgtcattccagcccttgctgttcactgaggcgcaccgagagaagttccaacgcagctgtctccaccagacggtgcaacagttcaagcgcttcattgagaactaccggcgccacatcggctgcgtggccgtgttctacgccatcgctggggggcttttcctggagagggcctactactacgcctttgccgcacatcacacgggcatcacagacaccacccgcgtgggaatcatcctgtcgcggggcacagcagccagcatctctttcatgttctcctacatcttgctcaccatgtgccgcaacctcatcaccttcctgcgagaaaccttcctcaaccgctacgtgcccttcgacgccgccgtggacttccatcgcctcattgcctccaccgccatcgtcctcacagtcttacacagtgtgggccatgtggtgaatgtgtacctgttctccatcagccccctcagcgtcctctcttgcctctttcctggcctcttccatgatgatgggtctgagctcccccagaagtattactggtggttcttccagaccgtaccaggcctcacgggggttgtgctgctcctgatcctggccatcatgtatgtctttgcctcccaccacttccgccgccgcagtttccggggcttctggctgacccaccacctctacatcctgctctatgtcctgctcatcatccatggtagctttgccctgatccagctgccccgtttccacatcttcttcctggtcccagcaatcatctatgggggcgacaagctggtgagcctgagccggaagaaggtggagatcagcgtggtgaaggcggagctgctgccctcaggagtgacccacctgcggttccagcggccccagggctttgagtacaagtcagggcagtgggtgcggatcgcttgcctggctctggggaccaccgagtaccaccccttcacactgacctctgcgccccatgaggacacgcttagcctgcacatccgggcagcagggccctggaccactcgcctcagggagatctactcagccccgacgggtgacagatgtgccagatacccaaagctgtaccttgatggaccatttggagagggccaccaggagtggcataagtttgaggtgtcagtgttagtgggagggggcattggggtcaccccttttgcctccatcctcaaagacctggtcttcaagtcatccgtcagctgccaagtgttctgtaagaagatctacttcatctgggtgacgcggacccagcgtcagtttgagtggctggctgacatcatccgagaggtggaggagaatgaccaccaggacctggtgtctgtgcacatctacatcacccagctggctgagaagttcgacctcaggaccactatgctgtacatctgtgagcggcacttccagaaggttctgaaccggagtctattcacaggcctgcgctccatcacccactttggccgtcccccctttgagcccttcttcaactccctgcaggaggtccacccccaggtccggaagatcggggtgtttagctgtggcccccctggcatgaccaagaatgtggaaaaggcctgtcagctcatcaacaggcaggaccggactcacttctcccaccattatgagaacttctaggcccctgcccgggggttctgcccactgcccagttgagcagaggtttgagcccacacctcacctctgttcttcctatttctggctgcctcagccttctctgatttcccacctcccaaccttgttccaggtggccatagtcagtcaccatgtgtgggctcagggacccccaggaccaggatgtgtctcagcctggagaaatggtgggggggcagtgtctagggactagagtgagaagtaggggagctactgatttggggcaaagtgaaacctctgcttccagacttcagaaacaaatctcagaagacaagctgacctgacaagtactatgtgtgtgcatgtctgtatgtgtgttggggcggtgagtgtaaggatgcagtgggagcatggatgctggcatcttagaaccctccctactcccatacctcctcctcttctgggctccccactgtcagacgggctggcaaatgccttgcaggaggtagaggctggacccatggcaagccatttacagaaacccactcggcaccccagtctaacaccacaactaatttcacccaaggttttaagcacgttctttcatcagaccctggcccaatacctatgtatgcaatgctcctcagccctcttctccctgctccagtagtctcccttccaaataaatcacttttctgc

SEQ ID NO: 8854 - DNA, 6533 bp, Homo sapiens
  source 1..6533: mol_type = unassigned DNA
ggttctgcgggttggcgctgagtttggaagtcgcgcgggaccccttttatagcagcgtgggcgacgtgccacacgggtgtcccagcccaggggctggtctgagctggaagaggttgtgcaaataagggccccacctccacggcaggagggtgagccctaggtccagatgctcacactggcgcaggtctgtcctgagccgacacctgcacagtggcgagaccaaggacccagagagaaaggtgagagtgcagccggggaggctgaggatcggcggagctggaagagtgagggtgaaggcaagaagtagagcacagaagcaaagattttaagaggaaagaagacatctgaacccaacaccaccctaaaccacaggctgcagggttggcatgctccgtgcaagaccagaggcactgatgctcctgggagctcttctgactggatccctgggtccatcgggcaatcaggacgcactctcactgccctgggaagtgcagcgctatgacggctggtttaacaacctgaggcaccacgagcgtggtgctgttggctgccggttgcagcgccgcgtaccagccaattacgccgacggtgtgtatcaggctctggaggagccgcagctgcccaacccgcgccggctcagcaacgcagccacgcggggcatagccggcctgccgtcgctccacaaccgcaccgtactgggggtcttctttggctaccatgttctttccgacgtggtgagcgtggaaacgcccggttgccccgccgagttcctcaacatccgcatcccacctggagaccccgtgttcgaccccgaccagcgcggggacgtggtgctgcccttccagaggagccgctgggaccccgagaccggacggagtcccagcaacccccgggacctggccaaccaggtgacgggctggctggacggcagcgccatctatggctcctcgcactcctggagcgacgcgctgcggagcttctcggggggacagctggcgtcggggcccgaccccgctttcccccgagactcgcagaaccccctgctcatgtgggcggcgcccgaccccgccaccgggcagaacgggccccgggggctgtacgccttcggggcagagagagggaaccgggaacccttcctgcaggcgctgggcctgctctggttccgctaccacaacctgtgggcgcagaggctggcccgccagcacccagactgggaggacgaggagctgttccagcacgcacgcaagagggtcatcgccacctaccagaacatcgctgtgtatgagtggctgcccagcttcctgcagaaaacactcccggagtatacaggataccgtcctttcctagaccccagcatctccccggaatttgtggtggcctctgagcagttcttctctaccatggtgccccctggtgtctacatgagaaatgccagctgtcatttccggaaggtcctgaacaagggttttcaaagctcccaagctctcagggtctgcaacaactactggattcgggagaaccccaatctgaacagtacccaggaggtgaatgagctgctgctgggaatggcctcccagatttcggagttggaggacaacatagtggttgaagatctgagggattactggcctggccctggcaaattctcccgtacagactatgtggccagcagcatccaacgtggccgagatatggggctgcccagctatagccaggccctgctggcctttgggctggacatcccaaggaactggagtgatctcaaccctaatgtggacccccaggtgctggaggccacagctgccctgtacaaccaggacctatcccagctagagctgctccttggggggctcctggagagccatggggaccctggacccctgttcagtgccattgtcctcgaccagtttgtacggctgcgggatggtgaccgctactggtttgagaacaccaggaatgggctgttctccaagaaggagattgaagacatccgaaataccaccctgcgggacgtgctggtcgctgttatcaacattgaccccagtgccctgcagcccaatgtctttgtctggcataaaggtgcaccctgccctcaacctaagcagctcacaactgacggcctgccccagtgtgcacccctgactgtgcttgacttctttgaaggcagcagccctggttttgccatcaccatcattgctctctgctgccttcccttagtgagtctgcttctctctggagtggtggcctatttccggggccgagaacacaagaagctacaaaagaaactcaaagagagcgtgaagaaggaagcagccaaagatggagtgccagcgatggagtggccaggccccaaggagaggagcagtcccatcatcatccagctgctgtcagacaggtgtctgcaggtcctgaacaggcatctcactgtgctccgtgtggtccagctgcagcctctgcagcaggtcaacctcatcctgtccaacaaccgaggatgccgcaccctgctgctcaagatccctaaggagtatgacctggtgctgctgtttagttctgaagaggaacggggcgcctttgtgcagcagctatgggacttctgcgtgcgctgggctctgggcctccatgtggctgagatgagcgagaaggagctatttaggaaggctgtgacaaagcagcagcgggaacgcatcctggagatcttcttcagacacctttttgctcaggtgctggacatcaaccaggccgacgcagggaccctgcccctggactcctcccagaaggtgcgggaggccctgacctgcgagctgagcagggccgagtttgccgagtccctgggcctcaagccccaggacatgtttgtggagtccatgttctctctggctgacaaggatggcaatggctacctgtccttccgagagttcctggacatcctggtggtcttcatgaaaggctccccagaggataagtcccgtctaatgtttaccatgtatgacctggatgagaatggcttcctctccaaggacgaattcttcaccatgatgcgatccttcatcgagatctccaacaactgcctgtccaaggcccagctggccgaggtggtggagtctatgttccgggagtcgggattccaggacaaggaggagctgacatgggaggattttcacttcatgctgcgggaccatgacagcgagctccgcttcacgcagctctgtgtcaaaggtggaggtggaggtggaaatggtattagagatatctttaaacaaaacatcagctgtcgagtctcgttcatcactcggacacctggggagcgctcccacccccagggactggggccccctgccccagaagccccagagctgggaggccctggactgaagaagaggtttggcaaaaaggcagcagtgcccactccccggctgtacacagaggcgctgcaagagaagatgcagcgaggcttcctagcccaaaagctgcagcagtacaagcgcttcgtggagaactaccggaggcacatcgtgtgtgtggcaatcttctcggccatctgtgttggcgtgtttgcagatcgtgcttactactatggctttgcctcgccaccctcggacattgcacagaccaccctcgtgggcatcatcctgtcacgaggcacggcggccagcgtctccttcatgttctcttatatcttgctcaccatgtgccgcaacctcataaccttcctgcgagagactttcctcaaccgctatgtgccttttgatgccgcagtggacttccaccgctggatcgccatggctgctgttgtcctggccattttgcacagtgctggccacgcagtcaatgtctacatcttctcagtcagcccactcagcctgctggcctgcatattccccaacgtctttgtgaatgatgggtccaagcttccccagaagttctattggtggttcttccagaccgtcccaggtatgacaggtgtgcttctgctcctggtcctggccatcatgtatgtcttcgcctcccaccacttccgccgccgcagcttccggggcttctggctgacccaccacctctacatcctgctctatgccctgctcatcatccatggcagctatgctctgatccagctgcccactttccacatctacttcctggtcccggcaatcatctatggaggtgacaagctggtgagcctgagccggaagaaggtggagatcagcgtggtgaaggcggagctgctgccctcaggagtgacctacctgcaattccagaggccccaaggctttgagtacaagtcaggacagtgggtgcggatcgcctgcctggctctggggaccaccgagtaccaccccttcacactgacctccgcgccccatgaggacacactcagcctgcacatccgggcagtggggccctggaccactcgcctcagggagatctactcatccccaaagggcaatggctgtgctggatacccaaagctgtaccttgatggaccgtttggagagggccatcaggagtggcataaatttgaggtgtcagtgttggtgggagggggcattggggtcaccccctttgcctccatcctcaaagacctggtcttcaagtcatccttgggcagccaaatgctgtgtaagaagatctacttcatctgggtgacacggacccagcgtcagtttgagtggctggctgacatcatccaagaggtggaggagaacgaccaccaggacctggtgtctgtgcacatttatgtcacccagctggctgagaagttcgacctcaggaccaccatgctatacatctgcgagcggcacttccagaaagtgctgaaccggagtctgttcacgggcctgcgctccatcacccactttggccgtccccccttcgagcccttcttcaactccctgcaggaggtccacccacaggtgcgcaagatcggggtgttcagctgcggccctccaggaatgaccaagaatgtagagaaggcctgtcagctcgtcaacaggcaggaccgagcccacttcatgcaccactatgagaacttctgagcctgtcctccctggctgctgcttccagtatcctgccttctcttctgtgcacctaagttgcccagccctgctggcaatctctccatcagaatccaccttaggcctcagctggagggctgcagagcccctcccaatattgggagaatattgacccagacaattatacaaatgagaaaaggcaggagactatgttctacaattgcagtgcatgatgattataagtccacctgtttatcaacggcaccattcctgcagccctccagacttcctgcccttagcaagtgcgcaaccagtcaggatctcccaaagaagataaagaccactcctcaccccagctcaagccatggcaggcgtggcaagcaaagtggggaggagacagtccctgcttgtgacaagtgtggaggtgaaaaggtacaatagtgcttgtctccgatagctccccacatctctaattgacttccacaaaatcgatgcgttgctttggtatttgcttggactgacatttgagggaggaggaggctgggatcctctggctgagaatctcctcagagcccagtgcagaagctgtgatgcttagaacctggacagcccgactgcctcaactctgtctccaggtctattccctccagctccaaaaggagcagccctacttctaccccttcccgtccccaaagtgtcagcaactttgaggagggcaccaggaaacaaagatgcctccccagccctgatattcttgatgtcaccagtgatacccactgccctgacccctgggcaggcccctctctgcatctactggagtggtccctgggctctggggctgaaggattccagcctctctgccagatattcagtactcgatctcaattcccctcttccacaagagttgggtgaccagctgtcctagtttgcccaggactctccctgttttagcactgaaagtctcttgccccaggaaaccccatcagtcccaggcagattgggacagctggtcaccttacgcaagagccaggctgaaacatcccctccatactcagctctttaacttttcttttcctttttcatcgggctctttcctaaaaagctgagctgtaaaatattttacatcgaggtataataaataatcatgtacatgttttaccaccacccaggtcaagacatagaatgtttcaacatttccatcaccccagaaactccccttgtacccccttccacttcgtctcccctagctcctagaagcaaccactgatgtgatttctaccaaatccagttttggtcctactaaatatactcttttgagactggcctcttttactcaccataatgcctttgtaattcatccatgctgttgtgtgtatcagcagtttgttccttttcattgctgagtagtattctattgtagagatgtaccacagtttgtttattcttctgttgatggacgtttgggttgtttctaattttgaatgattataaataaaaattctgtgagtgttcttgtaccta

SEQ ID NO: 8855 - DNA, 1996 bp, Homo sapiens
  source 1..1996: mol_type = unassigned DNA
cgcgcgaggtgagacggcgagggctcccggggcgcaggtagagatgttccgtcggtgccgaaggcccggctagtgcggttgtgtggacggcgaaaaaaaccaggccaggcgtcaaagcaagtcacccatccgacctaaacccctctaagaccccggagtcacgtctccctccggggatcctcgtgaggtcttgggggtcccaccgccctgcgagccgcgcccgcgccccgccagacccggaactgcgtcgctagaacgtcgggacctggttccctctttaatcacacccccgggggcgcttcgtgtgaggttccacgggggaaggcgagaggcgcaggctgccacacacgcactgtttggaagaggggaagcattgccccccctgcaccacctcaccaagatggctactttgggacacacattccccttctatgctggccccaagccaaccttcccgatggacaccactttggccagcatcatcatgatctttctgactgcactggccacgttcatcgtcatcctgcctggcattcggggaaagacgaggctgttctggctgcttcgggtggtgaccagcttattcatcggggctgcaatcctggctgtgaatttcagttctgagtggtctgtgggccaggtcagcaccaacacatcatacaaggccttcagttctgagtggatcagcgctgatattgggctgcaggtcgggctgggtggagtcaacatcacactcacagggacccccgtgcagcagctgaatgagaccatcaattacaacgaggagttcacctggcgcctgggtgagaactatgctgaggagtatgcaaaggctctggagaaggggctgccagaccctgtgttgtacctagctgagaagttcactccaagaagcccatgtggcctataccgccagtaccgcctggcgggacactacacctcagccatgctatgggtggcattcctctgctggctgctggccaatgtgatgctctccatgcctgtgctggtatatggtggctacatgctattggccacgggcatcttccagctgttggctctgctcttcttctccatggccacatcactcacctcaccctgtcccctgcacctgggcgcttctgtgctgcatactcaccatgggcctgccttctggatcacattgaccacaggactgctgtgtgtgctgctgggcctggctatggcggtggcccacaggatgcagcctcacaggctgaaggctttcttcaaccagagtgtggatgaagaccccatgctggagtggagtcctgaggaaggtggactcctgagcccccgctaccggtccatggctgacagtcccaagtcccaggacattcccctgtcagaggcttcctccaccaaggcatactatcgccccaggagactttccctggtgcctgcggatgtccgaggcctcgcgccagcagcgctcagtgcccttcctggagctctcctggcccaggcctggcgggcactgcttcccggcctgcgatgtcccaaggcggggaaggagtccagattgggtccccctcacagtccttggcgctttggtccagaagggtgcgaagagcgctgggccgaacatactggagactcaccacggcccctccgaggaagaggcacaggacgcctgtggcggtggggatcgaaagaaaggagggcatgtggagtcagggctatgttgcccaggctggtctcgaactctggcctcaaacgaccttcctgcctcgacctcccaaagtgctgggattacaggcgtgatgcccgggccttcttccatcttttggagcctaccccttgtgttacctcccgccacacacctctaatctgaattacatgaaacacggcaagacaccaaacccttctgagccccccacttttcatctgtaaaatggtcataacagtgcctgtttctgcgaactattgagaggggcaaatagggtaatagatgtgaattcattctgtaaactggaaa

SEQ ID NO: 8856 - DNA, 1317 bp, Homo sapiens
  source 1..1317: mol_type = unassigned DNA
atggctactttgggacacacattccccttctatgctggccccaagccaaccttcccgatggacaccactttggccagcatcatcatgatctttctgactgcactggccacgttcatcgtcatcctgcctggcattcggggaaagacgaggctgttctggctgcttcgggtggtgaccagcttattcatcggggctgcaatcctggggacccccgtgcagcagctgaatgagaccatcaattacaacgaggagttcacctggcgcctgggtgagaactatgctgaggagtatgcaaaggctctggagaaggggctgccagaccctgtgttgtacctagctgagaagttcactccaagaagcccatgtggcctataccgccagtaccgcctggcgggacactacacctcagccatgctatgggtggcattcctctgctggctgctggccaatgtgatgctctccatgcctgtgctggtatatggtggctacatgctattggccacgggcatcttccagctgttggctctgctcttcttctccatggccacatcactcacctcaccctgtcccctgcacctgggcgcttctgtgctgcatactcaccatgggcctgccttctggatcacattgaccacaggactgctgtgtgtgctgctgggcctggctatggcggtggcccacaggatgcagcctcacaggctgaaggctttcttcaaccagagtgtggatgaagaccccatgctggagtggagtcctgaggaaggtggactcctgagcccccgctaccggtccatggctgacagtcccaagtcccaggacattcccctgtcagaggcttcctccaccaaggcatactatcgccccaggagactttccctggtgcctgcggatgtccgaggcctcgcgccagcagcgctcagtgcccttcctggagctctcctggcccaggcctggcgggcactgcttcccggcctgcgatgtcccaaggcggggaaggagtccagattgggtccccctcacagtccttggcgctttggtccagaagggtgcgaagagcgctgggccgaacatactggagactcaccacggcccctccgaggaagaggcacaggacgcctgtggcggtggggatcgaaagaaaggagggcatgtggagtcagggctatgttgcccaggctggtctcgaactctggcctcaaacgaccttcctgcctcgacctcccaaagtgctgggattacaggcgtgatgcccgggccttcttccatcttttggagcctaccccttgtgttacctcccgccacacacctctaatctga

SEQ ID NO: 8857 - DNA, 562 bp, Homo sapiens
  source 1..562: mol_type = unassigned DNA
gtgcttccagcggacggcagcgcgcgagaccaggccaggcgtcaaagcaagtcacccatccgacctaaacccctctaagaccccggagtcacgtctccctccggggatcctcgtgaggtcttgggggtcccaccgccctgcgagccgcgcccgcgccccgccagacccggaactgcgtcgctagaacgtcgggacctggttccctctttaatcacacccccgggggcgcttcgtgtgaggttccacgggggaaggcgagaggcgcaggctgccacacacgcactgtttggaagaggggaagcattgccccccctgcaccacctcaccaagatggctactttgggacacacattccccttctatgctggccccaagccaaccttcccgatggacaccactttggccagcatcatcatgatctttctgactgcactggccacgttcatcgtcatcctgcctggcattcggggaaagacgaggctgttctggctgcttcgggtggtgaccagcttattcatcggggctgcaatcctggggacccccgtgcagcagctgaatgaga

SEQ ID NO: 8858 - DNA, 578 bp, Homo sapiens
  source 1..578: mol_type = unassigned DNA
atggagtctggcgcctggggaggcgcggaggtgcttccagcggacggcagcgcgcgagaccaggccaggcgtcaaagcaagtcacccatccgacctaaacccctctaagaccccggagtcacgtctccctccggggatcctcgtgaggtcttgggggtcccaccgccctgcgagccgcgcccgcgccccgccagacccggaactgcgtcgctagaacgtcgggacctggttccctctttaatcacacccccgggggcgcttcgtgtgaggttccacgggggaaggcgagaggcgcaggctgccacacacgcactgtttggaagaggggaagcattgccccccctgcaccacctcaccaagatggctactttgggacacacattccccttctatgctggccccaagccaaccttcccgatggacaccactttggccagcatcatcatgatctttctgactgcactggccacgttcatcgtcatcctgcctggcattcggggaaagacgaggctgttctggctgcttcgggtggtgaccagcttattcatcggggctgcaatcctggctgtgaatttcag

SEQ ID NO: 8859 - DNA, 1678 bp, Homo sapiens
  source 1..1678: mol_type = unassigned DNA
gcttccagcggacggcagcgcgcgagaccaggccaggcgtcaaagcaagtcacccatccgacctaaacccctctaagaccccggagtcacgtctccctccggggatcctcgtgaggtcttgggggtcccaccgccctgcgagccgcgcccgcgccccgccagacccggaactgcgtcgctagaacgtcgggacctggttccctctttaatcacacccccgggggcgcttcgtgtgaggttccacgggggaaggcgagaggcgcaggctgccacacacgcactgtttggaagaggggaagggctgcacttcctgctttcatccagaccaagttcggatcaagtgggagttcttcaaagagagagtttgcattgccccccctgcaccacctcaccaagatggctactttgggacacacattccccttctatgctggccccaagccaaccttcccgatggacaccactttggccagcatcatcatgatctttctgactgcactggccacgttcatcgtcatcctgcctggcattcggggaaagacgaggctgttctggctgcttcgggtggtgaccagcttattcatcggggctgcaatcctggggacccccgtgcagcagctgaatgagaccatcaattacaacgaggagttcacctggcgcctgggtgagaactatgctgaggagtatgcaaaggctctggagaaggggctgccagaccctgtgttgtacctagctgagaagttcactccaagaagcccatgtggcctataccgccagtaccgcctggcgggacactacacctcagccatgctatgggtggcattcctctgctggctgctggccaatgtgatgctctccatgcctgtgctggtatatggtggctacatgctattggccacgggcatcttccagctgttggctctgctcttcttctccatggccacatcactcacctcaccctgtcccctgcacctgggcgcttctgtgctgcatactcaccatgggcctgccttctggatcacattgaccacaggactgctgtgtgtgctgctgggcctggctatggcggtggcccacaggatgcagcctcacaggctgaaggctttcttcaaccagagtgtggatgaagaccccatgctggagtggagtcctgaggaaggtggactcctgagcccccgctaccggtccatggctgacagtcccaagtcccaggacattcccctgtcagaggcttcctccaccaaggcatactgtaaggaggcacaccccaaagatcctgattgtgctttataacattcctccccgtggaggccacctggacttccagtctggctccaaacctcattggcgccccataaaaccagcagaactgccctcagggtggctgttaccagacacccagcaccaatctacagacggagtagaaaaaggaggctctatatactgatgttaaaaaacaaaacaaaacaaaaagccctaagggactgaagagatgctgggcctgtccataaagcctgttgccatgataaggccaagcaggggctagcttatctgcacagcaacccagcctttccgtgctgccttgcctcttcaagatgctattcactgaaacctaacttcacccccataacaccagcagggtgggggttacatatgattctcctatggtttcctctca

SEQ ID NO: 8860 - DNA, 532 bp, Homo sapiens
  source 1..532: mol_type = unassigned DNA
agcgcgcgaggtgagacggcgagggctcccggggcgcaggtagagatgttccgtcggtgccgaaggcccggctagtgcggttgtgtggacggcgaaaaaaaccaggccaggcgtcaaagcaagtcacccatccgacctaaacccctctaagaccccggagtcacgtctccctccggggatcctcgtgaggtcttgggggtcccaccgccctgcgagccgcgcccgcgccccgccagacccggaactgcgtcgctaggccgggagagggaggcggcgccgcagagcctcgggtgcagtctgagaagtttgggagtgacttgaagagtgactggaagcaccccagacccgaacgtcgggacctggttccctctttaatcacacccccgggggcgcttcgtgtgaggttccacgggggaaggcgagaggcgcaggctgccacacacgcactgtttggaagaggggaagcattgccccccctgcaccacctcaccaagatggctactttgggacacacattccccttctatgctgg

SEQ ID NO: 8861 - DNA, 2684 bp, Homo sapiens
  source 1..2684: mol_type = unassigned DNA
gcttccagcggacggcagcgcgcgagcattgccccccctgcaccacctcaccaagatggctactttgggacacacattccccttctatgctggccccaagccaaccttcccgatggacaccactttggccagcatcatcatgatctttctgactgcactggccacgttcatcgtcatcctgcctggcattcggggaaagacgaggctgttctggctgcttcgggtggtgaccagcttattcatcggggctgcaatcctggggacccccgtgcagcagctgaatgagaccatcaattacaacgaggagttcacctggcgcctgggtgagaactatgctgaggagtatgcaaaggctctggagaaggggctgccagaccctgtgttgtacctagctgagaagttcactccaagaagcccatgtggcctataccgccagtaccgcctggcgggacactacacctcagccatgctatgggtggcattcctctgctggctgctggccaatgtgatgctctccatgcctgtgctggtatatggtggctacatgctattggccacgggcatcttccagctgttggctctgctcttcttctccatggccacatcactcacctcaccctgtcccctgcacctgggcgcttctgtgctgcatactcaccatgggcctgccttctggatcacattgaccacaggactgctgtgtgtgctgctgggcctggctatggcggtggcccacaggatgcagcctcacaggctgaaggctttcttcaaccagagtgtggatgaagaccccatgctggagtggagtcctgaggaaggtggactcctgagcccccgctaccggtccatggctgacagtcccaagtcccaggacattcccctgtcagaggcttcctccaccaaggcatactgtaaggaggcacaccccaaagatcctgattgtgctttataacattcctccccgtggaggccacctggacttccagtctggctccaaacctcattggcgccccataaaaccagcagaactgccctcagggtggctgttaccagacacccagcaccaatctacagacggagtagaaaaaggaggctctatatactgatgttaaaaaacaaaacaaaacaaaaagccctaagggactgaagagatgctgggcctgtccataaagcctgttgccatgataaggccaagcaggggctagcttatctgcacagcaacccagcctttccgtgctgccttgcctcttcaagatgctattcactgaaacctaacttcacccccataacaccagcagggtgggggttacatatgattctcctatggtttcctctcatccctcggcacctcttgttttcctttttcctgggttccttttgttcttcctttacttctccagcttgtgtggccttttggtacaatgaaagacagcactggaaaggaggggaaaccaaacttctcatcctaggtctaacattaaccaactatgccacattctctttgagcttcagttcccaaatttgctacataagattgcaagacttgccaagaatcttgggatttatctttctatgccttgctgacacctaccttggccctcaaacaccacctcacaagaagccaggtgggaagttagggaatcaactccaaaacgctattccttcccaccccactcagctgggctagctgagtggcatccaggacgggggagtgggtgacctgcctcatcactgccacctaacgtccccctggggtggttcagaaagatgctagctctggtagggtccctccggcctcactagagggcgcccctattactctggagtcgacgcagagaatcaggtttcacagcactgcggagagtgtactaggctgtctccagcccagcgaagctcatgaggacgtgcgaccccggcgcggagaagccatgaaaattaatgggaaaaacagtttttaaaaaacaaaagaaaaaaaggtttatttacagatcgccccaggagactttccctggtgcctgcggatgtccgaggcctcgcgccagcagcgctcagtgcccttcctggagctctcctggcccaggcctggcgggcactgcttcccggcctgcgatgtcccaaggcggggaaggagtccagattgggtccccctcacaggttagtggtgatacattttaagtctgggagagcggcctgcttgtgcagtgggtcgccgaggataagaggtgagccccctctctcctggctgcagtccttggcgctttggtccagaagggtgcgaagagcgctgggccgaacatactggagactcaccacggcccctccgaggaagaggcacaggacgcctgtggcggtggggatcgaaagaaaggagggcatgtggagtcagggctatgttgcccaggctggtctcgaactctggcctcaaacgaccttcctgcctcgacctcccaaagtgctgggattacaggcgtgatgcccgggccttcttccatcttttggagcctaccccttgtgttacctcccgccacacacctctaatctgaattacatgaaacacggcaagacaccaaacccttctgagccccccacttttcatctgtaaaatggtcataacagtgcctgtttctgcgaactattgagaggggcaaatagggtaatagatgtgaattcattctgtaaactgg

SEQ ID NO: 8862 - DNA, 1965 bp, Homo sapiens
  source 1..1965: mol_type = unassigned DNA
agcgcgcgaggtgagacggcgagggctcccggggcgcagtccaaggccatcgatcacctgccacccacagaccaggccaggcgtcaaagcaagtcacccatccgacctaaacccctctaagaccccggagtcacgtctccctccggggatcctcgtgaggtcttgggggtcccaccgccctgcgagccgcgcccgcgccccgccagacccggaactgcgtcgctagaacgtcgggacctggttccctctttaatcacacccccgggggcgcttcgtgtgaggttccacgggggaaggcgagaggcgcaggctgccacacacgcactgtttggaagaggggaagcattgccccccctgcaccacctcaccaagatggctactttgggacacacattccccttctatgctggccccaagccaaccttcccgatggacaccactttggccagcatcatcatgatctttctgactgcactggccacgttcatcgtcatcctgcctggcattcggggaaagacgaggctgttctggctgcttcgggtggtgaccagcttattcatcggggctgcaatcctggctgtgaatttcagttctgagtggtctgtgggccaggtcagcaccaacacatcatacaaggccttcagttctgagtggatcagcgctgatattgggctgcaggtcgggctgggtggagtcaacatcacactcacagggacccccgtgcagcagctgaatgagaccatcaattacaacgaggagttcacctggcgcctgggtgagaactatgctgaggagtatgcaaaggctctggagaaggggctgccagaccctgtgttgtacctagctgagaagttcactccaagaagcccatgtggcctataccgccagtaccgcctggcgggacactacacctcagccatgctatgggtggcattcctctgctggctgctggccaatgtgatgctctccatgcctgtgctggtatatggtggctacatgctattggccacgggcatcttccagctgttggctctgctcttcttctccatggccacatcactcacctcaccctgtcccctgcacctgggcgcttctgtgctgcatactcaccatgggcctgccttctggatcacattgaccacaggactgctgtgtgtgctgctgggcctggctatggcggtggcccacaggatgcagcctcacaggctgaaggctttcttcaaccagagtgtggatgaagaccccatgctggagtggagtcctgaggaaggtggactcctgagcccccgctaccggtccatggctgacagtcccaagtcccaggacattcccctgtcagaggcttcctccaccaaggcatactatcgccccaggagactttccctggtgcctgcggatgtccgaggcctcgcgccagcagcgctcagtgcccttcctggagctctcctggcccaggcctggcgggcactgcttcccggcctgcgatgtcccaaggcggggaaggagtccagattgggtccccctcacagtccttggcgctttggtccagaagggtgcgaagagcgctgggccgaacatactggagactcaccacggcccctccgaggaagaggcacaggacgcctgtggcggtggggatcgaaagaaaggagggcatgtggagtcagggctatgttgcccaggctggtctcgaactctggcctcaaacgaccttcctgcctcgacctcccaaagtgctgggattacaggcgtgatgcccgggccttcttccatcttttggagcctaccccttgtgttacctcccgccacacacctctaatctgaattacatgaaacacggcaagacaccaaacccttctgagccccccacttttcatctgtaaaatggtcataacagtgcctgtttctgcgaactattgagaggggcaaatagggtaatagatgtgaattcattctgtaaactgg

SEQ ID NO: 8863 - DNA, 572 bp, Homo sapiens
  source 1..572: mol_type = unassigned DNA
gcttccagcggacggcagcgcgcgaggtgagacggcgagggctcccggggcgcagaccaggccaggcgtcaaagcaagtcacccatccgacctaaacccctctaagaccccggagtcacgtctccctccggggatcctcgtgaggtcttgggggtcccaccgccctgcgagccgcgcccgcgccccgccagacccggaactgcgtcgctagaacgtcgggacctggttccctctttaatcacacccccgggggcgcttcgtgtgaggttccacgggggaaggcgagaggcgcaggctgccacacacgcactgtttggaagaggggaagcattgccccccctgcaccacctcaccaagatggctactttgggacacacattccccttctatgctggccccaagccaaccttcccgatggacaccactttggccagcatcatcatgatctttctgactgcactggccacgttcatcgtcatcctgcctggcattcggggaaagacgaggctgttctggctgcttcgggtggtgaccagcttattcatcggggctgcaatcctggggacccccgt

SEQ ID NO: 8864 - DNA, 641 bp, Homo sapiens
  source 1..641: mol_type = unassigned DNA
agccacggggcggggcgcagtggggcgggatggagtctggcgcctggggaggcgcggaggtgcttccagcggacggcagcgcgcgagaccaggccaggcgtcaaagcaagtcacccatccgacctaaacccctctaagaccccggagtcacgtctccctccggggatcctcgtgaggtcttgggggtcccaccgccctgcgagccgcgcccgcgccccgccagacccggaactgcgtcgctagcccttctctgtaccaggccgggagagggaggcggcgccgcagagcctcgggtgcagtctgagaagtttgggagtgacttgaagagtgactggaagcaccccagacccggtttgtccggtcacagccgggtccttacgtgagttaggagaggagtgggggtcggacgggagccccactgagagtaagggcgcgcgtttgttcacagaacgtcgggacctggttccctctttaatcacacccccgggggcgcttcgtgtgaggttccacgggggaaggcgagaggcgcaggctgccacacacgcactgtttggaagaggggaagcattgccccccctgcaccacctcaccaagatggctactttgggacacacattccccttctatgctggccccaagcc

SEQ ID NO: 8865 - DNA, 441 bp, Homo sapiens
  source 1..441: mol_type = unassigned DNA
gcggacggcagcgcgcgaggtgagacggcgagggctcccggggcgcagcattgccccccctgcaccacctcaccaagatggctactttgggacacacattccccttctatgctggccccaagccaaccttcccgatggacaccactttggccagcatcatcatgatctttctgactgcactggccacgttcatcgtcatcctgcctggcattcggggaaagacgaggctgttctggctgcttcgggtggtgaccagcttattcatcggggctgcaatcctggctgtgaatttcagttctgagtggtctgtgggccaggtcagcaccaacacatcatacaaggccttcagttctgagtggatcagcgctgatattgggctgcaggtcgggctgggtggagtcaacatcacactcacagggacccccgtgcagcagctgaatg

SEQ ID NO: 8866 - DNA, 1044 bp, Homo sapiens
  source 1..1044: mol_type = unassigned DNA
accaagatggctactttgggacacacattccccttctatgctggccccaagccaaccttcccgatggacaccactttggccagcatcatcatgatctttctgactgcactggccacgttcatcgtcatcctgcctggcattcggggaaagacgaggctgttctggctgcttcgggtggtgaccagcttattcatcggggctgcaatcctggctgtgaatttcagttctgagtggtctgtgggccaggtcagcaccaacacatcatacaaggccttcagttctgagtggatcagcgctgatattgggctgcaggtcgggctgggtggagtcaacatcacactcacagggacccccgtgcagcagctgaatgagaccatcaattacaacgaggagttcacctggcgcctgggtgagaactatgctgaggagtatgcaaaggctctggagaaggggctgccagaccctgtgttgtacctagctgagaagttcactccaagaagcccatgtggcctataccgccagtaccgcctggcgggacactacacctcagccatgctatgggtggcattcctctgctggctgctggccaatgtgatgctctccatgcctgtgctggtatatggtggctacatgctattggccacgggcatcttccagctgttggctctgctcttcttctccatggccacatcactcacctcaccctgtcccctgcacctgggcgcttctgtgctgcatactcaccatgggcctgccttctggatcacattgaccacaggactgctgtgtgtgctgctgggcctggctatggcggtggcccacaggatgcagcctcacaggctgaaggctttcttcaaccagagtgtggatgaagaccccatgctggagtggagtcctgaggaaggtggactcctgagcccccgctaccggtccatggctgacagtcccaagtcccaggacattcccctgtcagaggcttcctccaccaaggcatactgtaaggaggcacaccccaaagatcctgattgtgctttataacattcc

SEQ ID NO: 8867 - DNA, 1760 bp, Homo sapiens
  source 1..1760: mol_type = unassigned DNA
aactcagcgccaacccgcagaaccaggaaagtaacggctacagacagtgagaaatagtttcgctcgccggctagaaaaactctgtcggtaccaaccccagagcgttgagagcagcccacctccacgcttccttaacggagaggtgcaggactcagacttcaccagcccactcggtcccagccttgtacgcaaagagacgccaaggacgcgctctcccgcgtccaggcagccccagcttgctggcttgcctgcccgcctgcgtgcagcactcggccggcgtgcagcatgaccctgtggaacggcgtactgcctttttacccccagccccggcatgccgcaggcttcagcgttccactgctcatcgttattctagtgtttttggctctagcagcaagcttcctgctcatcttgccggggatccgtggccactcgcgctggttttggttggtgagagttcttctcagtctgttcataggcgcagaaattgtggctgtgcacttcagtgcagaatggttcgtgggtacagtgaacaccaacacatcctacaaagccttcagcgcagcgcgcgttacagcccgtgtccgtctgctcgtgggcctggagggcattaatattacactcacagggaccccagtgcatcagctgaacgagaccattgactacaacgagcagttcacctggcgtctgaaagagaattacgccgcggagtacgcgaacgcactggagaaggggctgccggacccagtgctctacctggcggagaagttcacaccgagtagcccttgcggcctgtaccaccagtaccacctggcgggacactacgcctcggccacgctatgggtggcgttctgcttctggctcctctccaacgtgctgctctccacgccggccccgctctacggaggcctggcactgctgaccaccggagccttcgcgctcttcggggtcttcgccttggcctccatctctagcgtgccgctctgcccgctccgcctaggctcctccgcgctcaccactcagtacggcgccgccttctgggtcacgctggcaaccggcgtcctgtgcctcttcctcggaggggccgtggtgagtctccagtatgttcggcccagcgctcttcgcacccttctggaccaaagcgccaaggactgcagccaggagagagggggctcacctcttatcctcggcgacccactgcacaagcaggccgctctcccagacttaaaatgtatcaccactaacctgtgagggggacccaatctggactccttccccgccttgggacatcgcaggccgggaagcagtgcccgccaggcctgggccaggagagctccaggaagggcactgagcgctgctggcgcgaggcctcggacatccgcaggcaccagggaaagtctcctggggcgatctgtaaataaacctttttttcttttgttttttaaaaactgtttttcccattaattttcatggcttctccgcgccggggtcgcacgtcctcatgagcttcgctgggctggagacagcctagtacactctccgcagtgctgtgaaacctgattctctgcgtcgactccagagtaataggggcgccctctagtgaggccggagggaccctaccagagctagcatctttctgaaccaccccagggggacgttaggtggcagtgatgaggcaggtcacccactcccccgtcctggatgccactcagctagcccagctgagtggggtgggaaggaatagcgttttggagttgattccc

SEQ ID NO: 8868 - DNA, 6885 bp, Homo sapiens
  source 1..6885: mol_type = unassigned DNA
ggggaggagggaggccgggcctgcggccggggaccgagccgcaaagacagagcgggcagaggcgatggagggcgacggggtgccatggggcagcgagcccgtctcgggtcccggccccggcggcggcggaatgatccgcgagctgtgccggggcttcggccgctaccgccgctacctgggacggctgcgacagaacctgcgcgagacccagaagttcttccgcgacatcaagtgctcccacaaccacacttgtctctcctccctcacgggcggcggcggggccgagcgcggccctgcaggcgatgtcgccgaaaccgggctgcaggcgggccaactgagctgcatttccttcccacctaaggaagagaagtacctccagcagattgtggactgcctcccttgcatactgatcctcggccaggattgtaacgtcaagtgccagctgttgaatctgctgttgggggtgcaggtgcttcccaccaccaagctgggcagtgaggagagctgtaagcttcggcgcctccgcttcacctatgggactcagactcgggtcagcctggcgctccctggacagtatgaactagtgcacacgctggttgctcatcagggcaactgggagaccatccctgaggaggatctggaggtccaagagaacaatgaggatgctgctcatgttttagcggaactggaggtaacgatgcaccatgctctcttacaggaagtggacgttgtggtagcaccatgccaaggcctccggcccacagtggatgttctgggtgacttggtgaatgatttcttgcctgtgataacctatgcactccacaaagatgaactctctgagagggatgagcaagagcttcaggaaatccgaaagtatttctcctttcctgtattctttttcaaagtgccgaaactgggctcggagataatagactcctcaaccaggagaatggagagcgaaagatcaccgctttatcgccagctaattgacctgggctatctgagcagcagtcactggaactgtggggctcctggccaggatactaaagctcagagcatgttggtggaacagagtgaaaagctgagacacttgagcacattttctcaccaggtgttacagactcgcctggtggatgcagccaaggccctgaacctggtgcactgccactgccttgacatctttattaaccaggcatttgacatgcagcgggacctgcagatcactcccaaacgtctggaatatactcgaaaaaaggagaatgagttgtatgaatcattgatgaatattgccaaccgaaagcaggaggaaatgaaggatatgattgttgagacacttaataccatgaaggaggaacttctggatgatgctactaacatggagtttaaagacgtcattgtccctgagaatggagaaccaatcactgacttaggattctgcaagccagaggccatgatgtcaggcagcattgtggggacaccaatccatatggcccctgaacttttcacagggaagtacgataattccgtggatgtctacgcttttggaattcttttctggtatatctgctcaggctctgtcaagctccctgaggcatttgagaggtgtgctagcaaagaccatctctggaacaatgtgcggaggggggctcgcccagaacgtcttcctgtgtttgatgaggagtgctggcagttgatggaagcctgttgggatggcgaccccttgaagaggcctctcttgggcattgtccagcccatgctccagggcatcatgaatcggctctgcaagtccaattctgagcagccaaacagaggactagatgattctacttgaaagcaaagacctttctctttcactctctagttatttccttccccctcaccttttggccatggggagaatttgacatttattcactataggacacactcccaagggaactggtgcttgctgggaaacttggaaccttcccaggcagggatgactcctggacagtgaagagttgaatgactgagcatattcagcagctcactgaagcgccaagctatccctttagcaaaaaagtgtctcagatgtgtaaaagctgaggaatgtggtgttctggcttcacaaatgaaaaggaggcagatgttaccattgtcttttcactgtatatacttctaagacagcaagcgggacactgcagtggcaatagtgttaaaaaatctcattctcatgatttttggctctagctaggaatagtttagtcaggactcagaaaatttgagcttagttctgggattatgaaaacatggggacaaaaacaataacttgtggatgtctggttcctgctgtctgcagccaggtatctcaggttgcaatggtcagaagtcccagtgagggagctagaaacagagctatctgttcctcatagtgccagtgtgtttacatttataggaccacatatccctggtttctgggggagggtttcactgttacatcaccaagaggccctgaaaagaggaaaaaaaaaaaaaaagaggccaggcatggtggctcacgcctgtaatctcagcactttgggaggctgaggcgggcggatcacaaggtccagagttcaagagcagcctggccaacatggtgaaaccccgtctctactaaagatacaaaaaattagccgggcgtggtggtgcatgcctgtaatccaagatactcaggaggctgaggcaggagaatcgcttgaacctgggaggcggaggttgcagtgagccgagatcatgccattgcactccagcctgggcgacagagtgagactctgtctcaaaaaaaaaaaaaaaatagaatgtgtatgcatatatttgtgtgtatatgtatatatgtgtgtgtgtctatatctctatctatatagacatacacacaggagttattggatttagagttactgctaaccccagaacagaatctgttcttttacctttgagtcttttcttttgtttacctcttttcatctcaaagtgggaaagctccagataacatggtacttaggagtgagtgtctaagcaaaaccaacccaatgcgaagtatttgggtgagaactgagaggtgggagatgattggaggccatggcctatgtacaaacatactggaagaaaaccagcttgtttttaaaacttaacacaatcagaaatttttctttttgtgtttgaatctaacacactgacgtttggaaaacttgatcaatgagcttttaaccacgatttctcccgcaatttgttccttctttttacctttttaaaaatctgttagaagaaaaaaagcagcagacgaaagagaaaaaccctcctctggtagttctgtgtgtgcccctcacccctgtgtgctagtgtctgggaagtttccctgaaaggtgggaggcgggtgggtggtcttttggagggttcctcatgaagtgtgcttgaggaaagaaattctgattctaggcagaggaaggggaacaatttaaatattggtgcatctcagatgcacttgacttcaagccttcctcaaccaaactggtccattagattccgaaaaacaggtagacgaggaagtagacagtggaagtgagtagtctccctccatctgcctaatccccaataactgtggtctggcccctgtgttcagcccgagagtttgtaaaacaggtccccaggtaggtgtataagatgagttgcaaattagccgggcatgctggcacgcaccagtaatcccagctacttgggaggctgaggcaggagaatcacttgaacccgggaggcagaggtcatggtgagccgagatcacgccactgcactccagcctgggcaacagagcgagactctatctcaaaaaaaaacaaaaaaaaaaacaaaaaacaaagatgagtcgcacatctgctgctgggattttctagggttgtctatgacagaatgaccatcttttaaatattaatggagtataaatggagtctataatgggtctttcatataacttttaactctttggctatcctgggctctgatcatgatatgtttgagcatagtagctccctaaactcttggagcctttcagaaattccatgtagtgctaataacctttttacttgcaaatgataaagtaactgactcagtgtctttgggctctgcaggctttagccttgttttggtaggatgttcagtatattctcagaatttttaccacctatttagctatacttcaagtactctattctctgcactaacttactgtccttctgggaactatgatggggcttcaagggagtcaggtgtcaagaaaggaggggtaagtactctctacttgctggaaaatcattgtaagtctgttgtgtatgaaattttaggaaaagtcttatatagttccctttccagactgttttcttttgactctaactataatcataagtctgtgcttccattatgaaggtcacattcctagcattcttgggaagtattagctcatactctcattcacatatgggaggttagatttttttcctctacccagagtccctttttagtttaccccacggcttagtttgctgtcagataccagttctctagcagattccccaacagttttttccccagtggggagggtggaagggagggactgatataagtaaggagatgagtagttgtgttacagttcattttctttaaaaaaaagtattttgagaaaaggtgcaaaatattcttgaaagtctctaggccagccaaagtccacatatggatatttggggatgttatttaaatactcagcaggctgagtgcaggtatacgtgtgtatagagtgtgtatactttgcttttgttttataacattgtcagctaattttggctttgttctttggcatccattcttattataagtgatggaatgccatgaaatgtactgtattgtatattacttgggaggacactaggttttcaaagaagtctggcagcacttgggttatagagggctcagcatgaccaaagtcctaaagattttacctcccagctttggttgtatgtgttcccaagtggtgaggtgagattgtggctggaggaagaaaaaggatggcatgaaagaatgacccttattgtggtctgtccttctaatcaacataattagggcagcttaccccaacatgaaaatgatgacctggccatttttaatggccagagcttgaagtctggtctctcattttgtttcagaaatgagtgagaggccttcctgcagagcagtcaggagaaatggtggagcctggggccctggaatggctgaccctgtgcctagagagctgatggcaagggctgtctggcatggctcatttgggtggggtttccccaggcataccttagttccctgatcctctgcaaagagtagctcattgactgagcaagcgcttcaggaggactgtgctggttgttcccagaccaaagagagtcacttttgactccatcaacttcaaggggacagagcctaggcagcagattctcctaatttttaacactaaaattcaaggaagcagtggaggaaagaatgcattactaccacagatagaaataggggactcatagaactctcgactagtacctgtcagctctcaaatgcattcttgtgtctttgcttgagctgccaaagaagggtcacaaagtgttcttcctcatggaagaagtgcctcggggttgcagggctgcaaagtgacaactgcactgaatgacactttattttttggctttggcttattatttagcactgggaggcccaggggaattggtgattacagtagcactttgggaagttaaagccccctttgggcttgctttggagagatgatggcatgcttggtattccatttggataatcaggaagcctccctagtccatccatattgtgtcagagtgggattaacaaccctggaagagtccactgccaaaagagtagttgctttcctggaatttccaaagcttttggattttctggatcaagtaacccactttttaaaacctgaggtcaggagttcgagaccagcctggtaacatggtgaaaccccgtctctattaaaaatagaaaaaattagccaggcatggtggcgggcacctatagtcccagctactcaggaggctgaggtaggagaattgcttgaacccaggagacagaggctgcattgagccaagatcacaccactgcactccagcctgggcagcagagcaagactccatctcaaaaaaaaaaaaaagaaaaagaaaaagaaggttaatccttcagttatggaggtgggatgaatagagcttgtttgatgttaaagtgggtaaggagggagtggccttgagacacttgtattccaaactctcctggaggtttccagtagcactactgttcctaaaagggtttcatttttaacttcatctgttttgttaacatccagtccaattgaggtgatctcagaggtgcatcaggacatctagcactggggaggccaccttgcccagatagttgaaaagaaaattggtctgggcagcctgttgtcttttgtcttcatgtaatgttttttctttgttttaaaggactaatgtttattacagtgttaaataaaagtgtaagatactaagtgtgtagaataaaagtgcaataacaaaagacaatgactttggcacacacttcagtctttatcctctctcctttcttgtgctacctggctctttccataatattgttacagcaggaccgtcttaattgtgtgcattttgaagagatgcgactctgggttaatcttcattagtgtaatattgaagggttgggtttggttttatagagtattctgtatacttgttgggatacacaaataccagatgtgctgtataataaagatcacattaacgtttt

SEQ ID NO: 8869 - DNA, 7739 bp, Homo sapiens
  source 1..7739: mol_type = unassigned DNA
ccgagccgcaaagacagagcgggcagaggcgatggagggcgacggggtgccatggggcagcgagcccgtctcgggtcccggccccggcggcggcggaatgatccgcgagctgtgccggggcttcggccgctaccgccgctacctgggacggctgcgacagaacctgcgcgagacccagaagttcttccgcgacatcaagtgctcccacaaccacacttgtctctcctccctcacgggcggcggcggggccgagcgcggccctgcaggcgatgtcgccgaaaccgggctgcaggcgggccaactgagctgcatttccttcccacctaaggaagagaagtacctccagcagattgtggactgcctcccttgcatactgatcctcggccaggattgtaacgtcaagtgccagctgttgaatctgctgttgggggtgcaggtgcttcccaccaccaagctgggcagtgaggagagctgtaagcttcggcgcctccgcttcacctatgggactcagactcgggtcagcctggcgctccctggacagtatgaactagtgcacacgctggttgctcatcagggcaactgggagaccatccctgaggaggatctggaggtccaagagaacaatgaggatgctgctcatgttttagcggaactggaggtaacgatgcaccatgctctcttacaggaagtggacgttgtggtagcaccatgccaaggcctccggcccacagtggatgttctgggtgacttggtgaatgatttcttgcctgtgataacctatgcactccacaaagatgaactctctgagagggatgagcaagagcttcaggaaatccgaaagtatttctcctttcctgtattctttttcaaagtgccgaaactgggctcggagataatagactcctcaaccaggagaatggagagcgaaagatcaccgctttatcgccagctaattgacctgggctatctgagcagcagtcactggaactgtggggctcctggccaggatactaaagctcagagcatgttggtggaacagagtgaaaagctgagacacttgagcacattttctcaccaggtgttacagactcgcctggtggatgcagccaaggccctgaacctggtgcactgccactgccttgacatctttattaaccaggcatttgacatgcagcgggacctgcagatcactcccaaacgtctggaatatactcgaaaaaaggagaatgagttgtatgaatcattgatgaatattgccaaccgaaagcaggaggaaatgaaggatatgattgttgagacacttaataccatgaaggaggaacttctggatgatgctactaacatggagtttaaagacgtcattgtccctgagaatggagaaccagtaggcaccagagagatcaaatgctgcatccgacagatccaggaactcatcatctcccgacttaatcaggcagtggctaataagctgatcagctcagtggattacctgagggaaagcttcgtcggaaccctggaacgatgtctgcagagcctggagaagtctcaggatgtctcagttcacatcaccagtaattatctcaaacagatcttaaatgctgcctatcatgttgaagtcacgtttcactcagggtcgtcagttacaaggatgctatgggagcaaatcaaacagatcatccagcgcatcacatgggtgagcccacctgccatcactctggaatggaagaggaaggtggcccaggaagccattgagagcctcagcgcctccaaattggctaagagcatttgcagccaattccggactcggctcaatagttcccacgaggcttttgcagcctccttgcggcagctggaagctggccactcaggccggttagagaaaacggaagatctatggctgagggttcggaaagatcatgctccccgcctggcccgcctttctctggaaagctgttctttacaggatgtcttgcttcatcgtaaacctaaactgggacaggaactgggccggggccagtatggtgtggtatacctgtgtgacaactggggaggacacttcccttgtgccctcaaatcagttgtccctccagatgagaagcactggaatgatctggctttggaatttcactatatgaggtctctgccgaagcatgagcgattggtggatctccatggttcagtcattgactacaactatggtggtggctccagcattgctgtgctcctcattatggagcggctacaccgggatctctacacagggctgaaggctgggctgaccctggagacacgtttgcagatagcactagatgtggtggagggaatccgcttcctgcacagccagggacttgtccatcgtgatatcaaactgaaaaatgtgctgctggataagcagaaccgtgccaagatcactgacttaggattctgcaagccagaggccatgatgtcaggcagcattgtggggacaccaatccatatggcccctgaacttttcacaggggctcgcccagaacgtcttcctgtgtttgatgaggagtgctggcagttgatggaagcctgttgggatggcgaccccttgaagaggcctctcttgggcattgtccagcccatgctccagggcatcatgaatcggctctgcaagtccaattctgagcagccaaacagaggactagatgattctacttgaaagcaaagacctttctctttcactctctagttatttccttccccctcaccttttggccatggggagaatttgacatttattcactataggacacactcccaagggaactggtgcttgctgggaaacttggaaccttcccaggcagggatgactcctggacagtgaagagttgaatgactgagcatattcagcagctcactgaagcgccaagctatccctttagcaaaaaagtgtctcagatgtgtaaaagctgaggaatgtggtgttctggcttcacaaatgaaaaggaggcagatgttaccattgtcttttcactgtatatacttctaagacagcaagcgggacactgcagtggcaatagtgttaaaaaatctcattctcatgatttttggctctagctaggaatagtttagtcaggactcagaaaatttgagcttagttctgggattatgaaaacatggggacaaaaacaataacttgtggatgtctggttcctgctgtctgcagccaggtatctcaggttgcaatggtcagaagtcccagtgagggagctagaaacagagctatctgttcctcatagtgccagtgtgtttacatttataggaccacatatccctggtttctgggggagggtttcactgttacatcaccaagaggccctgaaaagaggaaaaaaaaaaaaaaagaggccaggcatggtggctcacgcctgtaatctcagcactttgggaggctgaggcgggcggatcacaaggtccagagttcaagagcagcctggccaacatggtgaaaccccgtctctactaaagatacaaaaaattagccgggcgtggtggtgcatgcctgtaatccaagatactcaggaggctgaggcaggagaatcgcttgaacctgggaggcggaggttgcagtgagccgagatcatgccattgcactccagcctgggcgacagagtgagactctgtctcaaaaaaaaaaaaaaaatagaatgtgtatgcatatatttgtgtgtatatgtatatatgtgtgtgtgtctatatctctatctatatagacatacacacaggagttattggatttagagttactgctaaccccagaacagaatctgttcttttacctttgagtcttttcttttgtttacctcttttcatctcaaagtgggaaagctccagataacatggtacttaggagtgagtgtctaagcaaaaccaacccaatgcgaagtatttgggtgagaactgagaggtgggagatgattggaggccatggcctatgtacaaacatactggaagaaaaccagcttgtttttaaaacttaacacaatcagaaatttttctttttgtgtttgaatctaacacactgacgtttggaaaacttgatcaatgagcttttaaccacgatttctcccgcaatttgttccttctttttacctttttaaaaatctgttagaagaaaaaaagcagcagacgaaagagaaaaaccctcctctggtagttctgtgtgtgcccctcacccctgtgtgctagtgtctgggaagtttccctgaaaggtgggaggcgggtgggtggtcttttggagggttcctcatgaagtgtgcttgaggaaagaaattctgattctaggcagaggaaggggaacaatttaaatattggtgcatctcagatgcacttgacttcaagccttcctcaaccaaactggtccattagattccgaaaaacaggtagacgaggaagtagacagtggaagtgagtagtctccctccatctgcctaatccccaataactgtggtctggcccctgtgttcagcccgagagtttgtaaaacaggtccccaggtaggtgtataagatgagttgcaaattagccgggcatgctggcacgcaccagtaatcccagctacttgggaggctgaggcaggagaatcacttgaacccgggaggcagaggtcatggtgagccgagatcacgccactgcactccagcctgggcaacagagcgagactctatctcaaaaaaaaacaaaaaaaaaaacaaaaaacaaagatgagtcgcacatctgctgctgggattttctagggttgtctatgacagaatgaccatcttttaaatattaatggagtataaatggagtctataatgggtctttcatataacttttaactctttggctatcctgggctctgatcatgatatgtttgagcatagtagctccctaaactcttggagcctttcagaaattccatgtagtgctaataacctttttacttgcaaatgataaagtaactgactcagtgtctttgggctctgcaggctttagccttgttttggtaggatgttcagtatattctcagaatttttaccacctatttagctatacttcaagtactctattctctgcactaacttactgtccttctgggaactatgatggggcttcaagggagtcaggtgtcaagaaaggaggggtaagtactctctacttgctggaaaatcattgtaagtctgttgtgtatgaaattttaggaaaagtcttatatagttccctttccagactgttttcttttgactctaactataatcataagtctgtgcttccattatgaaggtcacattcctagcattcttgggaagtattagctcatactctcattcacatatgggaggttagatttttttcctctacccagagtccctttttagtttaccccacggcttagtttgctgtcagataccagttctctagcagattccccaacagttttttccccagtggggagggtggaagggagggactgatataagtaaggagatgagtagttgtgttacagttcattttctttaaaaaaaagtattttgagaaaaggtgcaaaatattcttgaaagtctctaggccagccaaagtccacatatggatatttggggatgttatttaaatactcagcaggctgagtgcaggtatacgtgtgtatagagtgtgtatactttgcttttgttttataacattgtcagctaattttggctttgttctttggcatccattcttattataagtgatggaatgccatgaaatgtactgtattgtatattacttgggaggacactaggttttcaaagaagtctggcagcacttgggttatagagggctcagcatgaccaaagtcctaaagattttacctcccagctttggttgtatgtgttcccaagtggtgaggtgagattgtggctggaggaagaaaaaggatggcatgaaagaatgacccttattgtggtctgtccttctaatcaacataattagggcagcttaccccaacatgaaaatgatgacctggccatttttaatggccagagcttgaagtctggtctctcattttgtttcagaaatgagtgagaggccttcctgcagagcagtcaggagaaatggtggagcctggggccctggaatggctgaccctgtgcctagagagctgatggcaagggctgtctggcatggctcatttgggtggggtttccccaggcataccttagttccctgatcctctgcaaagagtagctcattgactgagcaagcgcttcaggaggactgtgctggttgttcccagaccaaagagagtcacttttgactccatcaacttcaaggggacagagcctaggcagcagattctcctaatttttaacactaaaattcaaggaagcagtggaggaaagaatgcattactaccacagatagaaataggggactcatagaactctcgactagtacctgtcagctctcaaatgcattcttgtgtctttgcttgagctgccaaagaagggtcacaaagtgttcttcctcatggaagaagtgcctcggggttgcagggctgcaaagtgacaactgcactgaatgacactttattttttggctttggcttattatttagcactgggaggcccaggggaattggtgattacagtagcactttgggaagttaaagccccctttgggcttgctttggagagatgatggcatgcttggtattccatttggataatcaggaagcctccctagtccatccatattgtgtcagagtgggattaacaaccctggaagagtccactgccaaaagagtagttgctttcctggaatttccaaagcttttggattttctggatcaagtaacccactttttaaaacctgaggtcaggagttcgagaccagcctggtaacatggtgaaaccccgtctctattaaaaatagaaaaaattagccaggcatggtggcgggcacctatagtcccagctactcaggaggctgaggtaggagaattgcttgaacccaggagacagaggctgcattgagccaagatcacaccactgcactccagcctgggcagcagagcaagactccatctcaaaaaaaaaaaaaagaaaaagaaaaagaaggttaatccttcagttatggaggtgggatgaatagagcttgtttgatgttaaagtgggtaaggagggagtggccttgagacacttgtattccaaactctcctggaggtttccagtagcactactgttcctaaaagggtttcatttttaacttcatctgttttgttaacatccagtccaattgaggtgatctcagaggtgcatcaggacatctagcactggggaggccaccttgcccagatagttgaaaagaaaattggtctgggcagcctgttgtcttttgtcttcatgtaatgttttttctttgttttaaaggactaatgtttattacagtgttaaataaaagtgtaagatactaagtgtgtagaataaaagtgcaataacaaaagacaatgactttggcacacacttcagtctttatcctctctcctttcttgtgctacctggctctttccataatattgttacagcaggaccgtcttaattgtgtgcattttgaagagatgcgactctgggttaatcttcattagtgtaatattgaagggttgggtttggttttatagagtattctgtatacttgttgggatacacaaataccagatgtgctgtataataaagatcacattaacgttt

SEQ ID NO: 8870 - DNA, 7874 bp, Homo sapiens
  source 1..7874: mol_type = unassigned DNA
ccgagccgcaaagacagagcgggcagaggcgatggagggcgacggggtgccatggggcagcgagcccgtctcgggtcccggccccggcggcggcggaatgatccgcgagctgtgccggggcttcggccgctaccgccgctacctgggacggctgcgacagaacctgcgcgagacccagaagttcttccgcgacatcaagtgctcccacaaccacacttgtctctcctccctcacgggcggcggcggggccgagcgcggccctgcaggcgatgtcgccgaaaccgggctgcaggcgggccaactgagctgcatttccttcccacctaaggaagagaagtacctccagcagattgtggactgcctcccttgcatactgatcctcggccaggattgtaacgtcaagtgccagctgttgaatctgctgttgggggtgcaggtgcttcccaccaccaagctgggcagtgaggagagctgtaagcttcggcgcctccgcttcacctatgggactcagactcgggtcagcctggcgctccctggacagtatgaactagtgcacacgctggttgctcatcagggcaactgggagaccatccctgaggaggatctggaggtccaagagaacaatgaggatgctgctcatgttttagcggaactggaggtaacgatgcaccatgctctcttacaggaagtggacgttgtggtagcaccatgccaaggcctccggcccacagtggatgttctgggtgacttggtgaatgatttcttgcctgtgataacctatgcactccacaaagatgaactctctgagagggatgagcaagagcttcaggaaatccgaaagtatttctcctttcctgtattctttttcaaagtgccgaaactgggctcggagataatagactcctcaaccaggagaatggagagcgaaagatcaccgctttatcgccagctaattgacctgggctatctgagcagcagtcactggaactgtggggctcctggccaggatactaaagctcagagcatgttggtggaacagagtgaaaagctgagacacttgagcacattttctcaccaggtgttacagactcgcctggtggatgcagccaaggccctgaacctggtgcactgccactgccttgacatctttattaaccaggcatttgacatgcagcgggacctgcagatcactcccaaacgtctggaatatactcgaaaaaaggagaatgagttgtatgaatcattgatgaatattgccaaccgaaagcaggaggaaatgaaggatatgattgttgagacacttaataccatgaaggaggaacttctggatgatgctactaacatggagtttaaagacgtcattgtccctgagaatggagaaccagtaggcaccagagagatcaaatgctgcatccgacagatccaggaactcatcatctcccgacttaatcaggcagtggctaataagctgatcagctcagtggattacctgagggaaagcttcgtcggaaccctggaacgatgtctgcagagcctggagaagtctcaggatgtctcagttcacatcaccagtaattatctcaaacagatcttaaatgctgcctatcatgttgaagtcacgtttcactcagggtcgtcagttacaaggatgctatgggagcaaatcaaacagatcatccagcgcatcacatgggtgagcccacctgccatcactctggaatggaagaggaaggtggcccaggaagccattgagagcctcagcgcctccaaattggctaagagcatttgcagccaattccggactcggctcaatagttcccacgaggcttttgcagcctccttgcggcagctggaagctggccactcaggccggttagagaaaacggaagatctatggctgagggttcggaaagatcatgctccccgcctggcccgcctttctctggaaagctgttctttacaggatgtcttgcttcatcgtaaacctaaactgggacaggaactgggccggggccagtatggtgtggtatacctgtgtgacaactggggaggacacttcccttgtgccctcaaatcagttgtccctccagatgagaagcactggaatgatctggctttggaatttcactatatgaggtctctgccgaagcatgagcgattggtggatctccatggttcagtcattgactacaactatggtggtggctccagcattgctgtgctcctcattatggagcggctacaccgggatctctacacagggctgaaggctgggctgaccctggagacacgtttgcagatagcactagatgtggtggagggaatccgcttcctgcacagccagggacttgtccatcgtgatatcaaactgaaaaatgtgctgctggataagcagaaccgtgccaagatcactgacttaggattctgcaagccagaggccatgatgtcaggcagcattgtggggacaccaatccatatggcccctgaacttttcacagggaagtacgataattccgtggatgtctacgcttttggaattcttttctggtatatctgctcaggctctgtcaagctccctgaggcatttgagaggtgtgctagcaaagaccatctctggaacaatgtgcggaggggggctcgcccagaacgtcttcctgtgtttgatgaggagtgctggcagttgatggaagcctgttgggatggcgaccccttgaagaggcctctcttgggcattgtccagcccatgctccagggcatcatgaatcggctctgcaagtccaattctgagcagccaaacagaggactagatgattctacttgaaagcaaagacctttctctttcactctctagttatttccttccccctcaccttttggccatggggagaatttgacatttattcactataggacacactcccaagggaactggtgcttgctgggaaacttggaaccttcccaggcagggatgactcctggacagtgaagagttgaatgactgagcatattcagcagctcactgaagcgccaagctatccctttagcaaaaaagtgtctcagatgtgtaaaagctgaggaatgtggtgttctggcttcacaaatgaaaaggaggcagatgttaccattgtcttttcactgtatatacttctaagacagcaagcgggacactgcagtggcaatagtgttaaaaaatctcattctcatgatttttggctctagctaggaatagtttagtcaggactcagaaaatttgagcttagttctgggattatgaaaacatggggacaaaaacaataacttgtggatgtctggttcctgctgtctgcagccaggtatctcaggttgcaatggtcagaagtcccagtgagggagctagaaacagagctatctgttcctcatagtgccagtgtgtttacatttataggaccacatatccctggtttctgggggagggtttcactgttacatcaccaagaggccctgaaaagaggaaaaaaaaaaaaaaagaggccaggcatggtggctcacgcctgtaatctcagcactttgggaggctgaggcgggcggatcacaaggtccagagttcaagagcagcctggccaacatggtgaaaccccgtctctactaaagatacaaaaaattagccgggcgtggtggtgcatgcctgtaatccaagatactcaggaggctgaggcaggagaatcgcttgaacctgggaggcggaggttgcagtgagccgagatcatgccattgcactccagcctgggcgacagagtgagactctgtctcaaaaaaaaaaaaaaaatagaatgtgtatgcatatatttgtgtgtatatgtatatatgtgtgtgtgtctatatctctatctatatagacatacacacaggagttattggatttagagttactgctaaccccagaacagaatctgttcttttacctttgagtcttttcttttgtttacctcttttcatctcaaagtgggaaagctccagataacatggtacttaggagtgagtgtctaagcaaaaccaacccaatgcgaagtatttgggtgagaactgagaggtgggagatgattggaggccatggcctatgtacaaacatactggaagaaaaccagcttgtttttaaaacttaacacaatcagaaatttttctttttgtgtttgaatctaacacactgacgtttggaaaacttgatcaatgagcttttaaccacgatttctcccgcaatttgttccttctttttacctttttaaaaatctgttagaagaaaaaaagcagcagacgaaagagaaaaaccctcctctggtagttctgtgtgtgcccctcacccctgtgtgctagtgtctgggaagtttccctgaaaggtgggaggcgggtgggtggtcttttggagggttcctcatgaagtgtgcttgaggaaagaaattctgattctaggcagaggaaggggaacaatttaaatattggtgcatctcagatgcacttgacttcaagccttcctcaaccaaactggtccattagattccgaaaaacaggtagacgaggaagtagacagtggaagtgagtagtctccctccatctgcctaatccccaataactgtggtctggcccctgtgttcagcccgagagtttgtaaaacaggtccccaggtaggtgtataagatgagttgcaaattagccgggcatgctggcacgcaccagtaatcccagctacttgggaggctgaggcaggagaatcacttgaacccgggaggcagaggtcatggtgagccgagatcacgccactgcactccagcctgggcaacagagcgagactctatctcaaaaaaaaacaaaaaaaaaaacaaaaaacaaagatgagtcgcacatctgctgctgggattttctagggttgtctatgacagaatgaccatcttttaaatattaatggagtataaatggagtctataatgggtctttcatataacttttaactctttggctatcctgggctctgatcatgatatgtttgagcatagtagctccctaaactcttggagcctttcagaaattccatgtagtgctaataacctttttacttgcaaatgataaagtaactgactcagtgtctttgggctctgcaggctttagccttgttttggtaggatgttcagtatattctcagaatttttaccacctatttagctatacttcaagtactctattctctgcactaacttactgtccttctgggaactatgatggggcttcaagggagtcaggtgtcaagaaaggaggggtaagtactctctacttgctggaaaatcattgtaagtctgttgtgtatgaaattttaggaaaagtcttatatagttccctttccagactgttttcttttgactctaactataatcataagtctgtgcttccattatgaaggtcacattcctagcattcttgggaagtattagctcatactctcattcacatatgggaggttagatttttttcctctacccagagtccctttttagtttaccccacggcttagtttgctgtcagataccagttctctagcagattccccaacagttttttccccagtggggagggtggaagggagggactgatataagtaaggagatgagtagttgtgttacagttcattttctttaaaaaaaagtattttgagaaaaggtgcaaaatattcttgaaagtctctaggccagccaaagtccacatatggatatttggggatgttatttaaatactcagcaggctgagtgcaggtatacgtgtgtatagagtgtgtatactttgcttttgttttataacattgtcagctaattttggctttgttctttggcatccattcttattataagtgatggaatgccatgaaatgtactgtattgtatattacttgggaggacactaggttttcaaagaagtctggcagcacttgggttatagagggctcagcatgaccaaagtcctaaagattttacctcccagctttggttgtatgtgttcccaagtggtgaggtgagattgtggctggaggaagaaaaaggatggcatgaaagaatgacccttattgtggtctgtccttctaatcaacataattagggcagcttaccccaacatgaaaatgatgacctggccatttttaatggccagagcttgaagtctggtctctcattttgtttcagaaatgagtgagaggccttcctgcagagcagtcaggagaaatggtggagcctggggccctggaatggctgaccctgtgcctagagagctgatggcaagggctgtctggcatggctcatttgggtggggtttccccaggcataccttagttccctgatcctctgcaaagagtagctcattgactgagcaagcgcttcaggaggactgtgctggttgttcccagaccaaagagagtcacttttgactccatcaacttcaaggggacagagcctaggcagcagattctcctaatttttaacactaaaattcaaggaagcagtggaggaaagaatgcattactaccacagatagaaataggggactcatagaactctcgactagtacctgtcagctctcaaatgcattcttgtgtctttgcttgagctgccaaagaagggtcacaaagtgttcttcctcatggaagaagtgcctcggggttgcagggctgcaaagtgacaactgcactgaatgacactttattttttggctttggcttattatttagcactgggaggcccaggggaattggtgattacagtagcactttgggaagttaaagccccctttgggcttgctttggagagatgatggcatgcttggtattccatttggataatcaggaagcctccctagtccatccatattgtgtcagagtgggattaacaaccctggaagagtccactgccaaaagagtagttgctttcctggaatttccaaagcttttggattttctggatcaagtaacccactttttaaaacctgaggtcaggagttcgagaccagcctggtaacatggtgaaaccccgtctctattaaaaatagaaaaaattagccaggcatggtggcgggcacctatagtcccagctactcaggaggctgaggtaggagaattgcttgaacccaggagacagaggctgcattgagccaagatcacaccactgcactccagcctgggcagcagagcaagactccatctcaaaaaaaaaaaaaagaaaaagaaaaagaaggttaatccttcagttatggaggtgggatgaatagagcttgtttgatgttaaagtgggtaaggagggagtggccttgagacacttgtattccaaactctcctggaggtttccagtagcactactgttcctaaaagggtttcatttttaacttcatctgttttgttaacatccagtccaattgaggtgatctcagaggtgcatcaggacatctagcactggggaggccaccttgcccagatagttgaaaagaaaattggtctgggcagcctgttgtcttttgtcttcatgtaatgttttttctttgttttaaaggactaatgtttattacagtgttaaataaaagtgtaagatactaagtgtgtagaataaaagtgcaataacaaaagacaatgactttggcacacacttcagtctttatcctctctcctttcttgtgctacctggctctttccataatattgttacagcaggaccgtcttaattgtgtgcattttgaagagatgcgactctgggttaatcttcattagtgtaatattgaagggttgggtttggttttatagagtattctgtatacttgttgggatacacaaataccagatgtgctgtataataaagatcacattaacgttt

SEQ ID NO: 8871 - DNA, 2019 bp, Homo sapiens
  source 1..2019: mol_type = unassigned DNA
gcgaaggacatttgggctgtgtgtgcgacgcgggtcggaggggcagtcgggggaaccgcgaagaagccgaggagcccggagccccgcgtgacgctcctctctcagtccaaaagcggcttttggttcggcgcagagagacccgggggtctagcttttcctcgaaaagcgccgccctgcccttggccccgagaacagacaaagagcaccgcagggccgatcacgctgggggcgctgaggccggccatggtcatggaagtgggcaccctggacgctggaggcctgcgggcgctgctgggggagcgagcggcgcaatgcctgctgctggactgccgctccttcttcgctttcaacgccggccacatcgccggctctgtcaacgtgcgcttcagcaccatcgtgcggcgccgggccaagggcgccatgggcctggagcacatcgtgcccaacgccgagctccgcggccgcctgctggccggcgcctaccacgccgtggtgttgctggacgagcgcagcgccgccctggacggcgccaagcgcgacggcaccctggccctggcggccggcgcgctctgccgcgaggcgcgcgccgcgcaagtcttcttcctcaaaggaggatacgaagcgttttcggcttcctgcccggagctgtgcagcaaacagtcgacccccatggggctcagccttcccctgagtactagcgtccctgacagcgcggaatctgggtgcagttcctgcagtaccccactctacgatcagggtggcccggtggaaatcctgccctttctgtacctgggcagtgcgtatcacgcttcccgcaaggacatgctggatgccttgggcatcactgccttgatcaacgtctcagccaattgtcccaaccattttgagggtcactaccagtacaagagcatccctgtggaggacaaccacaaggcagacatcagctcctggttcaacgaggccattgacttcatagactccatcaagaatgctggaggaagggtgtttgtccactgccaggcaggcatttcccggtcagccaccatctgccttgcttaccttatgaggactaatcgagtcaagctggacgaggcctttgagtttgtgaagcagaggcgaagcatcatctctcccaacttcagcttcatgggccagctgctgcagtttgagtcccaggtgctggctccgcactgttcggcagaggctgggagccccgccatggctgtgctcgaccgaggcacctccaccaccaccgtgttcaacttccccgtctccatccctgtccactccacgaacagtgcgctgagctaccttcagagccccattacgacctctcccagctgctgaaaggccacgggaggtgaggctcttcacatcccattgggactccatgctccttgagaggagaaatgcaataactctgggaggggctcgagagggctggtccttatttatttaacttcacccgagttcctctgggtttctaagcagttatggtgatgacttagcgtcaagacatttgctgaactcagcacattcgggaccaatatatagtgggtacatcaagtccatctgacaaaatggggcagaagagaaaggactcagtgtgtgatccggtttctttttgctcgcccctgttttttgtagaatctcttcatgcttgacatacctaccagtattattcccgacgacacatatacatatgagaatataccttatttatttttgtgtaggtgtctgccttcacaaatgtcattgtctactcctagaagaaccaaatacctcaatttttgtttttgagtactgtactatcctgtaaatatatcttaagcaggtttgttttcagcactgatggaaaataccagtgttgggtttttttttagttgccaacagttgtatgtttgctgattatttatgacctgaaataatatatttcttcttctaagaagacattttgttacataaggatgacttttttatacaatggaataaattatggcatttctattgaaatttcaa

SEQ ID NO: 8872 - DNA, 1394 bp, Homo sapiens
  source 1..1394: mol_type = unassigned DNA
gcgaaggacatttgggctgtgtgtgcgacgcgggtcggaggggcagtcgggggaaccgcgaagaagccgaggagcccggagccccgcgtgacgctcctctctcagtccaaaagcggcttttggttcggcgcagagagacccgggggtctagcttttcctcgaaaagcgccgccctgcccttggccccgagaacagacaaagagcaccgcagggccgatcacgctgggggcgctgaggccggccatggtcatggaagtgggcaccctggacgctggaggcctgcgggcgctgctgggggagcgagcggcgcaatgcctgctgctggactgccgctccttcttcgctttcaacgccggccacatcgccggctctgtcaacgtgcgcttcagcgccgcgcaagtcttcttcctcaaaggaggatacgaagcgttttcggcttcctgcccggagctgtgcagcaaacagtcgacccccatggggctcagccttcccctgagtactagcgtccctgacagcgcggaatctgggtgcagttcctgcagtaccccactctacgatcagggtggcccggtggaaatcctgccctttctgtacctgggcagtgcgtatcacgcttcccgcaaggacatgctggatgccttgggcatcactgccttgatcaacgtctcagccaattgtcccaaccattttgagggtcactaccagtacaagagcatccctgtggaggacaaccacaaggcagacatcagctcctggttcaacgaggccattgacttcatagactccatcaagaatgctggaggaagggtgtttgtccactgccaggcaggcatttcccggtcagccaccatctgccttgcttaccttatgaggactaatcgagtcaagctggacgaggcctttgagtttgtgaagcagaggcgaagcatcatctctcccaacttcagcttcatgggccagctgctgcagtttgagtcccaggtgctggctccgcactgttcggcagaggctgggagccccgccatggctgtgctcgaccgaggcacctccaccaccaccgtgttcaacttccccgtctccatccctgtccactccacgaacagtgcgctgagctaccttcagagccccattacgacctctcccagctgctgaaaggccacgggaggtgaggctcttcacatcccattgggactccatgctccttgagaggagaaatgcaataactctgggaggggctcgagagggctggtccttatttatttaacttcacccgagttcctctgggtttctaagcagttatggtgatgacttagcgtcaagacatttgctgaactcagcacattcgggaccaatatatagtgggtacatcaagtccatctgacaaaatggggcag

SEQ ID NO: 8873 - DNA, 1854 bp, Homo sapiens
  source 1..1854: mol_type = unassigned DNA
gcgaaggacatttgggctgtgtgtgcgacgcgggtcggaggggcagtcgggggaaccgcgaagaagccgaggagcccggagccccgcgtgacgctcctctctcagtccaaaagcggcttttggttcggcgcagagagacccgggggtctagcttttcctcgaaaagcgccgccctgcccttggccccgagaacagacaaagagcaccgcagggccgatcacgctgggggcgctgaggccggccatggtcatggaagtgggcaccctggacgctggaggcctgcgggcgctgctgggggagcgagcggcgcaatgcctgctgctggactgccgctccttcttcgctttcaacgccggccacatcgccggctctgtcaacgtgcgcttcagcaccatcgtgcggcgccgggccaagggcgccatgggcctggagcacatcgtgcccaacgccaagcgcgacggcaccctggccctggcggccggcgcgctctgccgcgaggcgcgcgccgcgcaagtcttcttcctcaaaggaggatacgaagcgttttcggcttcctgcccggagctgtgcagcaaacagtcgacccccatggggctcagccttcccctgagtactagcgtccctgacagcgcggaatctgggtgcagttcctgcagtaccccactctacgatcagggtggcccggtggaaatcctgccctttctgtacctgggcagtgcgtatcacgcttcccgcaaggacatgctggatgccttgggcatcactgccttgatcaacgtctcagccaattgtcccaaccattttgagggtcactaccagtacaagagcatccctgtggaggacaaccacaaggcagacatcagctcctggttcaacgaggccattgacttcatagactccatcaagaatgctggaggaagggtgtttgtccactgccaggcaggcatttcccggtcagccaccatctgccttgcttaccttatgaggactaatcgagtcaagctggacgaggcctttgagtttgtgaagcagaggcgaagcatcatctctcccaacttcagcttcatgggccagctgctgcagtttgagtcccaggtgctggctccgcactgttcggcagaggctgggagccccgccatggctgtgctcgaccgaggcacctccaccaccaccgtgttcaacttccccgtctccatccctgtccactccacgaacagtgcgctgagctaccttcagagccccattacgacctctcccagctgctgaaaggccacgggaggtgaggctcttcacatcccattgggactccatgctccttgagaggagaaatgcaataactctgggaggggctcgagagggctggtccttatttatttaacttcacccgagttcctctgggtttctaagcagttatggtgatgacttagcgtcaagacatttgctgaactcagcacattcgggaccaatatatagtgggtacatcaagtccatctgacaaaatggggcagaagagaaaggactcagtgtgtgatccggtttctttttgctcgcccctgttttttgtagaatctcttcatgcttgacatacctaccagtattattcccgacgacacatatacatatgagaatataccttatttatttttgtgtaggtgtctgccttcacaaatgtcattgtctactcctagaagaaccaaatacctcaatttttgtttttgagtactgtactatcctgtaaatatatcttaagcaggtttgttttcagcactgatggaaaataccagtgttgggtttttttttagttgccaacagttgtatgtttgctgattatttatgacctgaaataatatattt

SEQ ID NO: 8874 - DNA, 1653 bp, Homo sapiens
  source 1..1653: mol_type = unassigned DNA
agtaagccagcgtggctacgccatcacgaccggcggtggcacatgcgcaatagcgagacgctggagcgcggcgtaggtggctgccgagtcttttcctgtttagggtcttatcctggcattgagggcgccggactggcgcttttggccgacttggcattgggtgggcggcttcttgggacccacatgagccagtggcatcatccccgcagtggctggggccggagacgcgacttttcaggacgctcctcagccaagaagaagggcggaaaccacatccccgaaaggtggaaagactatctcccagttggacagcggatgcctgggactcgtttcattgctttcaaagttcctttgcaaaagagttttgaaaagaaacttgctccagaagaatgcttttcccctttggatctttttaacaaaatccgagaacaaaatgaagaacttggactgattattgatttaacatatactcaacgctattataaaccagaggatttgccagaaactgttccttacttaaaaatttttacagttggacatcaagtgcctgatgatgagactatttttaaattcaaacacgctgttaatgggtttttgaaagaaaataaagataatgataaacttattggtgtccactgtacccatggtttaaacaggactggctacctcatttgcagatatttgattgatgtagaaggcgtgaggccagatgatgcaattgaattattcaataggtgccggggacattgcttagaaagacaaaactacattgaagaccttcagaatggtcctatcagaaagaattggaattccagtgtacccaggtcaagtgattttgaagactcagcacatctcatgcaaccagtccacaataagcctgttaaacaaggacctaggtataatctacatcagatccagggtcactcagctcctcgacatttccacacccagacccaaagtttgcaacaatcagtcagaaaattttcagagaatccacatgtttaccagagacaccatctccctcctcctggtccccctggagaggactattcacacaggaggtattcttggaatgtgaagcccaatgccagtcgggcagcccaggatagaagaaggtggtatccttataattactccagactctcctatccagcctgttgggaatggacccagtgatacaaacctgtcctggaattctacctggagaccagagctggcctgaaaattactggtgtgacttttaattagttcaggtctaatcaggtttctttattgttcccttatgtattcaagcttaaggaaaaattgcattgctgtttacctctttgctgataaatttgcagtaattacagcattgcaggaaaaacaatctgttattccagtcttaaatttttctaaaagaagacaatattttagaactgaagcattgagaacttcccttgcaaattatttttaaaattctatcttgtttttctatgtatttctttctgactagacttgtgatatgcgtgtgtttatgtacagaaatttttagtgtttttgttatgttctgttattgacccaaaggccatctttattttctataactgttcaaaatttatattaaaatctacttaggagataatttctttagaacctagttactacctgtaa

SEQ ID NO: 8875 - DNA, 802 bp, Homo sapiens
  source 1..802: mol_type = unassigned DNA
ggagcgcggcgtaggtggctgccgagtcttttcctgtttagggtcttatcctggcattgagggcgccggactggcgcttttggccgacttggcattgggtgggcggcttcttgggacccacatgagccagtggcatcatccccgcagtggctggggccggagacgcgacttttcaggacgctcctcagccaagaagaagggcggaaaccacatccccgaaaggtggaaagactatctcccagttggacagcggatgcctgggactcgtttcattgctttcaaagttcctttgcaaaagagttttgaaaagaaacttgctccagaagaatgcttttcccctttggatctttttaacaaaatccgagaacaaaatgaagaacttggactgattattgatttaacatatactcaacgctattataaaccagaggatttgccagaaactgttccttacttaaaaatttttacagttggacatcaagtgcctgatgatgagactatttttaaattcaaacacgctgttaatgggtttttgaaagaaaataaagataatgataaacttattggtgtccactgtacccatggtttaaacaggactggctacctcatttgcagacggagtcttgctctgtcacccaggctggagtgcagtggcaccatctcgactcactccaagttctgcttcccaggttcacgccgttctcctgcctcagcctcccaagtagctgggactacaggtgcccgccaccacgcccggctaattttttgtatttttagtagagatgtggtttcaccgtgttag

SEQ ID NO: 8876 - DNA, 2175 bp, Homo sapiens
  source 1..2175: mol_type = unassigned DNA
tggcacatgcgcaatagcgagacgctggagcgcggcgtaggtggctgccgagtcttttcctgtttagggtcttatcctggcattgagggcgccggactggcgcttttggccgacttggcattgggtgggcggcttcttgggacccacatgagccagtggcatcatccccgcagtggctggggccggagacgcgacttttcaggacgctcctcagccaagaagaagggcggaaaccacatccccgaaaggtggaaagactatctcccagttggacagcggatgcctgggactcgtttcattgctttcaaagttcctttgcaaaagagttttgaaaagaaacttgctccagaagaatgcttttcccctttggatctttttaacaaaatccgagaacaaaatgaagaacttggactgattattgatttaacatatactcaacgctattataaaccagaggatttgccagaaactgttccttacttaaaaatttttacagttggacatcaagtgcctgatgatgagactatttttaaattcaaacacgctgttaatgggtttttgaaagaaaataaagataatgataaacttattggtgtccactgtacccatggtttaaacaggactggctacctcatttgcagacggagtcttgctctgtcacccaggctggagtgcagtggcaccatctcgactcactccaagttctgcttcccaggttcacgccgttctcctgcctcagcctcccaagtagctgggactacaggtgcccgccaccacgcccggctaattttttgtatttttagtagagatgtggtttcaccgtgttagccaggatggtcttgatctcctgaccttgtgatccacccgcctcggcctcccaaagtgctggtattacaggagtgagccaccgcgcctggccagactccttattctttttaaggcctgcgttgttctttgcacaccgatgaacacaaaagtcagaagtttttgatattataaaacattgaagtagtgaacatttctatgtaaatatttttgaatgcatatctcatagccccggaggtaatttcactcaaaatagaatttcttaatcaaatagtatgtgtcgttatgctttttatggatgttgccacactgtactgagttatgtttgttcattcagaaaatatctcctgagcatctattatgtgtaagcagtgtgctgcgtgttagcaaagagactttagctgccctttgtgcgtcctaacagtctagggagggagtagatattaaagaatcacacaaatgcctatacaattacaattccaacaagtgctgagaaggggagtgacatggtacaatgagagcatagaatagggaggatttgacttcaacaagaggactagaggtttctgtggggaggtctgagcaaatatctgaagtataagtaggtgttaaccaggtagggatgttgtggagagaattctgaacgtaaggatcagcagagaccatattaacaggaaaatatatactgtgttggaggaactggctagggagactgggccatgggggtagtatggcgttaaaatggagctggaaatatgaataggagctgaaaccatgcagagctatgtttaaggttttagtcactaccttaagagcaatagaaaaccattgaattttttttgttggggatgagtgtggggaacacattcaaatttgtattttcaacctatcattttgctgctgagtggagaatacactgcagagggaaagaggtagaagcaaggagacaagttgggaggtgtttgtaggaactgaggcataatggtggattggaccagggcatggtggtcattttggtagaaagatacagatatactctatagagatatttaggtaatattgttgtcaggagttggtggtgaattgaatatgagagtttggaagaaatggctgacagtgatggtgactcccaagtttctggcccattctgttggttatacagtattttttagatataatgttaatatttttcccaatttgtcttttgttcattgttggtttctgataaatactctgtcatattaaggaagtctctatttttagtgtataaagcattttgataaaaaatgattctgcattttctttccttttgtttattaaattacattaatgtaaataaatatataaata

SEQ ID NO: 8877 - DNA, 1114 bp, Homo sapiens
  source 1..1114: mol_type = unassigned DNA
agaggcagaggggtgggcgggctggcccatggctgagacctctctcccagagctggggggagaggacaaagccacgccttgccccagcatcctggagctggaggagctcctgcgggcagggaagtcttcttgcagccgtgtggacgaagtttggcccaaccttttcataggagatgcaaacagcatcaagtgtgcggagacaggcggctgaaagccagcagcacgaactgcccgtcagagaagtgcacagcctgggccagatactcccacaggatggactcactgcagaagcaggacctccggaggcccaagatccatggggcagtccaggcatctccctaccagccgcccacattggcttcgctgcagcgcttgctgtgggtccgtcaggctgccacactgaaccatatcgatgaggtctggcccagcctcttcctgggagatgcgtacgcagcccgggacaagagcaagctgatccagctgggaatcacccacgttgtgaatgccgctgcaggcaagttccaggtggacacaggtgccaaattctaccgtggaatgtccctggagtactatggcatcgaggcggacgacaaccccttcttcgacctcagtgtctactttctgcctgttgctcgatacatccgagctgccctcagtgttccccaaggccgcgtgctggtacactgtgccatgggggtaagccgctctgccacacttgtcctggccttcctcatgatctgtgagaacatgacgctggtagaggccatccagacggtgcaggcccaccgcaatatctgccctaactcaggcttcctccggcagctccaggttctggacaaccgactggggcgggagacggggcggttctgatctggcaggcagccaggatccctgacccttggcccaaccccaccagcctggccctgggaacagcaggctctgctgtttctagtgaccctgagatgtaaacagcaagtgggggctgaggcagaggcagggatagctgggtggtgacctcttagcgggtggatttccctgacccaattcagagattctttatgcaaaagtgagttcagtccatctctataataaaatattcatcgtcataaagaca

SEQ ID NO: 8878 - DNA, 747 bp, Homo sapiens
  source 1..747: mol_type = unassigned DNA
atggctgagacctctctcccagagctggggggagaggacaaagccacgccttgccccagcatcctggagctggaggagctcctgcgggcagggaagtcttcttgcagccgtgtggacgaagtttggcccaaccttttcataggagatgcgatggactcactgcagaagcaggacctccggaggcccaagatccatggggcagtccaggcatctccctaccagccgcccacattggcttcgctgcagcgcttgctgtgggtccgtcaggctgccacactgaaccatatcgatgaggtctggcccagcctcttcctgggagatgcgtacgcagcccgggacaagagcaagctgatccagctgggaatcacccacgttgtgaatgccgctgcaggcaagttccaggtggacacaggtgccaaattctaccgtggaatgtccctggagtactatggcatcgaggcggacgacaaccccttcttcgacctcagtgtctactttctgcctgttgctcgatacatccgagctgccctcagtgttccccaaggccgcgtgctggtacactgtgccatgggggtaagccgctctgccacacttgtcctggccttcctcatgatctgtgagaacatgacgctggtagaggccatccagacggtgcaggcccaccgcaatatctgccctaactcaggcttcctccggcagctccaggttctggacaaccgactggggcgggagacggggcggttctga

SEQ ID NO: 8879 - DNA, 1735 bp, Homo sapiens
  source 1..1735: mol_type = unassigned DNA
agaggcagaggggtgggcgggctggcccatggctgagacctctctcccagagctggggggagaggacaaagccacgccttgccccagcatcctggagctggaggagctcctgcgggcagggaagtcttcttgcagccgtgtggacgaagtttggcccaaccttttcataggagatgcggccacggcaaacaaccgctttgagctgtggaagctgggcatcacccacgtgctgaacgccgcccacaagggcctctactgtcagggcggccctgacttctacggcagcagtgtgagctacctgggggtgccagcccacgacctccctgattttgacatcagtgcctacttctcctctgcggctgacttcatccaccgtgccctcaacacgcctggggccaaggtcctggtgcactgtgtggtgggcgtgagccgctctgccacgctggtcctggcctacctcatgctgcaccagcggctgtccctgcgccaggcggtgatcaccgtgaggcagcaccgatgggtcttccccaaccgaggcttcctgcaccagctctgcaggctggaccagcaactgcggggtgccggccagagctgaggggccagagctggtccttactccctgccatggggctctgccactttgccaccctggcactgatcctgctggtgctgctggaggctctggcccaggcggacacacagaagatggtggaagcccagcgtggggtcggccctagagcctgctactccatctggctcctcctggcgcctacaccccctctcagccactgtcttcagtctccacagaaacagcatcaagtgtgcggagacaggcggctgaaagccagcagcacgaactgcccgtcagagaagtgcacagcctgggccagatactcccacaggatggactcactgcagaagcaggacctccggaggcccaagatccatggggcagtccaggcatctccctaccagccgcccacattggcttcgctgcagcgcttgctgtgggtccgtcaggctgccacactgaaccatatcgatgaggtctggcccagcctcttcctgggagatgcgtacgcagcccgggacaagagcaagctgatccagctgggaatcacccacgttgtgaatgccgctgcaggcaagttccaggtggacacaggtgccaaattctaccgtggaatgtccctggagtactatggcatcgaggcggacgacaaccccttcttcgacctcagtgtctactttctgcctgttgctcgatacatccgagctgccctcagtgttccccaaggccgcgtgctggtacactgtgccatgggggtaagccgctctgccacacttgtcctggccttcctcatgatctgtgagaacatgacgctggtagaggccatccagacggtgcaggcccaccgcaatatctgccctaactcaggcttcctccggcagctccaggttctggacaaccgactggggcgggagacggggcggttctgatctggcaggcagccaggatccctgacccttggcccaaccccaccagcctggccctgggaacagcaggctctgctgtttctagtgaccctgagatgtaaacagcaagtgggggctgaggcagaggcagggatagctgggtggtgacctcttagcgggtggatttccctgacccaattcagagattctttatgcaaaagtgagttcagtccatctctataataaaatattcatcgtc

SEQ ID NO: 8880 - DNA, 1126 bp, Homo sapiens
  source 1..1126: mol_type = unassigned DNA
acagaggcagaggggtgggcgggctggcccatggctgagacctctctcccagagctggggggagaggacaaagccacgccttgccccagcatcctggagctggaggagctcctgcgggcagggaagtcttcttgcagccgtgtggacgaagtttggcccaaccttttcataggagatgcagctggtccttactccctgccatggggctctgccactttgccaccctggcactgatcctgctggtgctgctggaggctctggcccaggcggacacacagaagatggtggaagcccagcgtggggtcggccctagagcctgctactccatctggctcctcctggcgcctacaccccctctcagccactgtcttcagtctccacagaaacagcatcaagtgtgcggagacaggcggctgaaagccagcagcacgaactgcccgtcagagaagtgcacagcctgggccagatactcccacaggatggactcactgcagaagcaggacctccggaggcccaagatccatggggcagtccaggcatctccctaccagccgcccacattggcttcgctgcagcgcttgctgtgggtccgtcaggctgccacactgaaccatatcgatgaggtctggcccagcctcttcctgggagatgcgtacgcagcccgggacaagagcaagctgatccagctgggaatcacccacgttgtgaatgccgctgcaggcaagttccaggtggacacaggtgccaaattctaccgtggaatgtccctggagtactatggcatcgaggcggacgacaaccccttcttcgacctcagtgtctactttctgcctgttgctcgatacatccgagctgccctcagtgttccccaaggccgcgtgctggtacactgtgccatgggggtaagccgctctgccacacttgtcctggccttcctcatgatctgtgagaacatgacgctggtagaggccatccagacggtgcaggcccaccgcaatatctgccctaactcaggcttcctccggcagctccaggttctggacaaccgactggggcgggagacggggcggttctgatctggcaggcagccaggatccctgacccttggcccaaccccaccagcctg

SEQ ID NO: 8881 - DNA, 908 bp, Homo sapiens
  source 1..908: mol_type = unassigned DNA
tgttccgctcaggcagagtcctgcccctgcacccactcccccattcccggccccaggccatgccccaggatggactcactgcagaagcaggacctccggaggcccaagatccatggggcagtccaggcatctccctaccagccgcccacattggcttcgctgcagcgcttgctgtgggtccgtcaggctgccacactgaaccatatcgatgaggtctggcccagcctcttcctgggagatgcgtacgcagcccgggacaagagcaagctgatccagctgggaatcacccacgttgtgaatgccgctgcaggcaagttccaggtggacacaggtgccaaattctaccgtggaatgtccctggagtactatggcatcgaggcggacgacaaccccttcttcgacctcagtgtctactttctgcctgttgctcgatacatccgagctgccctcagtgttccccaaggccgcgtgctggtacactgtgccatgggggtaagccgctctgccacacttgtcctggccttcctcatgatctgtgagaacatgacgctggtagaggccatccagacggtgcaggcccaccgcaatatctgccctaactcaggcttcctccggcagctccaggttctggacaaccgactggggcgggagacggggcggttctgatctggcaggcagccaggatccctgacccttggcccaaccccaccagcctggccctgggaacagcaggctctgctgtttctagtgaccctgagatgtaaacagcaagtgggggctgaggcagaggcagggatagctgggtggtgacctcttagcgggtggatttccctgacccaattcagagattctttatgcaaaagtgagttcagtccatctctataataaaatattcatcgtcataaaga

SEQ ID NO: 8882 - DNA, 1768 bp, Homo sapiens
  source 1..1768: mol_type = unassigned DNA
actggagaggcagagaggagtgaccacagaggcagaggggtgggcgggctggcccatggctgagacctctctcccagagctggggggagaggacaaagccacgccttgccccagcatcctggagctggaggagctcctgcgggcagggaagtcttcttgcagccgtgtggacgaagtttggcccaaccttttcataggagatgcggccacggcaaacaaccgctttgagctgtggaagctgggcatcacccacgtgctgaacgccgcccacaagggcctctactgtcagggcggccctgacttctacggcagcagtgtgagctacctgggggtgccagcccacgacctccctgattttgacatcagtgcctacttctcctctgcggctgacttcatccaccgtgccctcaacacgcctggggccaaggtcctggtgcactgtgtggtgggcgtgagccgctctgccacgctggtcctggcctacctcatgctgcaccagcggctgtccctgcgccaggcggtgatcaccgtgaggcagcaccgatgggtcttccccaaccgaggcttcctgcaccagctctgcaggctggaccagcaactgcggggtgccggccagagctgaggggccagagctggtccttactccctgccatggggctctgccactttgccaccctggcactgatcctgctggtgctgctggaggctctggcccaggcggacacacagaagatggtggaagcccagcgtggggtcggccctagagcctgctactccatctggctcctcctggcgcctacaccccctctcagccactgtcttcagtctccacagaaacagcatcaagtgtgcggagacaggcggctgaaagccagcagcacgaactgcccgtcagagaagtgcacagcctgggccagatactcccacaggatggactcactgcagaagcaggacctccggaggcccaagatccatggggcagtccaggcatctccctaccagccgcccacattggcttcgctgcagcgcttgctgtgggtccgtcaggctgccacactgaaccatatcgatgaggtctggcccagcctcttcctgggagatgcgtacgcagcccgggacaagagcaagctgatccagctgggaatcacccacgttgtgaatgccgctgcaggcaagttccaggtggacacaggtgccaaattctaccgtggaatgtccctggagtactatggcatcgaggcggacgacaaccccttcttcgacctcagtgtctactttctgcctgttgctcgatacatccgagctgccctcagtgttccccaaggccgcgtgctggtacactgtgccatgggggtaagccgctctgccacacttgtcctggccttcctcatgatctgtgagaacatgacgctggtagaggccatccagacggtgcaggcccaccgcaatatctgccctaactcaggcttcctccggcagctccaggttctggacaaccgactggggcgggagacggggcggttctgatctggcaggcagccaggatccctgacccttggcccaaccccaccagcctggccctgggaacagcaggctctgctgtttctagtgaccctgagatgtaaacagcaagtgggggctgaggcagaggcagggatagctgggtggtgacctcttagcgggtggatttccctgacccaattcagagattctttatgcaaaagtgagttcagtccatctctataataaaatattcatcgtcataaag

SEQ ID NO: 8883 - DNA, 1559 bp, Homo sapiens
  source 1..1559: mol_type = unassigned DNA
ctcatcttctgacgcttgggggaggagaggtagttgcttggtatttttggctttccaccataaaactggagacagtttccttcattccaagtcgttttaatgtcactgttgaacgtgtgtgtcctgagttctcatctgaaagctttcatatcggttgactgcagatttgatttgtatccactgtcaccagcactgctcacttaggactttctggatccggacccaggcagcgcacactggactcttgaggaagaaggagactctaattttggattccttggtggaggaaaataaaacactctggtcttgccgccaacgatgcaagtgtgactgctggcgtcttcatgagctccagaggtcacagcacgctaccaaggactctcatggcccctcggatgatttccgagggagacataggaggcattgctcaaatcacctcctctctattcctgggcagaggcagtgtggcctccaatcggcacctcctccaggctcgtggcatcacctgcattgttaatgctaccattgagatccctaatttcaactggccccaatttgagtatgttaaagtgcctctggctgacatgccgcatgcccccattggactgtactttgacaccgtggctgacaagatccacagtgtgagcaggaagcacggggccaccttggtgcactgtgctgcaggggtgagccgctcagccacgctgtgtatcgcgtacctgatgaaattccacaacgtgtgcctgctggaggcgtacaactgggtgaaagcccggcgacctgtcatcaggcccaacgtaggcttctggaggcaactgatagactacgagcgccagctctttgggaagtcgacagttaaaatggtacagacaccttatggcatagttcccgacgtctatgagaaggagtcccgacacctgatgccttactgggggatttagtgccactgaagcctgcgtcagcagcccgagcggggccggcatctgctccccgccgtctgctccctctccactctcttctcaaatggctgacttctggttctccctcaagtgttttttacactgggtgttcaaatttattttaagagatagggagggaggggacataaagggaatgcatacattgctagtcacatttttaaaattaacattttggaatagtgtttatggaaatctttagcttttaatcatttttaccaatttgaacagtttaataaactggttctgctctcttctgaatctcatgcctttggcaccttggtaggtgcaggaggagctcagtgcaaaaatcactttggggcctcattaaccctttagagacaagctttgccccaggctgcggaccagacagatgcttagggaaggttgataaccagcttcagtctctactggattagccctactctttcctttcccctccattatttagtgactctgtaagtaagttaaatacacccttattatttagctgttaagtaactataatgaaatctgctgcaaaatctctcttggaatccatgtgcccaggattatattagcattatttttaataaatctata

SEQ ID NO: 8884 - DNA, 1537 bp, Homo sapiens
  source 1..1537: mol_type = unassigned DNA
cgcggcccgccccgggcgcgggcggagggaggaggaggcggcgcgcgcggcgcccagcccgcagaagccggtggccgcgcaggaggacggagccctaaccgcaacccgcgccgcgccgcgccgcgccgatttgatttgtatccactgtcaccagcactgctcacttaggactttctggatccggacccaggcagcgcacactggactcttgaggaagaaggagactctaattttggattccttggtggaggaaaataaaacactctggtcttgccgccaacgatgcaagtgtgactgctggcgtcttcatgagctccagaggtcacagcacgctaccaaggactctcatggcccctcggatgatttccgagggagacataggaggcattgctcaaatcacctcctctctattcctgggcagaggcagtgtggcctccaatcggcacctcctccaggctcgtggcatcacctgcattgttaatgctaccattgagatccctaatttcaactggccccaatttgagtatgttaaagtgcctctggctgacatgccgcatgcccccattggactgtactttgacaccgtggctgacaagatccacagtgtgagcaggaagcacggggccaccttggtgcactgtgctgcaggggtgagccgctcagccacgctgtgtatcgcgtacctgatgaaattccacaacgtgtgcctgctggaggcgtacaactgggtgaaagcccggcgacctgtcatcaggcccaacgtaggcttctggaggcaactgatagactacgagcgccagctctttgggaagtcgacagttaaaatggtacagacaccttatggcatagttcccgacgtctatgagaaggagtcccgacacctgatgccttactgggggatttagtgccactgaagcctgcgtcagcagcccgagcggggccggcatctgctccccgccgtctgctccctctccactctcttctcaaatggctgacttctggttctccctcaagtgttttttacactgggtgttcaaatttattttaagagatagggagggaggggacataaagggaatgcatacattgctagtcacatttttaaaattaacattttggaatagtgtttatggaaatctttagcttttaatcatttttaccaatttgaacagtttaataaactggttctgctctcttctgaatctcatgcctttggcaccttggtaggtgcaggaggagctcagtgcaaaaatcactttggggcctcattaaccctttagagacaagctttgccccaggctgcggaccagacagatgcttagggaaggttgataaccagcttcagtctctactggattagccctactctttcctttcccctccattatttagtgactctgtaagtaagttaaatacacccttattatttagctgttaagtaactataatgaaatctgctgcaaaatctctcttggaatccatgtgcccaggattatattagcattatttttaataaatctatatgcttaacatatta

SEQ ID NO: 8885 - DNA, 1688 bp, Homo sapiens
  source 1..1688: mol_type = unassigned DNA
ggagtcgaccgctcgggcagcgccaccgccacgagagcccgggacgcgggaaagaccgaaaggaagaggaagaggcaccggtggccatggggctggaggcggcgcgcgagctggagtgcgcggcgctgggcacgctgctgcgggatccgcgggaggcggaacgcacgctgctgctggactgccgccccttcctggccttctgccggcgccacgtgcgcgccgcgcggccagtgccttggaacgcgctgctgcggcgccgcgcgcgcggccctcctgccgccgttctcgcctgcctgctgcccgaccgcgcgctgcggacgcgcctggtccgcggggagctggcgcgggccgtggtgctggacgagggcagtgcctcggtggcggagctccggcccgacagcccggctcatgtgctgctggccgcgctgctgcacgagacccgcgcggggcccactgccgtgtacttcctgcgaggaggcttcgacggcttccagggctgctgtcccgatctgtgctctgaggcccccgcccctgcgctgccgccaacaggggacaaaaccagccgctccgactccagggctcctgtctacgaccagggtggccctgtggagatcttgccctacctgttcctgggcagctgcagtcactcgtcagacctgcaggggctgcaggcctgtggcatcacagccgtcctcaacgtgtccgccagctgccccaaccactttgagggccttttccgctacaagagtatccctgtggaggacaaccagatggtggagatcagtgcctggttccaggaggccataggcttcattgactgggtgaagaacagcggaggccgggtgctggtgcactgccaggcgggtatctcgcgctctgccaccatctgtctggcatacctcatgcagagtcgccgtgtgcggctggacgaggcctttgacttcgttaagcagcgccggggggtcatctcccccaacttcagtttcatggggcagctgctgcagtttgagacccaggtgctgtgtcactgaggtggtgcccctctgcctgcctgccccactgtgctggcaggagctgactgtggactggtgggctcccctctgggccagcacagtcccctcacctctggcagggctgctacctcctcagagtttcagaagcccccacatgggggctctaggaatgccggcatgctggtctttccgacctggtgctcttctgctgggggactgaggctggccctcattcggggtcgggaaccaagggtgtgtctgctctttccctccccatcctctggcagaaatcagctagacgctataccgtggactctccctggtccaccaccatgttgaagcccttggcagcctgagagctccaaggaacaagctgtgacaaccaggagccctgtctgtgggttcgtctgcccagggcctggagcccaagccctgtgttcctggggaagctggggacttgggaagtgatgggtgtgtcatgttgcgtgtgtctgtctgtgagcctttcacacctgtgctggcgctggaaaattatttgtgctcagctgacatttaacactccctcccccgcttcctcctagccctgtgggcaggggttggaaacttagcactttatatttatacagaacattcaggatatgtcaataaaatattgttatatttaaaaaacaacaa

SEQ ID NO: 8886 - DNA, 4121 bp, Homo sapiens
  source 1..4121: mol_type = unassigned DNA
gcgagcccccgcccagctgatccgccgctctccgcctcgcttgctcctgccgggcgtgcagggccccgccgccgccatgtcgggctcgttcgagctctcggtgcaggatctcaacgacctgctctcggacggcagcggctgctacagcctcccgagccagccctgcaacgaggtcaccccgcggatctacgtgggcaacgcgtctgtggctcaggacatccccaagctgcagaaactaggcatcacccatgtgctgaacgcggctgagggcaggtccttcatgcacgtcaacaccaatgccaacttctacaaggactccggcatcacatacctgggcatcaaggccaacgacacacaggagttcaacctcagcgcttactttgaaagggctgccgacttcattgaccaggctttggctcaaaagaatggccgggtgctcgtccactgccgggaaggttatagccgctccccaacgctagttatcgcctacctcatgatgcggcagaagatggacgtcaagtctgccctgagcatcgtgaggcagaaccgtgagatcggccccaacgatggcttcctggcccagctctgccagctcaatgacagactagccaaggaggggaagttgaaaccctagggcacccccaccacctctgctcgagaggtccgtgggggaggccgtgggcaaaggtgtcccgagctgccatgtttaggaaacacactgtaccctgctcccagcatcacaaggcacttgtctacaagtgtgtcccaacacagtcctgggccactttccccaccctggggagcacataaagaagcttgccaaggggggcgtccttgctccccagttgtcctgtttctgtaacttatgatgtcttttccctgagatgggggctcagagggggaaggcctgtggcctgcatgcttcccgatggcccacggcaggaggtgtgtggaagtgtaaggcctaagatgctcacagaggtccctcatgacctcccttccccaactcccgaatcctctcttgagtgtggacctcaacaccttgagccctagtaaaggaactatgcaaatgcaggccactctccccaccacgtctgtgccctgcactgtccccacagccttccacaccctgtgcataggcagccctctcacgtcttgaggtccgaagctggggtgggggtgtccgtcagttattagtggatggagattcccacagcaaggctgcatttgaatgatttccttaggatgaatggtccctacacaaagaggccttgtgggcaaacctggagaaccctcctaaatccatagagttttcaaaatgtgaatctttggaagccttgagttcagaatctgctgctctggaatatttcccttcgatcttatctcagtcacttcgtttttgagaagagtgatgccttgggcatgcttttttttttttcttttttagaaaacagggagttgaagtccaacctatttaaaaaccccaccatttggagaattacaagggttttgtcctgaattgtagtgttggcaagcccaagccactcgtgctaactgctttttgtctcggttgctattccaagaacagaaggaggaagttggccaattacagcgtgtgtgcatggatgtgtgtggggggcgtgcctctcagaaacgcggccagaagacaagcagggaagtgaaaggtcccaggcacacaccctgcccattgcaggtggctcttacagctctctggtgccagcacgggatccctgaagtgactcagccaggcagacatgagacatggcggagtgtccaaatggatcctttattggtggtagagcaaaaaaacccaaacacgataaacctttcaaaagactttctaaggatgatattggaatgcaccagccctcacatgtgtatgcacatttgccagaatataagagttttgttttaaatacagtcttgttaggattttacgttattgttattatggaaagtgattgtgatgctatttatcttcagggtcactctgggcaaagagaaggtcctcagccatgcccccagcaccttgcacataggtgtctgataaaagtttaagaaagtaaacactttttgagcaccaaatatatatagggcattgttctggtgggtgtgtcacgctcccagaagactgaattcatggtaggatcactcgcaaggccttgtgaaggagtcttacctaaaacgaaagaaatatcagggacttttgttgactatttacaactcagttttacatttaaattcaggcagtgttaatatgccaaggtagggaatgtgcctttttcagagttggccaggagctcctggctgggacacggagaggcaggtgtggcgtaaggcctcactcccggctgggaaggtctctgatcacacagaagcagccctgcccagcctggtcatttgctgtccgcttttctctgtgaccacagcagccctgaacaaccagtatgtgtcttcttctccagatagtgaaaaaggtgtccagataaacccacctaagtgaaatggccatcctctaaactgggtacctcactgcacagcttctaggtagccttccaacttaatctaacttgagcctcacagtaaccctgtaaagttagtagagcttgttcttgtattgtgaccttttttaaaaaaaaggaactgaggttcagaatgattaagggcctggcccccagggttgtccagctccataaggtggagctgggcaagattttgggtttgctgctccctgaagctggattctttcatacgatactctttctcaagaagggggctccctgggatctccaggtgtactgcacttaccctcaatccagccccggagaagcaagtgaaaagggtgggtccctcataggctagaatgtgcagctctttctccaggtgggatgtagcaccccgaagtagagctttctgctctgctcctggaaaaggctagggagctggggctggggctcccctcccatgaccaggcagtggtcaccccatgggacaggcacagctacttacgcgaacacagcaggttggtgtggctggctaactaggacctctcgaaagtctctgtgggggcatgagggagaaaaggccattgggagaattactgcctttactttgggactacttttatgctgataacttgggatttcttgatagtccttcacccctgaaaccccgtatttacttaacaagatttagctcttagttcttcaagtaaaattaaagtctcttgtgtaagagccaacacatgcccagctgcggatgggagctgttcctggacagccttctactgcctgggaagtgatggaacaggaactcagggtgcccttaccccctccccagacctgttccctttctttgactgacagagcaccatccaggcaaaattagagcgccaaatggttttcttctcaatcttaaagcagtatacctttccacaggctcgtctgtgtccctgccactctgagttatccagaaaccaccacctacaaatgaggggactcatctagaagacctctaaggtccccttttggctctgaggggtctctaataatccccacttggaattcagcaccgcaaggaaattatgggtatgtgagccataatatgatgggcagcaggtggcgctgccttccacccatggtgatggatggtttggaaagggaatgttggtgccttttgtgccacaagttaagatgctactgttttaaaggaaaaaaaaaaaaaaaagtactgatcttcaatatgaagacatgagcttttctcgcaggaaattttctttttcacagaactggtgtcaggaatcactgaagggctaaccgtgatagtccttgcaagtaagtcaaggttttatcctgattggaaatagaagacatttccggttgagagaacagattcgttggaagcttaacttttgttgcctcttaacgccaccaaattttagggtaatttgattatgaaagagtgaatttttctggacagaaaagggagagctaccaaattgtttttttctttttaaaaggaagtttaatgtccgttgtatcacaaatcagtgttaaaacaccagaactttagccaaaataaatgtcttacattacaaaggt

SEQ ID NO: 8887 - DNA, 2073 bp, Homo sapiens
  source 1..2073: mol_type = unassigned DNA
ccccgccgccgccatgtcgggctcgttcgagctctcggtgcaggatctcaacgacctgctctcggacggcagcggctgctacagcctcccgagccagccctgcaacgaggtcaccccgcggatctacgtgggcaacgctaagaatgtctaatcagcaggaaagaaccagtgttaacattctgagatgtgaaataggagcctcaagaaagaatatattagcatgcctgtacagccttggaaagcctcaagttggattttcacgatactctgaggacccagttaccaaaatcctaagcttcatggctcagcccaaggatggcatgttgaaaactcaaaactaaccctcctcccattttacagaggaggaaatggtggctcagagtgtgtgagggactacaaggacagggtcaatgtcttgttcatgtctgtggctcaggacatccccaagctgcagaaactaggcatcacccatgtgctgaacgcggctgagggcaggtccttcatgcacgtcaacaccaatgccaacttctacaaggactccggcatcacatacctgggcatcaaggccaacgacacacaggagttcaacctcagcgcttactttgaaagggctgccgacttcattgaccaggctttggctcaaaagaatggccgggtgctcgtccactgccgggaaggttatagccgctccccaacgctagttatcgcctacctcatgatgcggcagaagatggacgtcaagtctgccctgagcatcgtgaggcagaaccgtgagatcggccccaacgatggcttcctggcccagctctgccagctcaatgacagactagccaaggaggggaagttgaaaccctagggcacccccaccacctctgctcgagaggtccgtgggggaggccgtgggcaaaggtgtcccgagctgccatgtttaggaaacacactgtaccctgctcccagcatcacaaggcacttgtctacaagtgtgtcccaacacagtcctgggccactttccccaccctggggagcacataaagaagcttgccaaggggggcgtccttgctccccagttgtcctgtttctgtaacttatgatgtcttttccctgagatgggggctcagagggggaaggcctgtggcctgcatgcttcccgatggcccacggcaggaggtgtgtggaagtgtaaggcctaagatgctcacagaggtccctcatgacctcccttccccaactcccgaatcctctcttgagtgtggacctcaacaccttgagccctagtaaaggaactatgcaaatgcaggccactctccccaccacgtctgtgccctgcactgtccccacagccttccacaccctgtgcataggcagccctctcacgtcttgaggtccgaagctggggtgggggtgtccgtcagttattagtggatggagattcccacagcaaggctgcatttgaatgatttccttaggatgaatggtccctacacaaagaggccttgtgggcaaacctggagaaccctcctaaatccatagagttttcaaaatgtgaatctttggaagccttgagttcagaatctgctgctctggaatatttcccttcgatcttatctcagtcacttcgtttttgagaagagtgatgccttgggcatgcttttttttttttcttttttagaaaacagggagttgaagtccaacctatttaaaaaccccaccatttggagaattacaagggttttgtcctgaattgtagtgttggcaagcccaagccactcgtgctaactgctttttgtctcggttgctattccaagaacagaaggaggaagttggccaattacagcgtgtgtgcatggatgtgtgtggggggcgtgcctctcagaaacgcggccagaagacaagcagggaagtgaaaggtcccaggcacacaccctgcccattgcaggtggctcttacagctctctggtgccagcacgggatccctgaagtgactcagccaggcagacatgagacatggcggagtgtccaaatggatcctttattggtggtagagcaaaaaaacccaaacacgataaacctttc

SEQ ID NO: 8888 - DNA, 5537 bp, Homo sapiens
  source 1..5537: mol_type = unassigned DNA
gctgagcgccggaggagcgtaggcagggcagcgctggcgccagtggcgacaggagccgcgcgaccggcaaaaatacacgggaggccgtcgccgaaaagagtccgcggtcctctctcgtaaacacactctcctccaccggcgcctccccctccgctctgcgcgccgcccggctgggcgcccgaggccgctccgactgctatgtgaccgcgaggctgcgggaggaaggggacagggaagaagaggctctcccgcgggagcccttgaggaccaagtttgcggccacttctgcaggcgtcccttcttagctctcgcccgcccctttctgcagcctaggcggcccgggttctcttctcttcctcgcgcgcccagccgcctcggttcccggcgaccatggtgacgatggaggagctgcgggagatggactgcagtgtgctcaaaaggctgatgaaccgggacgagaatggcggcggcgcgggcggcagcggcagccacggcaccctggggctgccgagcggcggcaagtgcctgctgctggactgcagaccgttcctggcgcacagcgcgggctacatcctaggttcggtcaacgtgcgctgtaacaccatcgtgcggcggcgggctaagggctccgtgagcctggagcagatcctgcccgccgaggaggaggtacgcgcccgcttgcgctccggcctctactcggcggtcatcgtctacgacgagcgcagcccgcgcgccgagagcctccgcgaggacagcaccgtgtcgctggtggtgcaggcgctgcgccgcaacgccgagcgcaccgacatctgcctgctcaaaggcggctatgagaggttttcctccgagtacccagaattctgttctaaaaccaaggccctggcagccatcccacccccggttccccccagtgccacagagcccttggacctgggctgcagctcctgtgggaccccactacacgaccaggggggtcctgtggagatccttcccttcctctacctcggcagtgcctaccatgctgcccggagagacatgctggacgccctgggcatcacggctctgttgaatgtctcctcggactgcccaaaccactttgaaggacactatcagtacaagtgcatcccagtggaagataaccacaaggccgacatcagctcctggttcatggaagccatagagtacatcgatgccgtgaaggactgccgtgggcgcgtgctggtgcactgccaggcgggcatctcgcggtcggccaccatctgcctggcctacctgatgatgaagaaacgggtgaggctggaggaggccttcgagttcgttaagcagcgccgcagcatcatctcgcccaacttcagcttcatggggcagctgctgcagttcgagtcccaggtgctggccacgtcctgtgctgcggaggctgctagcccctcgggacccctgcgggagcggggcaagacccccgccacccccacctcgcagttcgtcttcagctttccggtctccgtgggcgtgcactcggcccccagcagcctgccctacctgcacagccccatcaccacctctcccagctgttagagccgccctgggggccccagaaccagagctggctcccagcaagggtaggacgggccgcatgcgggcagaaagttgggactgagcagctgggagcaggcgaccgagctccttccccatcatttctccttggccaacgacgaggccagccagaatggcaataaggactccgaatacataataaaagcaaacagaacactccaacttagagcaataacggctgccgcagcagccagggaagaccttggtttggtttatgtgtcagtttcacttttccgatagaaatttcttacctcatttttttaagcagtaaggcttgaagtgatgaaacccacagatcctagcaaatgtgcccaaccagctttactaaagggggaggaagggagggcaaagggatgagaagacaagtttcccagaagtgcctggttctgtgtacttgtccctttgttgtcgttgttgtagttaaaggaatttcattttttaaaagaaatcttcgaaggtgtggttttcatttctcagtcaccaacagatgaataattatgcttaataataaagtatttattaagactttcttcagagtatgaaagtacaaaaagtctagttacagtggatttagaatatatttatgttgatgtcaaacagctgagcaccgtagcatgcagatgtcaaggcagttaggaagtaaatggtgtcttgtagatatgtgcaaggtagcatgatgagcaacttgagtttgttgccactgagaagcaggcgggttgggtgggaggaggaagaaagggaagaattaggtttgaattgctttttaaaaaaaaaagaaaagaaaaagacagcatctcactatgttgccaaggctcatcttgagaagcaggcgggttgggtgggaggaggaagaaagggaagaattaggtttgaattgcttttttaaaaaaaaagaaaagaaaaaaaaagacagcatctcactatgttgccaaggctcatctcaagctcttgggctcaagagatcctcccacctcggcctcctgagtagctgggactgcaggtgtgtgtcatcatgaccaatgtgaattgcttttgaagctggttcatgggcatgtaggccaccgaagcaattttagaccacagtaagtcaagcttttttccctccgatgatcactgggtggttgcagcattttttgcataaacctgcctaagacttgtctatcgtctgtgatcaatatgccatattacactaaggtgctcctggaaaattgggtgcagttcaaattttcctacagcaaatcatttggcaaggccagccattggggaaaccagacaactagagataaccctgaaatgaatccttttgtaaattgaagcaccatcttttctttttttgcataaattggaggttttaattttagggcagttacctgaagtgaaatataccaacaatttcttgtgttctttaaattcctagttaggtgaatatttttgaaggtcctcttttgaataaagaggggaatggacaccacatttcaggtcttctcgaagtgtggaagggcaagagagcatcagtgagctgatggtggattgcttacatcggattccattggtatgaatttcccaaactggaaatcaaagcgccagggtggggttggggctgactgctggtgagggggctggccgctggctcccgtgacgtgcgtcatgggcacgcaggcgccattttgaatctatcgtcggcacgtgggtgccattttgaatccttagttgggcctttctaaatggagaatggctttggagggagacacgttttctgtggggagggtttgggggggagggaggagggaacaagctacatgctattttgtttgtagtattgtggaacagtcttgttatggagtgccagcttagaggttgttgcaaacttgtctagaagtgagagcatggttttttttagccctttgagagtctacatctaatgaacattcttgctcacccataaataacgtcaagcctcaatgtcaccgtcacgttgggatactctttctcatctggcatcctagacaggacaaggttggttacctttccttccatgaaccatgaacctgtgacggcatcattcatcctgacttcaccaagctccgcctgtgggtgaggccagagctcccactggcaatttttagaagagccagaggctccctgcttcctctagaaataacagttcagggtgaagcatggagggtttcagttcccagacaatggaaccatttagagacaacacagttggacatttccactttttccttgattcctggaagtccagtgggttctgcagctgaaaaagccctgggtcccagcagcagagagacaggacagaggggatgcttgggcggggagggacggtaacctgcagaacagattccatttttatagaacgagtacacgtttgctaaaacagtcctgctttcccagactggattcccaccacagggacagtcggaactcaggactagctccagcgacatctttcctccgaattcaagccttctatcacaatgtcaaaacagctatttataaagccattttcattgtacttgataacagcacgagtcccaaaacttttagaaataaaataggacattggcttgattgaaaagagggactttttaaaaattgttctttcgtcagaagccttttggatgacttacaatagctctgatgaagataccaccccagcgtcagtccaataggtcagtgagtttcaacaggcatccatccctcccatgaagggattctggtgatgggaagtttctgtaatgacaggaaagcattgaccctcattgattgtcaactttggtattagccatgaaagacaggatgctcattgggtgttctgtagagtgaggaatgctgcctattccctcccagaacgtctgacccaggggtgtgtgttgaggagccctgggggaaatggaccaagttttcccacagagcagtattaggctgaagagcaggtgactggtaggccccagctcccatcattccctcccaaagccattttgttcagttgctcatccacgctggattccagagagttttccaatttgggaagccatgagaaaggtttttaaatcttgggaagatggagagagggacataggatagttgactccaacatgacaggaagaggctggagattgggaattggccatcaaccaagcctgtagtagtaaagccatggtcccgcattggaattacttggggaacttatacagttctgatacccaggctctcctagaccagttcaaccaattctaggtgggggactcaggcatcagtgtgtttcgtagctccccgggtgttttccctgtgcagccgagcttgggaaactgccatgctttttggatgtcaaggcgctgttggaggctgggtgtgacagcacagagccaggttgtcttgtggaaaccacagccacgggtttgccactggctcagcatggcctcactgccagtcccagcctggctgagggacaagatggtttctcttgggagttcctgagtggagcacccttccaggctttttgaaagccagctgatctgtggagccttgttaagggactcaatacggtgtttggatattgatgtttttccttgagactgtcttgtccatcaataaagatggaggatgtctcctctttgaaccccgcttccccaccagtactctctctcccttagagtttatgagttattcaaggaggagacttcttaaagacagcaacgcaattcttgtaacttgtgtaaatagccccatctttcagagtgataccatttctacatttgataatgcctgtattcctgtaggatgtatatagtttaggggattttttttttgtttggttttgttttttagaagtcaatatgtctggttttatttattgcttgaaaaagatcatttgaaaaaaataaatacattttcaacca

SEQ ID NO: 8889 - DNA, 2959 bp, Homo sapiens
  source 1..2959: mol_type = unassigned DNA
gcagttcagacccccccacacccatcaaagagccgctcctcccccccgcaggcgccttcgccgcctccctcccttcctttcctttccgctcctcttccgacctgtccacccgggaggaagggagctggaaagggggcggaaacctctcccctccaaaaagcacaacaaaactgttcagtgcggaggagccgggttcgcccctgccggacagcggggggctttgttccccgcagttgtttcctgcccatttgacctgtcagctgctggggaaacgctgctgttgacctttggttgaactgctaaggcgattttgctgatttttctttctttttccgcgagggctgtcttttgctcctccaaatgagcccagtccccctcccttctccccaaagcgctccaagagaaagtgccaggaaggggcttgtcccggaaggcctggcggctgagcggggccaggtcctggttaggccaccagggtgggcgtccgcgccattgtttgagcttgtcggcgctggtgggagagatgagggcaattcctctgggacgcaagtcccctcgaatggccggggctggccgggatgttccccgcacggcgctgccctcgagtccccccgatggagagcgcgggcgcgccttccttcgctggcgtccaaacccgggaccagctagaacacagcagggctgggactgggttccagccccacgtggagtctggatttgttttgttgtgttttgctttccttcctggaagaaatcccgaggggaccgccctagagcggcagctccaggacctcggcccttgggcttccgggggtgcagccacttaggccccgctcccggggagagagggattattttttaagatttatccccagggcgcgcggcatttccctgtccctcgtgaatcccgttgagagtcctccctccccaacctcctccatttccccagccagaccgattcgagagccctggagattctgggcgaggctagtgactgggtagtacaggcctctagccccaccattgctctctctgtcttcagttccccaggagggcaatggcatcaaacagcacagctctgggggatgtcaatattgcataccttttctacctaaagggaaaatgactcgcttttctgcttgcaaatatggtagtttctgcttacaaatgtaatacaatgcccatgacagccaaggactggaagcataagttgctaggtcttacaggtgattttttacaatgaagcaaactcactatgttagacaccatttacattggatgtctccaactaacaaaagtaactaaagacagatgtaggtgtaaattgagagtgaaatttgaccctttagaccgtcacaacttccttgggcttatcctgggtgcttataggagaggtgggctccacccacaaaaatggactgctcagaaaaatgagggagagagaaagggtggccactttcccgagccaagaaattccttgaaaaaaaatcagaacatctgaaaccagagagccgatttccttaccgggaggcagttcctggctaacgaagaggaagcacgatgggaagaaaagttcactccaacggaagccagtttgctgaacatagcagatcgcccaggaggactgggagagactgcaaaccagttcgagcccccagcatggcgttaggtgtcagccagctggcaggaaggtccaggtgtctgtgttcagagtctcaaggcggctatgagaggttttcctccgagtacccagaattctgttctaaaaccaaggccctggcagccatcccacccccggttccccccagtgccacagagcccttggacctgggctgcagctcctgtgggaccccactacacgaccaggggggtcctgtggagatccttcccttcctctacctcggcagtgcctaccatgctgcccggagagacatgctggacgccctgggcatcacggctctgttgaatgtctcctcggactgcccaaaccactttgaaggacactatcagtacaagtgcatcccagtggaagataaccacaaggccgacatcagctcctggttcatggaagccatagagtacatcgatgccgtgaaggactgccgtgggcgcgtgctggtgcactgccaggcgggcatctcgcggtcggccaccatctgcctggcctacctgatgatgaagaaacgggtgaggctggaggaggccttcgagttcgttaagcagcgccgcagcatcatctcgcccaacttcagcttcatggggcagctgctgcagttcgagtcccaggtgctggccacgtcctgtgctgcggaggctgctagcccctcgggacccctgcgggagcggggcaagacccccgccacccccacctcgcagttcgtcttcagctttccggtctccgtgggcgtgcactcggcccccagcagcctgccctacctgcacagccccatcaccacctctcccagctgttagagccgccctgggggccccagaaccagagctggctcccagcaagggtaggacgggccgcatgcgggcagaaagttgggactgagcagctgggagcaggcgaccgagctccttccccatcatttctccttggccaacgacgaggccagccagaatggcaataaggactccgaatacataataaaagcaaacagaacactccaacttagagcaataacggctgccgcagcagccagggaagaccttggtttggtttatgtgtcagtttcacttttccgatagaaatttcttacctcatttttttaagcagtaaggcttgaagtgatgaaacccacagatcctagcaaatgtgcccaaccagctttactaaagggggaggaagggagggcaaagggatgagaagacaagtttcccagaagtgcctggttctgtgtacttgtccctttgttgtcgttgttgtagttaaaggaatttcattttttaaaagaaa

SEQ ID NO: 8890 - DNA, 2557 bp, Homo sapiens
  source 1..2557: mol_type = unassigned DNA
cttatatgggcagccgcgtcacggacggcactcattcacataaaacgctgcgcggccggcggaatccccggcttctagggcggcgagcggccgggctggctatcgagcgagcggggcgggaacgcggagttgcgccgccgctcgggcgccgggctccgtcgcggccgcagccccgcgggtcgccctcccgtgcctcgcccgcggacaccctggccgtggacaccctggccgtgggcacccgcggggcgcgcggcgcggggccgctggccggcggcggcggcggcatgaaggtcacgtcgctcgacgggcgccagctgcgcaagatgctccgcaaggaggcggcggcgcgctgcgtggtgctcgactgccggccctatctggccttcgctgcctcgaacgtgcgcggctcgctcaacgtcaacctcaactcggtggtgctgcggcgggcccggggcggcgcggtgtcggcgcgctacgtgctgcccgacgaggcggcgcgcgcgcggctcctgcaggagggcggcggcggcgtcgcggccgtggtggtgctggaccagggcagccgccactggcagaagctgcgagaggagagcgccgcgcgtgtcgtcctcacctcgctactcgcttgcctacccgccggcccgcgggtctacttcctcaaagggggatatgagactttctactcggaatatcctgagtgttgcgtggatgtaaaacccatttcacaagagaagattgagagtgagagagccctcatcagccagtgtggaaaaccagtggtaaatgtcagctacaggccagcttatgaccagggtggcccagttgaaatccttcccttcctctaccttggaagtgcctaccatgcatccaagtgcgagttcctcgccaacctgcacatcacagccctgctgaatgtctcccgacggacctccgaggcctgcgcgacccacctacactacaaatggatccctgtggaagacagccacacggctgacattagctcccactttcaagaagcaatagacttcattgactgtgtcagggaaaagggaggcaaggtcctggtccactgtgaggctgggatctcccgttcacccaccatctgcatggcttaccttatgaagaccaagcagttccgcctgaaggaggccttcgattacatcaagcagaggaggagcatggtctcgcccaactttggcttcatgggccagctcctgcagtacgaatctgagatcctgccctccacgcccaacccccagcctccctcctgccaaggggaggcagcaggctcttcactgataggccatttgcagacactgagccctgacatgcagggtgcctactgcacattccctgcctcggtgctggcaccggtgcctacccactcaacagtctcagagctcagcagaagccctgtggcaacggccacatcctgctaaaactgggatggaggaatcggcccagccccaagagcaactgtgatttttgtttttaagactcatggacatttcatacctgtgcaatactgaagacctcattctgtcatgctgccccagtgagatagtgagtggtcaccaggcttgcaaatgaacttcagacggacctcagggtaggttctcgggactgaaggaaggccaagccattacgggagcacagcatgtgctgactactgtacttccagacccctgccctcttgggactgcccagtccttgcacctcagagttcgccttttcatttcaagcataaggcaataaatacctgcagcaacgtgggagaaagaagttgctggaccaggagaaaaggcagttatgaagccaattcattttgaaggaagcacaatttccaccttattttttgaactttggcagtttcaatgtctgtctctgttgcttcggggcataagctgatcaccgtctagttgggaaagtaaccctacagggtttgtagggacatgatcagcatcctgatttgaaccctgaaatgttgtgtagacaccctcttgggtccaatgaggtagttggttgaagtagcaagatgttggcttttctggattttttttgccatgggttcttcactgaccttggactttggcatgattcttagtcatacttgaacttgtctcattccacctcttctcagagcaactcttcctttgggaaaagagttcttcagatcatagaccaaaaaagtcataccttcgaggtggtagcagtagattccaggaggagaagggtacttgctaggtatcctgggtcagtggcggtgcaaactggtttcctcagctgcctgtccttctgtgtgcttatgtctcttgtgacaattgttttcctccctgcccctggaggttgtcttcaagctgtggacttctgggatttgcagattttgcaacgtggtactactttttttttctttttgtctgttagttatttctccaggggaaaaggcaataattttctaagacccgtgtgaatgtgaagaaaagcagtatgttactggttgttgttgttgttcttgttttttatagtgtaaaataaaaatagtaaaaggagaaaagca

SEQ ID NO: 8891 - DNA, 3231 bp, Homo sapiens
  source 1..3231: mol_type = unassigned DNA
gcggctggggcccgcgcggccggggcgccgtcccagggcagggctgcccggccccggccccgggccgcccgcgctccccatgaaaaaccagctccgcggccccccagcgcgggcgcacatgtcgacttcgggggcggcggcggctgggggcacccgggcggggtccgagcccggtgcggggtcggggtccggcgcaggcaccggggcgggcgcggcgacgggggcaggggccatgccctgcaagagcgccgagtggctgcaggaggagctggaggcgcgcggcggcgcgtccttgctgctgctcgactgccggccgcacgagctcttcgagtcgtcgcacatcgagacggccatcaacctggccatcccgggcctcatgttgcgccgcctgcgcaagggcaacctgcccatccgctccatcatccccaaccacgccgacaaggagcgcttcgccacgcgctgcaaggcggccaccgtgctgctctacgacgaggccacggccgagtggcagcccgagcccggcgctcccgcctccgtgctcggcctgctcctacagaagctgcgcgacgacggctgccaggcctactacctccaaggtggtttcaacaagtttcaaacagagtactctgagcactgcgagaccaacgtggacagctcttcctcgccgagcagctcgccacccacctcagtgctgggcctggggggcctgcgcatcagctctgactgctccgacggcgagtcggaccgagagctgcccagcagtgccaccgagtcagacggcagccctgtgccatccagccaaccagccttccctgtccagatcctgccctacctctacctcggctgcgccaaggactccaccaacctggacgtgctcggcaagtatggcatcaagtatatcctcaatgtcacacccaacctacccaacgccttcgagcacggcggcgagttcacctacaagcagatccccatctctgaccactggagccagaacctctcccagttcttccctgaggccatcagcttcattgacgaagcccgctccaagaagtgtggtgtcctggtgcactgcctggcaggcatcagccgctcagtgacggtcactgtggcctatctgatgcagaagatgaacctgtcactcaacgacgcctacgactttgtcaagaggaaaaagtccaacatctcgcccaacttcaacttcatggggcagctgctggactttgagcggacgctggggctaagcagcccgtgcgacaaccacgcgtcgagtgagcagctctacttttccacgcccaccaaccacaacctgttcccactcaatacgctggagtccacgtgaggcctggtgcacggggggcatggcaccaggcccctgctcggctctccacagggctaggtgggagagcccaagcccgccacctctggcctgaggaacccccagatgtcacctgtgcccagaggcccaggctgatcggtgtcggagcgcccctcaccatccttgggggcagggcccgcaggcaaggtctcccactgcagggcttgctggagaggcctcggctcttggacacgtggctttgggcgtccaccagggcctcatcctgtccaggacgctcctttctgctgacagcccagccagtttggctgttttttaaagacacatccacggacctgagtttactttttacttttggcaggtaaatccaagctccctggagcacaaagagtgtttgagctcttcttgatttttcttttttttttttttttttaacaaaaagtgttattttcaggctacatgcaacagtggattgtataacccagtatttcatccctttcctgatcctgcaagagagagaaatgttcagttttgtttttcgttcaatttcaaaaagcaagtatcgtgtttgtttttgtttttgttttttaatggaaaagacagacgccatgttgaccttgaccaaatgcgttttgcacatgtgtgaagcctctgtttcctcagcgggcccttcttgaaggggtggcttactgctcttcaggtattgggacccccagtcgtgccgcctcccacccttggcccagtctgacttagctctgcattcgcctgtgatgactgctgcaagttgtgattggtgggctggatggtggtctttgcattttctgccgtctcatccatccctctggtggtccctgcagacctccctgaggcagaaggtggggaccctggggccctgccgctgtcccccaggaggtgggccgcagggggctgccaggcagtagcattagccctctggggtcagcccctaagaaggcctgggctctgagcccttttatatacttagccactacttctgtctgtctgtctgtctctctctcttcctctccctctctctctttctctctctccctctctctctctttctttctctctccccccctccctctctcttcctttcctctctcttgttgtaactgggagtggaggcccagtggctggggagacattaggtggtggggcccagcccgacctccaggttcttccttctccctagctgttgctttggtctggccactcccagcccccttgtccccttggaagcttgccctgccctcatcttgcccatgccttctactgccaggagacttgcacccatttcaaccctagggcgggggcaagtggggcaaggatggaccagcagaaggggggtaaggctctgttcacttccccctgcctccacagaacgaagccacggattccgttatcttcctccagttttgttccttctccagcctcagttccaccaggtgtcaggactgcatgggggcctggggcaggcagaggagtcaggccagggtccctgacggagcagcactcagcatgtgagtgaggccacagaaaaactctgccccactgcttcttacctcacgggggtggctttcagggattctttagcgcagcagattaaaatcttgccacagtcgagaaattgacaacaagcttccatgctgtacatggttctctttttctctcttttatttttaaaaagaaaacccagaaagatgtaccagatttgtgtaaatgagggtatgccagaaggtggccagttttgctttatgatcttatgaaggaagatttgtgaccctacgtatatatatacacacacatacatatatatatatatcccgaaccaacaacgggactttgtttatattgcaaataaatattattttttcttt

SEQ ID NO: 8892 - DNA, 3340 bp, Homo sapiens
  source 1..3340: mol_type = unassigned DNA
cgcggtgcgcgcggagggccgggcgggcgggcgggacggaggccgggaggccgggaggccggggcggcgggcgcgcagctcggcgggaggcgggcgcccggagacgcggctggggcccgcgcggccggggcgccgtcccagggcagggctgcccggccccggccccgggccgcccgcgctccccatgaaaaaccagctccgcggccccccagcgcgggcgcacatgtcgacttcgggggcggcggcggctgggggcacccgggcggggtccgagcccggtgcggggtcggggtccggcgcaggcaccggggcgggcgcggcgacgggggcaggggccatgccctgcaagagcgccgagtggctgcaggaggagctggaggcgcgcggcggcgcgtccttgctgctgctcgactgccggccgcacgagctcttcgagtcgtcgcacatcgagacggccatcaacctggccatcccgggcctcatgttgcgccgcctgcgcaagggcaacctgcccatccgctccatcatccccaaccacgccgacaaggagcgcttcgccacgcgctgcaaggcggccaccgtgctgctctacgacgaggccacggccgagtggcagcccgagcccggcgctcccgcctccgtgctcggcctgctcctacagaagctgcgcgacgacggctgccaggcctactacctccaaggtggtttcaacaagtttcaaacagagtactctgagcactgcgagaccaacgtggacagctcttcctcgccgagcagctcgccacccacctcagtgctgggcctggggggcctgcgcatcagctctgactgctccgacggcgagtcggaccgagagctgcccagcagtgccaccgagtcagacggcagccctgtgccatccagccaaccagccttccctgtccagatcctgccctacctctacctcggctgcgccaaggactccaccaacctggacgtgctcggcaagtatggcatcaagtatatcctcaatgtcacacccaacctacccaacgccttcgagcacggcggcgagttcacctacaagcagatccccatctctgaccactggagccagaacctctcccagttcttccctgaggccatcagcttcattgacgaagcccgctccaagaagtgtggtgtcctggtgcactgcctggcaggcatcagccgctcagtgacggtcactgtggcctatctgatgcagaagatgaacctgtcactcaacgacgcctacgactttgtcaagaggaaaaagtccaacatctcgcccaacttcaacttcatggggcagctgctggactttgagcggacgctggggctaagcagcccgtgcgacaaccacgcgtcgagtgagcagctctacttttccacgcccaccaaccacaacctgttcccactcaatacgctggagtccacgtgaggcctggtgcacggggggcatggcaccaggcccctgctcggctctccacagggctaggtgggagagcccaagcccgccacctctggcctgaggaacccccagatgtcacctgtgcccagaggcccaggctgatcggtgtcggagcgcccctcaccatccttgggggcagggcccgcaggcaaggtctcccactgcagggcttgctggagaggcctcggctcttggacacgtggctttgggcgtccaccagggcctcatcctgtccaggacgctcctttctgctgacagcccagccagtttggctgttttttaaagacacatccacggacctgagtttactttttacttttggcaggtaaatccaagctccctggagcacaaagagtgtttgagctcttcttgatttttcttttttttttttttttttaacaaaaagtgttattttcaggctacatgcaacagtggattgtataacccagtatttcatccctttcctgatcctgcaagagagagaaatgttcagttttgtttttcgttcaatttcaaaaagcaagtatcgtgtttgtttttgtttttgttttttaatggaaaagacagacgccatgttgaccttgaccaaatgcgttttgcacatgtgtgaagcctctgtttcctcagcgggcccttcttgaaggggtggcttactgctcttcaggtattgggacccccagtcgtgccgcctcccacccttggcccagtctgacttagctctgcattcgcctgtgatgactgctgcaagttgtgattggtgggctggatggtggtctttgcattttctgccgtctcatccatccctctggtggtccctgcagacctccctgaggcagaaggtggggaccctggggccctgccgctgtcccccaggaggtgggccgcagggggctgccaggcagtagcattagccctctggggtcagcccctaagaaggcctgggctctgagcccttttatatacttagccactacttctgtctgtctgtctgtctctctctcttcctctccctctctctctttctctctctccctctctctctctttctttctctctccccccctccctctctcttcctttcctctctcttgttgtaactgggagtggaggcccagtggctggggagacattaggtggtggggcccagcccgacctccaggttcttccttctccctagctgttgctttggtctggccactcccagcccccttgtccccttggaagcttgccctgccctcatcttgcccatgccttctactgccaggagacttgcacccatttcaaccctagggcgggggcaagtggggcaaggatggaccagcagaaggggggtaaggctctgttcacttccccctgcctccacagaacgaagccacggattccgttatcttcctccagttttgttccttctccagcctcagttccaccaggtgtcaggactgcatgggggcctggggcaggcagaggagtcaggccagggtccctgacggagcagcactcagcatgtgagtgaggccacagaaaaactctgccccactgcttcttacctcacgggggtggctttcagggattctttagcgcagcagattaaaatcttgccacagtcgagaaattgacaacaagcttccatgctgtacatggttctctttttctctcttttatttttaaaaagaaaacccagaaagatgtaccagatttgtgtaaatgagggtatgccagaaggtggccagttttgctttatgatcttatgaaggaagatttgtgaccctacgtatatatatacacacacatacatatatatatatatcccgaaccaacaacgggactttgtttatattgcaaataaatattattttttctttaaaa

SEQ ID NO: 8893 - DNA, 4455 bp, Homo sapiens
  source 1..4455: mol_type = unassigned DNA
aggtccagcaccatgtgctaggtcactcccagcgcgaggccacacctgggccgtcggagcagcccctcctcacttcaggggtcaccctccccagcacccattgccccaccatggctggggaccggctcccgaggaaggtgatggatgccaagaagctggccagcctgctgcggggcgggcctggggggccgctggtcatcgacagccgctccttcgtggagtacaacagctggcatgtgctcagctccgtcaacatctgctgctccaagctggtgaagcggcggctgcagcagggcaaggtgaccattgcggagctcatccagccggctgcacgcagccaggtggaggctacggagccacaggacgtggtggtctatgaccagagcacgcgggacgccagcgtgctggccgcagacagcttcctctccatcctgctgagcaagctggacggctgcttcgacagcgtggccatcctcactgggggcttcgccaccttctcctcctgcttccccggcctctgcgagggcaagcctgctgccctgctacccatgagcctctcccagccctgcctgcctgtgcccagcgtgggcctgacccgcatcctgcctcacctctacctgggctcgcagaaggacgtcctaaacaaggatctgatgacgcaaaatggaataagctacgtcctcaacgccagcaactcctgccccaagcctgacttcatctgcgagagccgcttcatgcgggtccccatcaacgacaactactgtgaaaaactgctgccctggctggacaagtccatcgagttcatcgataaagccaagctctccagctgccaagtcatcgtccactgtctggctggcatctcccgctctgccaccatcgccatcgcctacatcatgaagaccatgggcatgtcctccgacgacgcctacaggttcgtgaaggacaggcgcccgtccatctcgcccaacttcaacttcctgggccagctgctggagtacgagcgcagcctgaagctgctggccgccctgcagggcgacccgggcaccccctcagggacgccggagcctccgcccagtcctgccgccggggccccgctgccacggctgccaccacctacctcagagagcgctgccacagggaatgcggctgccagggagggcggcctgagcgcgggcggggagccccccgcgccccccacgcccccggcgaccagcgcactgcagcagggcctgcgcggcctgcacctctcctcggaccgcctgcaggacactaaccgcctcaagcgctccttctccctggacatcaagtctgcctacgcccctagcaggcggcccgacggccccgggccccccgaccccggcgaggccccgaagctctgcaagctggacagcccgtcgggggccgcgctgggcctgtcctcgcccagcccggacagcccggacgccgcgcctgaggcgcgcccacggccccgccggcggccccggccccccgccggctcccccgcgcgctcccccgcgcacagcctcggcctgaacttcggcgatgcggcccggcagactccgcggcacggcctctcggccctgtcggcgcccgggctgcccggccctggccagccggccggccccggggcctgggcaccgccgctcgactccccaggcacgccgtcgcccgacgggccctggtgcttcagccccgagggcgcacagggggcgggcggggtgctgtttgcgcccttcggccgggcgggcgccccgggaccaggcggcggcagcgacctgcggcggcgggaggcagcgagggctgagccccgggacgcgcggaccggctggcccgaggagccggccccggagacgcagttcaagcgccgcagctgccagatggagttcgaggagggcatggtggaggggcgcgcgcgcggcgaggagctggccgccctgggcaagcaggcgagcttctcgggcagcgtggaggtcatcgaggtgtcctgacccctccgctgccctcggccccgccgcccgcagccaggcccgttataaatgtatattatatataatgcaaagaaaggtaaatggttttactgggatttttatcgagaagtaaatatttcgattttttatttatttaagctgttcattctggcaatgatttggcaacagtgcgggtggtcctcgagctctatttttactgtctggtatttaaactgaaacatacgtttctaagcaatacgaggccaccttcagtcgcaagctgggtgccaggcctggggcccctcccagttcccccgccccaggaaacactgctgacctttgcaaaggctgccgagctttcgtgcactttttacataacaaaaaggtgaaaaaaaggaaaaaaaaacttctttgccacaaactgagccgcagaaccccccttctccccccacccacctcccctgctccctcccttctctgcgccggcctagggctctgcaccaaagccataggatggaggagcaggagctggtgtgccccggagaggtgcggccagccctccatcagctccaggcaccaaatcttggtggcaaggagggcaccccgctgcccgttgccccagagctgttctctggcaggggaggacaggcattgggcttcatggtgccagggtgttcagaggggctgagaaatagaacagtgtgtgtaggggcttcgggcagggggttctggaacgtcagatgaggtgcagcccaggggaggacagaggtgttagtgcccccaactcctgccagagccccagtccagccacagagtggctcagaaaggccattcctagagggctgcggccctcccttctcccttgcccatgcccccagagctgcctgccgggcagggtggcaccattgcaggagaggagcttggcctccgggggtcaggcaggaggcgcctggctagccagtgctggctccactgggcaggaagccctggacccccaggtatgaggagggggtggtcttagggttctgttccaggtctgccccgcccccctcccagccatgccccaggcagaacttggaattcaggtgtgcacctgcaggctgaggggctctgtgagcaggtgctgctcacacagggagttcaggcgccagccaagcccctgtgctgctgggataggcctgcttcacttagggagcactgcctcaagacaggtaaagccccctcgtttgcccccacccccatggggccgctcaggagagaaactcccattcacccctttcccagggtgctctctctctaggtggcatgccagcccccaaacacaagtggcttttgggcccaggtgggtcagcctgctgcccctgccccataccccctcgggccattgggacccctgcccttcagatgtcctagggtctaggagtggggccagtcactgtgggaagaggccaggggcttggccggagaggcagcccagggcaggacccagtcctgagtcctggagcagggccagggaggcgcccatcccgccccagccagccgccctctctgctgtttcttctatttgttcttcttttcacccacagctctgtgttcctgtcatccctcctttcagcaaaagtcctgttcccgttccctctgtccccacccactcctgttcccccaagaaaataagctatcgttgtatttgcaatctatggattagaggtttaagtatttattattattggttaattattattaattatgtaaatttgcctcccatatgtctgttgcgttgggtttctgaggagaccctgggtgaggaggatgcactggcttcccgcttctcgccccccacccctgtgctgtccgggagacagtggtctggggccactggttgggcccccttctcccttcccccttccccttgtcccttctgcaggccgttgaggggggctgtctgtctcagtctgtctctgctcccactcttgaggcactggttaccgcaaagtgagcagccagcaggggggcgaaggtcctgtgttggccactgcctcctccagtgctgcaggaggcgggctgaggccccacctggtggctttcacctgacccagccctgagtcctctccaagcctctctccggcccctcccacctggccactgcctcctccagtgctgcgggaggcgggccagggccccacctggtggctttcacctgacccagccctgagtcctctccaagcctctctccggcccctcccacctggccactgcctggcattgggatcgccccaaaatggacccggcccctcctgttatttgctgggaagtccagcggaggagagggtgcaggtcccccgctgagcctccagtctctgtagactgggctgccggcccttcagccccccttggagcccctcccgccacagccgcaccttctgctcccggcccctccctttgtatttggagacaatgtgttgtaataaagcttaaagtggatgttttc

SEQ ID NO: 8894 - DNA, 4480 bp, Homo sapiens
  source 1..4480: mol_type = unassigned DNA
ccgaggcgagcgcgagcgaggtccagcaccatgtgctaggtcactcccagcgcgaggccacacctgggccgtcggagcagcccctcctcacttcaggggtcaccctccccagcacccattgccccaccatggctggggaccggctcccgaggaaggtgatggatgccaagaagctggccagcctgctgcggggcgggcctggggggccgctggtcatcgacagccgctccttcgtggagtacaacagctggcatgtgctcagctccgtcaacatctgctgctccaagctggtgaagcggcggctgcagcagggcaaggtgaccattgcggagctcatccagccggctgcacgcagccaggtggaggctacggagccacaggacgtggtggtctatgaccagagcacgcgggacgccagcgtgctggccgcagacagcttcctctccatcctgctgagcaagctggacggctgcttcgacagcgtggccatcctcactgggggcttcgccaccttctcctcctgcttccccggcctctgcgagggcaagcctgctgccctgctacccatgagcctctcccagccctgcctgcctgtgcccagcgtgggcctgacccgcatcctgcctcacctctacctgggctcgcagaaggacgtcctaaacaaggatctgatgacgcaaaatggaataagctacgtcctcaacgccagcaactcctgccccaagcctgacttcatctgcgagagccgcttcatgcgggtccccatcaacgacaactactgtgaaaaactgctgccctggctggacaagtccatcgagttcatcgataaagccaagctctccagctgccaagtcatcgtccactgtctggctggcatctcccgctctgccaccatcgccatcgcctacatcatgaagaccatgggcatgtcctccgacgacgcctacaggttcgtgaaggacaggcgcccgtccatctcgcccaacttcaacttcctgggccagctgctggagtacgagcgcagcctgaagctgctggccgccctgcagggcgacccgggcaccccctcagggacgccggagcctccgcccagtcctgccgccggggccccgctgccacggctgccaccacctacctcagagagcgctgccacagggaatgcggctgccagggagggcggcctgagcgcgggcggggagccccccgcgccccccacgcccccggcgaccagcgcactgcagcagggcctgcgcggcctgcacctctcctcggaccgcctgcaggacactaaccgcctcaagcgctccttctccctggacatcaagtctgcctacgcccctagcaggcggcccgacggccccgggccccccgaccccggcgaggccccgaagctctgcaagctggacagcccgtcgggggccgcgctgggcctgtcctcgcccagcccggacagcccggacgccgcgcctgaggcgcgcccacggccccgccggcggccccggccccccgccggctcccccgcgcgctcccccgcgcacagcctcggcctgaacttcggcgatgcggcccggcagactccgcggcacggcctctcggccctgtcggcgcccgggctgcccggccctggccagccggccggccccggggcctgggcaccgccgctcgactccccaggcacgccgtcgcccgacgggccctggtgcttcagccccgagggcgcacagggggcgggcggggtgctgtttgcgcccttcggccgggcgggcgccccgggaccaggcggcggcagcgacctgcggcggcgggaggcagcgagggctgagccccgggacgcgcggaccggctggcccgaggagccggccccggagacgcagttcaagcgccgcagctgccagatggagttcgaggagggcatggtggaggggcgcgcgcgcggcgaggagctggccgccctgggcaagcaggcgagcttctcgggcagcgtggaggtcatcgaggtgtcctgacccctccgctgccctcggccccgccgcccgcagccaggcccgttataaatgtatattatatataatgcaaagaaaggtaaatggttttactgggatttttatcgagaagtaaatatttcgattttttatttatttaagctgttcattctggcaatgatttggcaacagtgcgggtggtcctcgagctctatttttactgtctggtatttaaactgaaacatacgtttctaagcaatacgaggccaccttcagtcgcaagctgggtgccaggcctggggcccctcccagttcccccgccccaggaaacactgctgacctttgcaaaggctgccgagctttcgtgcactttttacataacaaaaaggtgaaaaaaaggaaaaaaaaacttctttgccacaaactgagccgcagaaccccccttctccccccacccacctcccctgctccctcccttctctgcgccggcctagggctctgcaccaaagccataggatggaggagcaggagctggtgtgccccggagaggtgcggccagccctccatcagctccaggcaccaaatcttggtggcaaggagggcaccccgctgcccgttgccccagagctgttctctggcaggggaggacaggcattgggcttcatggtgccagggtgttcagaggggctgagaaatagaacagtgtgtgtaggggcttcgggcagggggttctggaacgtcagatgaggtgcagcccaggggaggacagaggtgttagtgcccccaactcctgccagagccccagtccagccacagagtggctcagaaaggccattcctagagggctgcggccctcccttctcccttgcccatgcccccagagctgcctgccgggcagggtggcaccattgcaggagaggagcttggcctccgggggtcaggcaggaggcgcctggctagccagtgctggctccactgggcaggaagccctggacccccaggtatgaggagggggtggtcttagggttctgttccaggtctgccccgcccccctcccagccatgccccaggcagaacttggaattcaggtgtgcacctgcaggctgaggggctctgtgagcaggtgctgctcacacagggagttcaggcgccagccaagcccctgtgctgctgggataggcctgcttcacttagggagcactgcctcaagacaggtaaagccccctcgtttgcccccacccccatggggccgctcaggagagaaactcccattcacccctttcccagggtgctctctctctaggtggcatgccagcccccaaacacaagtggcttttgggcccaggtgggtcagcctgctgcccctgccccataccccctcgggccattgggacccctgcccttcagatgtcctagggtctaggagtggggccagtcactgtgggaagaggccaggggcttggccggagaggcagcccagggcaggacccagtcctgagtcctggagcagggccagggaggcgcccatcccgccccagccagccgccctctctgctgtttcttctatttgttcttcttttcacccacagctctgtgttcctgtcatccctcctttcagcaaaagtcctgttcccgttccctctgtccccacccactcctgttcccccaagaaaataagctatcgttgtatttgcaatctatggattagaggtttaagtatttattattattggttaattattattaattatgtaaatttgcctcccatatgtctgttgcgttgggtttctgaggagaccctgggtgaggaggatgcactggcttcccgcttctcgccccccacccctgtgctgtccgggagacagtggtctggggccactggttgggcccccttctcccttcccccttccccttgtcccttctgcaggccgttgaggggggctgtctgtctcagtctgtctctgctcccactcttgaggcactggttaccgcaaagtgagcagccagcaggggggcgaaggtcctgtgttggccactgcctcctccagtgctgcaggaggcgggctgaggccccacctggtggctttcacctgacccagccctgagtcctctccaagcctctctccggcccctcccacctggccactgcctcctccagtgctgcgggaggcgggccagggccccacctggtggctttcacctgacccagccctgagtcctctccaagcctctctccggcccctcccacctggccactgcctggcattgggatcgccccaaaatggacccggcccctcctgttatttgctgggaagtccagcggaggagagggtgcaggtcccccgctgagcctccagtctctgtagactgggctgccggcccttcagccccccttggagcccctcccgccacagccgcaccttctgctcccggcccctccctttgtatttggagacaatgtgttgtaataaagcttaaagtggatgttttccccacga

SEQ ID NO: 8895 - DNA, 3096 bp, Homo sapiens
  source 1..3096: mol_type = unassigned DNA
aaaaataactcatattgtctctgaggttcttttccagtgaagtgtttagtattgctgctatttggagtacaaagttggagcttttaaagaacctgggagttcaaaagtataaggagaaataaatgaaaagcagaaatattttgaggcaataagtatagactcaaatctatattatgacccacttgtagcaccacttggaattctaccaataagagatttatttgggcaaactataatggttgttggaaattgcaaatcttagtgtgaattattttagtccagttggtttctttctttctcttacctgaaatgaactatactgaggcaataggagctttgtatagtaatttaggagtgtaaaacaacttagggaaaaggattattaagcaggatgattgggatgacatcatgtgaaatttaggaattggaggcattgggaattgagagggtgctaacaaaggaaaacagcttattttagaatttgtctggaggatgtagaattgaagaagttttggtatttcttctgcagcggccccagtgcccttgaccaggaacatctcttggagtcagtagttttcatgaggctgacctaggaacttggccaacatatgcaacattgttctatttaaaatattccttgaattaaattcgatagtatcaatttaaaacataaagttttcactcaactcctttagaagttagattttagcttgtacttgtctttacctcttctgctgattatcagttgacaacactgagattactttcattttcctgtaagtcattatgaatttttctggtcaaccatgagttatcagtggaagcaataagtaggaagtactgtaaaagaattacaataaaataagagaaaccacttggagagcaagagggcttgtggacttgggggagcggttgtgagaaatgtctcagaacttaatttacaaataacattggtagattgacatgttgtctttcctataaagtaactttacctctgtcttaatagtaaactactatgaaagtgaattcgtgttcctcttgatttgtgaactgatgaaaattacaaaatgtggagttttttccccagataaagtaaatggtggaatattcaggtttatttgatacctagaaaatacctgaaattttccgtggtaataggcacattttgaaactgttttttttttctctgacaattgaatatattttatatatagttgattttgattattgaagactaaggaaaatttaagtttgaatgttagaaaatgaattttgcaaatttgaagtaattttattctttatgttttgggattgtagttatgttagatattcctcagttggggtaattgtcttgcatcattatctcttatcataatctgtttttcttcacacagtgttatagttttgccgctggactcttccctcccttcccccaccccatcaggatgatatgagacttgaaagaagacgatgcatacaggaggagagacttcagcatgcaaaccttcatctgttcggcttgcaccgtcattttcattccatgctgctggccttcagatggctggacagatgccccattcacatcagtacagtgaccgtcgccagccaaacataagtgaccaacaggtttctgccttatcatattctgaccagattcagcaacctctaactaaccaggtgatgcctgatattgtcatgttacagaggcggatgccccaaaccttccgtgacccagcaactgctcccctgagaaaactttctgttgacttgatcaaaacatacaagcatattaatgaggtttactatgcaaaaaagaagcgaagacaccaacagggccagggagacgattctagtcataagaaggaacggaaggtttacaatgatggttatgatgatgataactatgattatattgtaaaaaacggagaaaagtggatggatcgttacgaaattgactccttgataggcaaaggttcctttggacaggttgtaaaggcatatgatcgtgtggagcaagaatgggttgccattaaaataataaagaacaagaaggcttttctgaatcaagcacagatagaagtgcgacttcttgagctcatgaacaaacatgacactgaaatgaaatactacatagtgcatttgaaacgccactttatgtttcgaaaccatctctgtttagtttttgaaatgctgtcctacaacctctatgacttgctgagaaacaccaatttccgaggggtctctttgaacctaacacgaaagtttgcgcaacagatgtgcactgcactgcttttccttgcgactccagaacttagtatcattcactgtgatctaaaacctgaaaatatccttctttgtaaccccaaacgcagtgcaatcaagatagttgactttggcagttcttgtcagttggggcagaggatataccagtatattcagagtcgcttttatcggtctccagaggtgctactgggaatgccttatgaccttgccattgatatgtggtccctcgggtgtattttggttgaaatgcacactggagaacctctgttcagtggtgccaatgaggtagatcagatgaataaaatagtggaagttctgggtattccacctgctcatattcttgaccaagcaccaaaagcaagaaagttctttgagaagttgccagatggcacttggaacttaaagaagaccaaagatggaaaacgggagtacaaaccaccaggaacccgtaaacttcataacattcttggagtggaaacaggaggacctggtgggcgacgtgctggggagtcaggtcatacggtcgctgactacttgaagttcaaagacctcattttaaggatgcttgattatgaccccaaaactcgaattcaaccttattatgctctgcagcacagtttcttcaagaaaacagctgatgaaggtacaaatacaagtaatagtgtatctacaagccccgccatggagcagtctcagtcttcgggcaccacctccagtacatcgtcaagctcagtggtggagcagcactggatgccaggtgcctttagaatgaccgtatcatttaccctagaggttcatgacgttcctgtctaa

SEQ ID NO: 8896 - DNA, 5498 bp, Homo sapiens
  source 1..5498: mol_type = unassigned DNA
cgaggctgagactcaccggaggaagcggcgcgagcgccccgccatcgtcccggctgaagtgcagtggcacgatcataggtggtcactacagtctcagattcctgggcttaagcagtcttcccacctcagcctccccagtagctgggattacagtgttatagttttgccgctggactcttccctcccttcccccaccccatcaggatgatatgagacttgaaagaagacgatgcatacaggaggagagacttcagcatgcaaaccttcatctgttcggcttgcaccgtcattttcattccatgctgctggccttcagatggctggacagatgccccattcacatcagtacagtgaccgtcgccagccaaacataagtgaccaacaggtttctgccttatcatattctgaccagattcagcaacctctaactaaccaggtgatgcctgatattgtcatgttacagaggcggatgccccaaaccttccgtgacccagcaactgctcccctgagaaaactttctgttgacttgatcaaaacatacaagcatattaatgaggtttactatgcaaaaaagaagcgaagacaccaacagggccagggagacgattctagtcataagaaggaacggaaggtttacaatgatggttatgatgatgataactatgattatattgtaaaaaacggagaaaagtggatggatcgttacgaaattgactccttgataggcaaaggttcctttggacaggttgtaaaggcatatgatcgtgtggagcaagaatgggttgccattaaaataataaagaacaagaaggcttttctgaatcaagcacagatagaagtgcgacttcttgagctcatgaacaaacatgacactgaaatgaaatactacatagtgcatttgaaacgccactttatgtttcgaaaccatctctgtttagtttttgaaatgctgtcctacaacctctatgacttgctgagaaacaccaatttccgaggggtctctttgaacctaacacgaaagtttgcgcaacagatgtgcactgcactgcttttccttgcgactccagaacttagtatcattcactgtgatctaaaacctgaaaatatccttctttgtaaccccaaacgcagtgcaatcaagatagttgactttggcagttcttgtcagttggggcagaggatataccagtatattcagagtcgcttttatcggtctccagaggtgctactgggaatgccttatgaccttgccattgatatgtggtccctcgggtgtattttggttgaaatgcacactggagaacctctgttcagtggtgccaatgaggtagatcagatgaataaaatagtggaagttctgggtattccacctgctcatattcttgaccaagcaccaaaagcaagaaagttctttgagaagttgccagatggcacttggaacttaaagaagaccaaagatggaaaacgggagtacaaaccaccaggaacccgtaaacttcataacattcttggagtggaaacaggaggacctggtgggcgacgtgctggggagtcaggtcatacggtcgctgactacttgaagttcaaagacctcattttaaggatgcttgattatgaccccaaaactcgaattcaaccttattatgctctgcagcacagtttcttcaagaaaacagctgatgaaggtacaaatacaagtaatagtgtatctacaagccccgccatggagcagtctcagtcttcgggcaccacctccagtacatcgtcaagctcaggtggctcatcggggacaagcaacagtgggagagcccggtcggatccgacgcaccagcatcggcacagtggtgggcacttcacagctgccgtgcaggccatggactgcgagacacacagtccccaggtgagctcgcacgtggttcatttgcttgtgtcacctgccattctcaggtggagcagcactggatgccaggtgcctttagaatgaccgtatcatttaccctagaggttcatgacgttcctgtctaaggaaatgtgcgtcagcaatttcctgctcctcttggttggtcaggcactgaagctcctacacaggtcactgttgaaactcatcctgttcaagaaacaacctttcatgtagcccctcaacagaatgcattgcatcatcaccatggtaacagttcccatcaccatcaccaccaccaccaccatcaccaccaccatggacaacaagccttgggtaaccggaccaggccaagggtctacaattctccaacgaatagctcctctacccaagattctatggaggttggccacagtcaccactccatgacatccctgtcttcctcaacgacttcttcctcgacatcttcctcctctactggtaaccaaggcaatcaggcctaccagaatcgcccagtggctgctaataccttggactttggacagaatggagctatggacgttaatttgaccgtctactccaatccccgccaagagactggcatagctggacatccaacataccaattttctgctaatacaggtcctgcacattacatgactgaaggacatctgacaatgaggcaaggggctgatagagaagagtcccccatgacaggagtttgtgtgcaacagagtcctgtagctagctcgtgactacattgaaacttgagtttgtttcttgtgtgtttttatagaagtggtgttttttttccaaaaacaaagtgcaaagctgcttgaatcaggaggagattaacacactgaaccgctacaagagggcaaagctgattttttttttaacttgaaaagattgcaaagggacattgaagtgtttaaaagagccatgtccaaacccatcttcatggatagctcagaggtatcctctttttgctcccccattttaacttgccacatcccagtcacagtggggtttttttgtctttctattcagcaaaagttaatattcagatgttggtcttggtcatttgccaactaattttaaagtaaaaggcactgcacataatttgcataaagggccccatgagggtgttttttttttttctttttgtcccccccatccccctttttttttgttttgttctgttttgttttgggtgggagggtgggaaatttgggtttttaagtcctctaaacacacttgggcacggaaatgcagtactgtaaggaagagggacctccagcttccacaaacaccatcttcagctgtatgaaagggacggttgtggtgaagtttgtcaggcacagtaagcatgctgagtggcggggatcagaactctcctatctgaacctactgaggagcaaagcagcaattacatgggatcctgtggctctcccgttgcagaggccacaggaagataggatggaacgtgactggtctcctaaccaaggtgcactgagaagcaatcaacgggtcggtcgtggccagtcctggggaggtctgagtggtggtctttgggataacctttggccttatggatttggactcgaaattagaagagcctaccatttcagatgcaatcacttttggacatgcttttgcagacagtccttaatgctgaaaacacagagaatgggtaattcaagaggcctttcttttaaaatagacttttgtgacccactaattgtaaggtattgcaaggtcactttgcgtgtgtcataaagttgacttccttattggttgaaggtcacagaagtagtggtttgctttgatggaaatagctacagctgtgtcccttcctgctttttactttttcttttgctttttctcggcacgtggtatctccaccatttcttctgcacaaagatgtcttctgttcatcctgaacatttttaaaaaatgcagaattttatgtgactgcttttttgcctcacaattatgctgtgaattttacaaaaatttattttcttttttgataatttattgtaccaaagctgtttttatagcacatagatgtctgtaaccaataatgtagcagttctgcactttgacacaaggtgtaactagaccatttttaaatgtcagttgaaaattatggctgtactattgcttaaacaaaactggaactgttgttgaatccatagccaatacatttacagcaatctgtgtactgaacatagtagattgacatctaattcaagattacaacatctgttacattctaagtgtgttcaggcttctgaaggtaaagggacactggatccagaagctatggaaccagcagttgattcttgtattcctgattaacctacttgtaaacttgaaagcaagaccttgattgcaccaacaggtccagagtatgagtgcaagcaaagcagaactctcatgcgtgacctgagcagacaggctggtatttaacaggtgcctcgtgttgagattacgctgccttaatgtaacacagtctggcagttgctaaatttgtgttcccattttaaattgaccaattttggggtgtgacacttttgagcggttgaattgggagaatgaagataagtaatttacctgtccaggatcaaaagaagcctagaaaagaagcagtaatctacctctgccgataacctgtttaagatgactcagcagaacaccgcgtttcattctattggtcaattccatgtggctgactaggtcaattttttttctgaacaaaagcaggtttttatatgtaaacagtgagaaaagaaaggctaaacactatgtaaatgtgaatggaaacttggaaatactcgtttttataaactacaaaaactttttgttgtttatcaggaaatccatatttattttgtaattaactgtcaagcctgtggatgatttttttgaacttggtagttcataaaggtttacagtgaataaaaggatatcatcttgagtatagcaatatcaaaaggaattcagtagttactgctgtttaggaatataaggttaagatatcatatgggtcaggtcattttttttttctgtgctggttgccacatcttagcaagcaccaaaaaactaaagcagtttttaaaccgatatttacgtaaagaaaatcataaaatccaatgcttctgcatactgtgttatgttacagtccagttttgtgtgctttactacacagtttggttacaggacttctgtgcattgtaaacataaacagcatggaaaaggttaaatacctgtgttcagattgtaagatctagtccggacttgctgtgtatattgtaacgttaaatgaaaaaagaacccccctttgtattatagtcatgcggtcttatgtatgataaacagttgaataatttgtcctcagactctttactatgcttttttaaaaattaatttaagaaaaatgtaaacatagtaaaaatcttcctatgcaattaaactggtccaggtctggtaggtatagtatcaaagttgagttaaatgtgtaaaaaggaaactatttgagatacattgacataggcatcagcaatctctgaaagtaaaaattggaggtttaacagat

SEQ ID NO: 8897 - DNA, 6384 bp, Homo sapiens
  source 1..6384: mol_type = unassigned DNA
aaaaataactcatattgtctctgaggttcttttccagtgaagtgtttagtattgctgctatttggagtacaaagttggagcttttaaagaacctgggagttcaaaagtataaggagaaataaatgaaaagcagaaatattttgaggcaataagtatagactcaaatctatattatgacccacttgtagcaccacttggaattctaccaataagagatttatttgggcaaactataatggttgttggaaattgcaaatcttagtgtgaattattttagtccagttggtttctttctttctcttacctgaaatgaactatactgaggcaataggagctttgtatagtaatttaggagtgtaaaacaacttagggaaaaggattattaagcaggatgattgggatgacatcatgtgaaatttaggaattggaggcattgggaattgagagggtgctaacaaaggaaaacagcttattttagaatttgtctggaggatgtagaattgaagaagttttggtatttcttctgcagcggccccagtgcccttgaccaggaacatctcttggagtcagtagttttcatgaggctgacctaggaacttggccaacatatgcaacattgttctatttaaaatattccttgaattaaattcgatagtatcaatttaaaacataaagttttcactcaactcctttagaagttagattttagcttgtacttgtctttacctcttctgctgattatcagttgacaacactgagattactttcattttcctgtaagtcattatgaatttttctggtcaaccatgagttatcagtggaagcaataagtaggaagtactgtaaaagaattacaataaaataagagaaaccacttggagagcaagagggcttgtggacttgggggagcggttgtgagaaatgtctcagaacttaatttacaaataacattggtagattgacatgttgtctttcctataaagtaactttacctctgtcttaatagtaaactactatgaaagtgaattcgtgttcctcttgatttgtgaactgatgaaaattacaaaatgtggagttttttccccagataaagtaaatggtggaatattcaggtttatttgatacctagaaaatacctgaaattttccgtggtaataggcacattttgaaactgttttttttttctctgacaattgaatatattttatatatagttgattttgattattgaagactaaggaaaatttaagtttgaatgttagaaaatgaattttgcaaatttgaagtaattttattctttatgttttgggattgtagttatgttagatattcctcagttggggtaattgtcttgcatcattatctcttatcataatctgtttttcttcacacagtgttatagttttgccgctggactcttccctcccttcccccaccccatcaggatgatatgagacttgaaagaagacgatgcatacaggaggagagacttcagcatgcaaaccttcatctgttcggcttgcaccgtcattttcattccatgctgctggccttcagatggctggacagatgccccattcacatcagtacagtgaccgtcgccagccaaacataagtgaccaacaggtttctgccttatcatattctgaccagattcagcaacctctaactaaccagaggcggatgccccaaaccttccgtgacccagcaactgctcccctgagaaaactttctgttgacttgatcaaaacatacaagcatattaatgaggtttactatgcaaaaaagaagcgaagacaccaacagggccagggagacgattctagtcataagaaggaacggaaggtttacaatgatggttatgatgatgataactatgattatattgtaaaaaacggagaaaagtggatggatcgttacgaaattgactccttgataggcaaaggttcctttggacaggttgtaaaggcatatgatcgtgtggagcaagaatgggttgccattaaaataataaagaacaagaaggcttttctgaatcaagcacagatagaagtgcgacttcttgagctcatgaacaaacatgacactgaaatgaaatactacatagtgcatttgaaacgccactttatgtttcgaaaccatctctgtttagtttttgaaatgctgtcctacaacctctatgacttgctgagaaacaccaatttccgaggggtctctttgaacctaacacgaaagtttgcgcaacagatgtgcactgcactgcttttccttgcgactccagaacttagtatcattcactgtgatctaaaacctgaaaatatccttctttgtaaccccaaacgcagtgcaatcaagatagttgactttggcagttcttgtcagttggggcagaggatataccagtatattcagagtcgcttttatcggtctccagaggtgctactgggaatgccttatgaccttgccattgatatgtggtccctcgggtgtattttggttgaaatgcacactggagaacctctgttcagtggtgccaatgaggtagatcagatgaataaaatagtggaagttctgggtattccacctgctcatattcttgaccaagcaccaaaagcaagaaagttctttgagaagttgccagatggcacttggaacttaaagaagaccaaagatggaaaacgggagtacaaaccaccaggaacccgtaaacttcataacattcttggagtggaaacaggaggacctggtgggcgacgtgctggggagtcaggtcatacggtcgctgactacttgaagttcaaagacctcattttaaggatgcttgattatgaccccaaaactcgaattcaaccttattatgctctgcagcacagtttcttcaagaaaacagctgatgaaggtacaaatacaagtaatagtgtatctacaagccccgccatggagcagtctcagtcttcgggcaccacctccagtacatcgtcaagctcaggtggctcatcggggacaagcaacagtgggagagcccggtcggatccgacgcaccagcatcggcacagtggtgggcacttcacagctgccgtgcaggccatggactgcgagacacacagtccccaggtgcgtcagcaatttcctgctcctcttggttggtcaggcactgaagctcctacacaggtcactgttgaaactcatcctgttcaagaaacaacctttcatgtagcccctcaacagaatgcattgcatcatcaccatggtaacagttcccatcaccatcaccaccaccaccaccatcaccaccaccatggacaacaagccttgggtaaccggaccaggccaagggtctacaattctccaacgaatagctcctctacccaagattctatggaggttggccacagtcaccactccatgacatccctgtcttcctcaacgacttcttcctcgacatcttcctcctctactggtaaccaaggcaatcaggcctaccagaatcgcccagtggctgctaataccttggactttggacagaatggagctatggacgttaatttgaccgtctactccaatccccgccaagagactggcatagctggacatccaacataccaattttctgctaatacaggtcctgcacattacatgactgaaggacatctgacaatgaggcaaggggctgatagagaagagtcccccatgacaggagtttgtgtgcaacagagtcctgtagctagctcgtgactacattgaaacttgagtttgtttcttgtgtgtttttatagaagtggtgttttttttccaaaaacaaagtgcaaagctgcttgaatcaggaggagattaacacactgaaccgctacaagagggcaaagctgattttttttttaacttgaaaagattgcaaagggacattgaagtgtttaaaagagccatgtccaaacccatcttcatggatagctcagaggtatcctctttttgctcccccattttaacttgccacatcccagtcacagtggggtttttttgtctttctattcagcaaaagttaatattcagatgttggtcttggtcatttgccaactaattttaaagtaaaaggcactgcacataatttgcataaagggccccatgagggtgttttttttttttctttttgtcccccccatccccctttttttttgttttgttctgttttgttttgggtgggagggtgggaaatttgggtttttaagtcctctaaacacacttgggcacggaaatgcagtactgtaaggaagagggacctccagcttccacaaacaccatcttcagctgtatgaaagggacggttgtggtgaagtttgtcaggcacagtaagcatgctgagtggcggggatcagaactctcctatctgaacctactgaggagcaaagcagcaattacatgggatcctgtggctctcccgttgcagaggccacaggaagataggatggaacgtgactggtctcctaaccaaggtgcactgagaagcaatcaacgggtcggtcgtggccagtcctggggaggtctgagtggtggtctttgggataacctttggccttatggatttggactcgaaattagaagagcctaccatttcagatgcaatcacttttggacatgcttttgcagacagtccttaatgctgaaaacacagagaatgggtaattcaagaggcctttcttttaaaatagacttttgtgacccactaattgtaaggtattgcaaggtcactttgcgtgtgtcataaagttgacttccttattggttgaaggtcacagaagtagtggtttgctttgatggaaatagctacagctgtgtcccttcctgctttttactttttcttttgctttttctcggcacgtggtatctccaccatttcttctgcacaaagatgtcttctgttcatcctgaacatttttaaaaaatgcagaattttatgtgactgcttttttgcctcacaattatgctgtgaattttacaaaaatttattttcttttttgataatttattgtaccaaagctgtttttatagcacatagatgtctgtaaccaataatgtagcagttctgcactttgacacaaggtgtaactagaccatttttaaatgtcagttgaaaattatggctgtactattgcttaaacaaaactggaactgttgttgaatccatagccaatacatttacagcaatctgtgtactgaacatagtagattgacatctaattcaagattacaacatctgttacattctaagtgtgttcaggcttctgaaggtaaagggacactggatccagaagctatggaaccagcagttgattcttgtattcctgattaacctacttgtaaacttgaaagcaagaccttgattgcaccaacaggtccagagtatgagtgcaagcaaagcagaactctcatgcgtgacctgagcagacaggctggtatttaacaggtgcctcgtgttgagattacgctgccttaatgtaacacagtctggcagttgctaaatttgtgttcccattttaaattgaccaattttggggtgtgacacttttgagcggttgaattgggagaatgaagataagtaatttacctgtccaggatcaaaagaagcctagaaaagaagcagtaatctacctctgccgataacctgtttaagatgactcagcagaacaccgcgtttcattctattggtcaattccatgtggctgactaggtcaattttttttctgaacaaaagcaggtttttatatgtaaacagtgagaaaagaaaggctaaacactatgtaaatgtgaatggaaacttggaaatactcgtttttataaactacaaaaactttttgttgtttatcaggaaatccatatttattttgtaattaactgtcaagcctgtggatgatttttttgaacttggtagttcataaaggtttacagtgaataaaaggatatcatcttgagtatagcaatatcaaaaggaattcagtagttactgctgtttaggaatataaggttaagatatcatatgggtcaggtcattttttttttctgtgctggttgccacatcttagcaagcaccaaaaaactaaagcagtttttaaaccgatatttacgtaaagaaaatcataaaatccaatgcttctgcatactgtgttatgttacagtccagttttgtgtgctttactacacagtttggttacaggacttctgtgcattgtaaacataaacagcatggaaaaggttaaatacctgtgttcagattgtaagatctagtccggacttgctgtgtatattgtaacgttaaatgaaaaaagaacccccctttgtattatagtcatgcggtcttatgtatgataaacagttgaataatttgtcctcaga

SEQ ID NO: 8898 - DNA, 1590 bp, Homo sapiens
  source 1..1590: mol_type = unassigned DNA
atgcatacaggaggagagacttcagcatgcaaaccttcatctgttcggcttgcaccgtcattttcattccatgctgctggccttcagatggctggacagatgccccattcacatcagtacagtgaccgtcgccagccaaacataagtgaccaacaggtttctgccttatcatattctgaccagattcagcaacctctaactaaccaggtgatgcctgatattgtcatgttacagaggcggatgccccaaaccttccgtgacccagcaactgctcccctgagaaaactttctgttgacttgatcaaaacatacaagcatattaatgaggtttactatgcaaaaaagaagcgaagacaccaacagggccagggagacgattctagtcataagaaggaacggaaggtttacaatgatggttatgatgatgataactatgattatattgtaaaaaacggagaaaagtggatggatcgttacgaaattgactccttgataggcaaaggttcctttggacaggttgtaaaggcatatgatcgtgtggagcaagaatgggttgccattaaaataataaagaacaagaaggcttttctgaatcaagcacagatagaagtgcgacttcttgagctcatgaacaaacatgacactgaaatgaaatactacatagtgcatttgaaacgccactttatgtttcgaaaccatctctgtttagtttttgaaatgctgtcctacaacctctatgacttgctgagaaacaccaatttccgaggggtctctttgaacctaacacgaaagtttgcgcaacagatgtgcactgcactgcttttccttgcgactccagaacttagtatcattcactgtgatctaaaacctgaaaatatccttctttgtaaccccaaacgcagtgcaatcaagatagttgactttggcagttcttgtcagttggggcagaggatataccagtatattcagagtcgcttttatcggtctccagaggtgctactgggaatgccttatgaccttgccattgatatgtggtccctcgggtgtattttggttgaaatgcacactggagaacctctgttcagtggtgccaatgaggtagatcagatgaataaaatagtggaagttctgggtattccacctgctcatattcttgaccaagcaccaaaagcaagaaagttctttgagaagttgccagatggcacttggaacttaaagaagaccaaagatggaaaacgggagtacaaaccaccaggaacccgtaaacttcataacattcttggagtggaaacaggaggacctggtgggcgacgtgctggggagtcaggtcatacggtcgctgactacttgaagttcaaagacctcattttaaggatgcttgattatgaccccaaaactcgaattcaaccttattatgctctgcagcacagtttcttcaagaaaacagctgatgaaggtacaaatacaagtaatagtgtatctacaagccccgccatggagcagtctcagtcttcgggcaccacctccagtacatcgtcaagctcaggtgcgtcagcaatttcctgctcctcttggttggtcaggcactga

SEQ ID NO: 8899 - DNA, 2422 bp, Homo sapiens
  source 1..2422: mol_type = unassigned DNA
gttatagttttgccgctggactcttccctcccttcccccaccccatcaggatgatatgagacttgaaagaagacgatgcatacaggaggagagacttcagcatgcaaaccttcatctgttcggcttgcaccgtcattttcattccatgctgctggccttcagatggctggacagatgccccattcacatcagtacagtgaccgtcgccagccaaacataagtgaccaacaggtttctgccttatcatattctgaccagattcagcaacctctaactaaccaggtgatgcctgatattgtcatgttacagaggcggatgccccaaaccttccgtgacccagcaactgctcccctgagaaaactttctgttgacttgatcaaaacatacaagcatattaatgaggtttactatgcaaaaaagaagcgaagacaccaacagggccagggagacgattctagtcataagaaggaacggaaggtttacaatgatggttatgatgatgataactatgattatattgtaaaaaacggagaaaagtggatggatcgttacgaaattgactccttgataggcaaaggttcctttggacaggttgtaaaggcatatgatcgtgtggagcaagaatgggttgccattaaaataataaagaacaagaaggcttttctgaatcaagcacagatagaagtgcgacttcttgagctcatgaacaaacatgacactgaaatgaaatactacatagtgcatttgaaacgccactttatgtttcgaaaccatctctgtttagtttttgaaatgctgtcctacaacctctatgacttgctgagaaacaccaatttccgaggggtctctttgaacctaacacgaaagtttgcgcaacagatgtgcactgcactgcttttccttgcgactccagaacttagtatcattcactgtgatctaaaacctgaaaatatccttctttgtaaccccaaacgcagtgcaatcaagatagttgactttggcagttcttgtcagttggggcagaggatataccagtatattcagagtcgcttttatcggtctccagaggtgctactgggaatgccttatgaccttgccattgatatgtggtccctcgggtgtattttggttgaaatgcacactggagaacctctgttcagtggtgccaatgaggtagatcagatgaataaaatagtggaagttctgggtattccacctgctcatattcttgaccaagcaccaaaagcaagaaagttctttgagaagttgccagatggcacttggaacttaaagaagaccaaagatggaaaacgggagtacaaaccaccaggaacccgtaaacttcataacattcttggagtggaaacaggaggacctggtgggcgacgtgctggggagtcaggtcatacggtcgctgactacttgaagttcaaagacctcattttaaggatgcttgattatgaccccaaaactcgaattcaaccttattatgctctgcagcacagtttcttcaagaaaacagctgatgaaggtacaaatacaagtaatagtgtatctacaagccccgccatggagcagtctcagtcttcgggcaccacctccagtacatcgtcaagctcaggtggctcatcggggacaagcaacagtgggagagcccggtcggatccgacgcaccagcatcggcacagtggtgggcacttcacagctgccgtgcaggccatggactgcgagacacacagtccccaggtgcgtcagcaatttcctgctcctcttggttggtcaggcactgaagctcctacacaggtcactgttgaaactcatcctgttcaagaaacaacctttcatgtagcccctcaacagaatgcattgcatcatcaccatggtaacagttcccatcaccatcaccaccaccaccaccatcaccaccaccatggacaacaagccttgggtaaccggaccaggccaagggtctacaattctccaacgaatagctcctctacccaagattctatggaggttggccacagtcaccactccatgacatccctgtcttcctcaacgacttcttcctcgacatcttcctcctctactggtaaccaaggcaatcaggcctaccagaatcgcccagtggctgctaataccttggactttggacagaatggagctatggacgttaatttgaccgtctactccaatccccgccaagagactggcatagctggacatccaacataccaattttctgctaatacaggtcctgcacattacatgactgaaggacatctgacaatgaggcaaggggctgatagagaagagtcccccatgacaggagtttgtgtgcaacagagtcctgtagctagctcgtgactacattgaaacttgagtttgtttcttgtgtgtttttatagaagtggtgtttttt

SEQ ID NO: 8900 - DNA, 519 bp, Homo sapiens
  source 1..519: mol_type = unassigned DNA
gctgagactcaccggaggaagcggcgcgagcgccccgccatcgtcccgtgttatagttttgccgctggactcttccctcccttcccccaccccatcaggatgatatgagacttgaaagaagacgatgcatacaggaggagagacttcagcatgcaaaccttcatctgttcggcttgcaccgtcattttcattccatgctgctggccttcagatggctggacagatgccccattcacatcagtacagtgaccgtcgccagccaaacataagtgaccaacaggtttctgccttatcatattctgaccagattcagcaacctctaactaaccaggtgatgcctgatattgtcatgttacagaggcggatgccccaaaccttccgtgacccagcaactgctcccctgagaaaactttctgttgacttgatcaaaacatacaagcatattaatgaggtttactatgcaaaaaagaagcgaagacaccaacagggccagggagacgattctagtcataagaagga

SEQ ID NO: 8901 - DNA, 3225 bp, Homo sapiens
  source 1..3225: mol_type = unassigned DNA
aaaaataactcatattgtctctgaggttcttttccagtgaagtgtttagtattgctgctatttggagtacaaagttggagcttttaaagaacctgggagttcaaaagtataaggagaaataaatgaaaagcagaaatattttgaggcaataagtatagactcaaatctatattatgacccacttgtagcaccacttggaattctaccaataagagatttatttgggcaaactataatggttgttggaaattgcaaatcttagtgtgaattattttagtccagttggtttctttctttctcttacctgaaatgaactatactgaggcaataggagctttgtatagtaatttaggagtgtaaaacaacttagggaaaaggattattaagcaggatgattgggatgacatcatgtgaaatttaggaattggaggcattgggaattgagagggtgctaacaaaggaaaacagcttattttagaatttgtctggaggatgtagaattgaagaagttttggtatttcttctgcagcggccccagtgcccttgaccaggaacatctcttggagtcagtagttttcatgaggctgacctaggaacttggccaacatatgcaacattgttctatttaaaatattccttgaattaaattcgatagtatcaatttaaaacataaagttttcactcaactcctttagaagttagattttagcttgtacttgtctttacctcttctgctgattatcagttgacaacactgagattactttcattttcctgtaagtcattatgaatttttctggtcaaccatgagttatcagtggaagcaataagtaggaagtactgtaaaagaattacaataaaataagagaaaccacttggagagcaagagggcttgtggacttgggggagcggttgtgagaaatgtctcagaacttaatttacaaataacattggtagattgacatgttgtctttcctataaagtaactttacctctgtcttaatagtaaactactatgaaagtgaattcgtgttcctcttgatttgtgaactgatgaaaattacaaaatgtggagttttttccccagataaagtaaatggtggaatattcaggtttatttgatacctagaaaatacctgaaattttccgtggtaataggcacattttgaaactgttttttttttctctgacaattgaatatattttatatatagttgattttgattattgaagactaaggaaaatttaagtttgaatgttagaaaatgaattttgcaaatttgaagtaattttattctttatgttttgggattgtagttatgttagatattcctcagttggggtaattgtcttgcatcattatctcttatcataatctgtttttcttcacacagtgttatagttttgccgctggactcttccctcccttcccccaccccatcaggatgatatgagacttgaaagaagacgatgcatacaggaggagagacttcagcatgcaaaccttcatctgttcggcttgcaccgtcattttcattccatgctgctggccttcagatggctggacagatgccccattcacatcagtacagtgaccgtcgccagccaaacataagtgaccaacaggtttctgccttatcatattctgaccagattcagcaacctctaactaaccaggtgatgcctgatattgtcatgttacagaggcggatgccccaaaccttccgtgacccagcaactgctcccctgagaaaactttctgttgacttgatcaaaacatacaagcatattaatgaggtttactatgcaaaaaagaagcgaagacaccaacagggccagggagacgattctagtcataagaaggaacggaaggtttacaatgatggttatgatgatgataactatgattatattgtaaaaaacggagaaaagtggatggatcgttacgaaattgactccttgataggcaaaggttcctttggacaggttgtaaaggcatatgatcgtgtggagcaagaatgggttgccattaaaataataaagaacaagaaggcttttctgaatcaagcacagatagaagtgcgacttcttgagctcatgaacaaacatgacactgaaatgaaatactacatagtgcatttgaaacgccactttatgtttcgaaaccatctctgtttagtttttgaaatgctgtcctacaacctctatgacttgctgagaaacaccaatttccgaggggtctctttgaacctaacacgaaagtttgcgcaacagatgtgcactgcactgcttttccttgcgactccagaacttagtatcattcactgtgatctaaaacctgaaaatatccttctttgtaaccccaaacgcagtgcaatcaagatagttgactttggcagttcttgtcagttggggcagaggatataccagtatattcagagtcgcttttatcggtctccagaggtgctactgggaatgccttatgaccttgccattgatatgtggtccctcgggtgtattttggttgaaatgcacactggagaacctctgttcagtggtgccaatgaggtagatcagatgaataaaatagtggaagttctgggtattccacctgctcatattcttgaccaagcaccaaaagcaagaaagttctttgagaagttgccagatggcacttggaacttaaagaagaccaaagatggaaaacgggagtacaaaccaccaggaacccgtaaacttcataacattcttggagtggaaacaggaggacctggtgggcgacgtgctggggagtcaggtcatacggtcgctgactacttgaagttcaaagacctcattttaaggatgcttgattatgaccccaaaactcgaattcaaccttattatgctctgcagcacagtttcttcaagaaaacagctgatgaaggtacaaatacaagtaatagtgtatctacaagccccgccatggagcagtctcagtcttcgggcaccacctccagtacatcgtcaagctcaggtggctcatcggggacaagcaacagtgggagagcccggtcggatccgacgcaccagcatcggcacagtggtgggcacttcacagctgccgtgcaggccatggactgcgagacacacagtccccaggtgagctcgcacgtggttcatttgcttgtgtcacctgccattctcaggtggagcagcactggatgccaggtgcctttagaatga

SEQ ID NO: 8902 - DNA, 338 bp, Homo sapiens
  source 1..338: mol_type = unassigned DNA
gctgagactcaccggaggaagcggcgcgagcgccccgccatcgtcccggatctcaccctgttgcccaggctggagtgcagtggcatgatcagggctcactgcagccttgacttcctggaatcagtgttatagttttgccgctggactcttccctcccttcccccaccccatcaggatgatatgagacttgaaagaagacgatgcatacaggaggagagacttcagcatgcaaaccttcatctgttcggcttgcaccgtcattttcattccatgctgctggccttcagatggctggacagatgccccattcacatcagtacagtgaccgtcgccagcca

SEQ ID NO: 8903 - DNA, 1735 bp, Homo sapiens
  source 1..1735: mol_type = unassigned DNA
agcagttactttttgcattcatttagtggcacctgcttaaccaggagattaaaagccatccacagaccatgattgtgagtgcatttgaaacgccactttatgtttcgaaaccatctctgtttagtttttgaaatgctgtcctacaacctctatgacttgctgagaaacaccaatttccgaggggtctctttgaacctaacacgaaagtttgcgcaacagatgtgcactgcactgcttttccttgcgactccagaacttagtatcattcactgtgatctaaaacctgaaaatatccttctttgtaaccccaaacgcagtgcaatcaagatagttgactttggcagttcttgtcagttggggcagaggatataccagtatattcagagtcgcttttatcggtctccagaggtgctactgggaatgccttatgaccttgccattgatatgtggtccctcgggtgtattttggttgaaatgcacactggagaacctctgttcagtggtgccaatgaggtagatcagatgaataaaatagtggaagttctgggtattccacctgctcatattcttgaccaagcaccaaaagcaagaaagttctttgagaagttgccagatggcacttggaacttaaagaagaccaaagatggaaaacgggagtacaaaccaccaggaacccgtaaacttcataacattcttggagtggaaacaggaggacctggtgggcgacgtgctggggagtcaggtcatacggtcgctgactacttgaagttcaaagacctcattttaaggatgcttgattatgaccccaaaactcgaattcaaccttattatgctctgcagcacagtttcttcaagaaaacagctgatgaaggtacaaatacaagtaatagtgtatctacaagccccgccatggagcagtctcagtcttcgggcaccacctccagtacatcgtcaagctcaggtggctcatcggggacaagcaacagtgggagagcccggtcggatccgacgcaccagcatcggcacagtggtgggcacttcacagctgccgtgcaggccatggactgcgagacacacagtccccaggtgcgtcagcaatttcctgctcctcttggttggtcaggcactgaagctcctacacaggtcactgttgaaactcatcctgttcaagaaacaacctttcatgtagcccctcaacagaatgcattgcatcatcaccatggtaacagttcccatcaccatcaccaccaccaccaccatcaccaccaccatggacaacaagccttgggtaaccggaccaggccaagggtctacaattctccaacgaatagctcctctacccaagattctatggaggttggccacagtcaccactccatgacatccctgtcttcctcaacgacttcttcctcgacatcttcctcctctactggtaaccaaggcaatcaggcctaccagaatcgcccagtggctgctaataccttggactttggacagaatggagctatggacgttaatttgaccgtctactccaatccccgccaagagactggcatagctggacatccaacataccaattttctgctaatacaggtcctgcacattacatgactgaaggacatctgacaatgaggcaaggggctgatagagaagagtcccccatgacaggagtttgtgtgcaacagagtcctgtagctagctcgtgactacattgaaacttgagtttgtttcttg

SEQ ID NO: 8904 - DNA, 2532 bp, Homo sapiens
  source 1..2532: mol_type = unassigned DNA
gggatgggggcggagtccagggcgtgggggggccggtttgttgtggtcgccattttgctggttgcattactgggtaatcggggccctggcttgccgcgtccgccggataccctcagccagtgggcaggtctgagctcgggctccccgagcagtttgagtccccttgcccgctccttcaggtctcagcggcggtggcagccgaggtgcaggatgcaagaaggcgccccccggccgggctcccgctccaggcctcgctcccctgcggccctctgagcccaccatggccgtcccaccgggccatggtcccttctctggcttcccagggccccaggagcacacgcaggtattgcctgatgtgcggctactgcctcggaggctgcccctggccttccgggatgcaacctcagccccgctgcgtaagctctctgtggacctcatcaagacctacaagcacatcaatgaggtatactatgcgaagaagaagcggcgggcccagcaggcgccaccccaggattcgagcaacaagaaggagaagaaggtcctgaaccatggttatgatgacgacaaccatgactacatcgtgcgcagtggcgagcgctggctggagcgctacgaaattgactcgctcattggcaaaggctcctttggccaggtggtgaaagcctatgatcatcagacccaggagcttgtggccatcaagatcatcaagaacaaaaaggctttcctgaaccaggcccagattgagctgcggctgctggagctgatgaaccagcatgacacggagatgaagtactatatagtacacctgaagcggcacttcatgttccggaaccacctgtgcctggtatttgagctgctgtcctacaacctgtacgacctcctgcgcaacacccacttccgcggcgtctcgctgaacctgacccggaagctggcgcagcagctctgcacggcactgctctttctggccacgcctgagctcagcatcattcactgcgacctcaagcccgaaaacatcttgctgtgcaaccccaagcgcagcgccatcaagattgtggacttcggcagctcctgccagcttggccagaggatctaccagtatatccagagccgcttctaccgctcacctgaggtgctcctgggcacaccctacgacctggccattgacatgtggtccctgggctgcatccttgtggagatgcacaccggagagcccctcttcagtggctccaatgaggtcgaccagatgaaccgcattgtggaggtgctgggcatcccaccggccgccatgctggaccaggcgcccaaggctcgcaagtactttgaacggctgcctgggggtggctggaccctacgaaggacgaaagaactcaggaaggattaccagggccccgggacacggcggctgcaggaggtgctgggcgtgcagacgggcgggcccgggggccggcgggcgggggagccgggccacagccccgccgactacctccgcttccaggacctggtgctgcgcatgctggagtatgagcccgccgcccgcatcagccccctgggggctctgcagcacggcttcttccgccgcacggccgacgaggccaccaacacgggcccggcaggcagcagtgcctccacctcgcccgcgcccctcgacacctgcccctcttccagcaccgccagctccatctccagttctggaggctccagtggctcctccagtgacaaccggacctaccgctacagcaaccgatattgtgggggccctgggccccctatcacagactgtgagatgaacagcccccaggtcccaccctcccagccgctgcggccctgggcagggggtgatgtgccccacaagacacatcaagcccctgcctctgcctcgtcactgcctgggaccggggcccagttacccccccagccccgataccttggtcgtcccccatcaccaacctcaccaccacccccggagctgatggatgtgagcctggtgggcggccctgctgactgctccccacctcacccagcgcctgccccccagcacccggctgcctcagccctccggactcggatgactggaggtcgtccacccctcccgcctcctgatgaccctgccactctggggcctcacctgggcctccgtggtgtaccccagagcacagcagccagctcgtgaccctgccccctccctggggcccctcctgaagccataccctcccccatctgggggccctgggctcccatcctcatctctctccttgactggaattgctgctacccagctggggtgggtgaggcctgcactgattggggcctggggcaggggggtcaaggagagggttttggccgctccctccccactaaggactggacccttgggcccctctccccctttttttctatttattgtaccaaagacagtggtggtccggtggagggaagaccccccctcaccccaggaccctaggagggggtgggggcaggtagggggagatggccttgctcctcctcgctgtacccccagtaaagagctttctc

SEQ ID NO: 8905 - DNA, 2448 bp, Homo sapiens
  source 1..2448: mol_type = unassigned DNA
gggatgggggcggagtccagggcgtgggggggccggtttgttgtggtcgccattttgctggttgcattactgggtaatcggggccctggcttgccgcgtccgccggataccctcagccagtgggcaggtctgagctcgggctccccgagcagtttgagtccccttgcccgctccttcaggtctcagcggcggtggcagccgaggtgcaggatgcaagaaggcgccccccggccgggctcccgctccaggcctcgctcccctgcggccctctgagcccaccatggccgtcccaccgggccatggtcccttctctggcttcccagggccccaggagcacacgcaggtattgcctgatgtgcggctactgcctcggaggctgcccctggccttccgggatgcaacctcagccccgctgcgtaagctctctgtggacctcatcaagacctacaagcacatcaatgaggtatactatgcgaagaagaagcggcgggcccagcaggcgccaccccaggattcgagcaacaagaaggagaagaaggtcctgaaccatggttatgatgacgacaaccatgactacatcgtgcgcagtggcgagcgctggctggagcgctacgaaattgactcgctcattggcaaaggctcctttggccaggtggtgaaagcctatgatcatcagacccaggagcttgtggccatcaagatcatcaagaacaaaaaggctttcctgaaccaggcccagattgagctgcggctgctggagctgatgaaccagcatgacacggagatgaagtactatatagtacacctgaagcggcacttcatgttccggaaccacctgtgcctggtatttgagctgctgtcctacaacctgtacgacctcctgcgcaacacccacttccgcggcgtctcgctgaacctgacccggaagctggcgcagcagctctgcacggcactgctctttctggccacgcctgagctcagcatcattcactgcgacctcaagcccgaaaacatcttgctgtgcaaccccaagcgcagcgccatcaagattgtggacttcggcagctcctgccagcttggccagaggatctaccagtatatccagagccgcttctaccgctcacctgaggtgctcctgggcacaccctacgacctggccattgacatgtggtccctgggctgcatccttgtggagatgcacaccggagagcccctcttcagtggctccaatgaggtcgaccagatgaaccgcattgtggaggtgctgggcatcccaccggccgccatgctggaccaggcgcccaaggctcgcaagtactttgaacggctgcctgggggtggctggaccctacgaaggacgaaagaactcaggaaggattaccagggccccgggacacggcggctgcaggaggacctggtgctgcgcatgctggagtatgagcccgccgcccgcatcagccccctgggggctctgcagcacggcttcttccgccgcacggccgacgaggccaccaacacgggcccggcaggcagcagtgcctccacctcgcccgcgcccctcgacacctgcccctcttccagcaccgccagctccatctccagttctggaggctccagtggctcctccagtgacaaccggacctaccgctacagcaaccgatattgtgggggccctgggccccctatcacagactgtgagatgaacagcccccaggtcccaccctcccagccgctgcggccctgggcagggggtgatgtgccccacaagacacatcaagcccctgcctctgcctcgtcactgcctgggaccggggcccagttacccccccagccccgataccttggtcgtcccccatcaccaacctcaccaccacccccggagctgatggatgtgagcctggtgggcggccctgctgactgctccccacctcacccagcgcctgccccccagcacccggctgcctcagccctccggactcggatgactggaggtcgtccacccctcccgcctcctgatgaccctgccactctggggcctcacctgggcctccgtggtgtaccccagagcacagcagccagctcgtgaccctgccccctccctggggcccctcctgaagccataccctcccccatctgggggccctgggctcccatcctcatctctctccttgactggaattgctgctacccagctggggtgggtgaggcctgcactgattggggcctggggcaggggggtcaaggagagggttttggccgctccctccccactaaggactggacccttgggcccctctccccctttttttctatttattgtaccaaagacagtggtggtccggtggagggaagaccccccctcaccccaggaccctaggagggggtgggggcaggtagggggagatggccttgctcctcctcgctgtacccccagtaaagagctttctc

SEQ ID NO: 8906 - DNA, 2412 bp, Homo sapiens
  source 1..2412: mol_type = unassigned DNA
gggatgggggcggagtccagggcgtgggggggccggtttgttgtggtcgccattttgctggttgcattactgggtaatcggggccctggcttgccgcgtccgccggataccctcagccagtgggcaggtctgagctcgggctccccgagcagtttgagtccccttgcccgctccttcaggtctcagcggcggtggcagccgaggtgcaggatgcaagaaggcgccccccggccgggctcccgctccaggcctcgctcccctgcggccctctgagcccaccatggccgtcccaccgggccatggtcccttctctggcttcccagggccccaggagcacacgcaggtattgcctgatgtgcggctactgcctcggaggctgcccctggccttccgggatgcaacctcagccccgctgcgtaagctctctgtggacctcatcaagacctacaagcacatcaatgaggtatactatgcgaagaagaagcggcgggcccagcaggcgccaccccaggattcgagcaacaagaaggagaagaaggtcctgaaccatggttatgatgacgacaaccatgactacatcgtgcgcagtggcgagcgctggctggagcgctacgaaattgactcgctcattggcaaaggctcctttggccaggtggtgaaagcctatgatcatcagacccaggagcttgtggccatcaagatcatcaagaacaaaaaggctttcctgaaccaggcccagattgagctgcggctgctggagctgatgaaccagcatgacacggagatgaagtactatatagtacacctgaagcggcacttcatgttccggaaccacctgtgcctggtatttgagctgctgtcctacaacctgtacgacctcctgcgcaacacccacttccgcggcgtctcgctgaacctgacccggaagctggcgcagcagctctgcacggcactgctctttctggccacgcctgagctcagcatcattcactgcgacctcaagcccgaaaacatcttgctgtgcaaccccaagcgcagcgccatcaagattgtggacttcggcagctcctgccagcttggccagaggatctaccagtatatccagagccgcttctaccgctcacctgaggtgctcctgggcacaccctacgacctggccattgacatgtggtccctgggctgcatccttgtggagatgcacaccggagagcccctcttcagtggctccaatgaggtcgaccagatgaaccgcattgtggaggtgctgggcatcccaccggccgccatgctggaccaggcgcccaaggctcgcaagtactttgaacggctgcctgggggtggctggaccctacgaaggacgaaagaactcaggaaggacctggtgctgcgcatgctggagtatgagcccgccgcccgcatcagccccctgggggctctgcagcacggcttcttccgccgcacggccgacgaggccaccaacacgggcccggcaggcagcagtgcctccacctcgcccgcgcccctcgacacctgcccctcttccagcaccgccagctccatctccagttctggaggctccagtggctcctccagtgacaaccggacctaccgctacagcaaccgatattgtgggggccctgggccccctatcacagactgtgagatgaacagcccccaggtcccaccctcccagccgctgcggccctgggcagggggtgatgtgccccacaagacacatcaagcccctgcctctgcctcgtcactgcctgggaccggggcccagttacccccccagccccgataccttggtcgtcccccatcaccaacctcaccaccacccccggagctgatggatgtgagcctggtgggcggccctgctgactgctccccacctcacccagcgcctgccccccagcacccggctgcctcagccctccggactcggatgactggaggtcgtccacccctcccgcctcctgatgaccctgccactctggggcctcacctgggcctccgtggtgtaccccagagcacagcagccagctcgtgaccctgccccctccctggggcccctcctgaagccataccctcccccatctgggggccctgggctcccatcctcatctctctccttgactggaattgctgctacccagctggggtgggtgaggcctgcactgattggggcctggggcaggggggtcaaggagagggttttggccgctccctccccactaaggactggacccttgggcccctctccccctttttttctatttattgtaccaaagacagtggtggtccggtggagggaagaccccccctcaccccaggaccctaggagggggtgggggcaggtagggggagatggccttgctcctcctcgctgtacccccagtaaagagctttctc

SEQ ID NO: 8907 - DNA, 566 bp, Homo sapiens
  source 1..566: mol_type = unassigned DNA
ttcctccgtctttctttggaagagggttgtcgctgcccagcggggttggagggggggtctgggtgactttctcccccctgaccctcttttgtctcctcccgcacgtggcttccaggccgaggtggggacagcgccgttcgtcagcttcaggcttccccggggctcggtgcaggggccacccggagcggagtggggactggcccgccctcccccatcgccctgccgcctctccgggccagcaacgctgccgccgcagcccacacgattggcggcagtaagcacacaatgaatgatcacctgcatgtcggcagccacgctcacggacagatccaggttcaacagttgtttgaggataacagtaacaagcggacagtgctcacgacacaaccaaatgggcttacaacagtgggcaaaacgggcttgccagtggtgccagagcggcagctggacagcattcatagacggcaggggagctccacctctctaaagtccatggaaggcatggggaaggtgaaagccacccccatgacacctgaacaagcaatgaagcaatacatgcaaaaact

SEQ ID NO: 8908 - DNA, 8912 bp, Homo sapiens
  source 1..8912: mol_type = unassigned DNA
gtgtgtgagtgcgcgggggcgcgcgcgcgcgggcccgggagaggctcccgagccaggcggtcttcggtcctcgcagcgcttccagctccccgcgcccctatgtgagggagacggggaggcccgcggcgcgcaggggagggcgaggcatgtgcacgggccggagggtgctgcagccgcccgaggaagaggaggacggcggcgaggaggagagcggggggctcgcggcggcgggccccggccgaggggatgcagtggactgtgtgtgtctggctgtagcagacgcgaggcggcgacgaggcgccggggacccgcgcgaggggcggccgggaggcggcggcggcggccgccagaagtagcagcaggaccggcggcggcgacggcagccctgaaatgcattttcctctccagcggccatgttaaccaggaaaccttcggccgccgctcccgccgcctacccgaccggccgaggtggggacagcgccgttcgtcagcttcaggcttccccggggctcggtgcaggggccacccggagcggagtggggactggcccgccctcccccatcgccctgccgcctctccgggccagcaacgctgccgccgcagcccacacgattggcggcagtaagcacacaatgaatgatcacctgcatgtcggcagccacgctcacggacagatccaggttcaacagttgtttgaggataacagtaacaagcggacagtgctcacgacacaaccaaatgggcttacaacagtgggcaaaacgggcttgccagtggtgccagagcggcagctggacagcattcatagacggcaggggagctccacctctctaaagtccatggaaggcatggggaaggtgaaagccacccccatgacacctgaacaagcaatgaagcaatacatgcaaaaactcacagccttcgaacaccatgagattttcagctaccctgaaatatatttcttgggtctaaatgctaagaagcgccagggcatgacaggtgggcccaacaatggtggctatgatgatgaccagggatcatatgtgcaggtgccccacgatcacgtggcttacaggtatgaggtcctcaaggtcattgggaaggggagctttgggcaggtggtcaaggcctacgatcacaaagtccaccagcacgtggccctaaagatggtgcggaatgagaagcgcttccaccggcaagcagcggaggagatccgaatcctggaacacctgcggaagcaggacaaggataacacaatgaatgtcatccatatgctggagaatttcaccttccgcaaccacatctgcatgacgtttgagctgctgagcatgaacctctatgagctcatcaagaagaataaattccagggcttcagtctgcctttggttcgcaagtttgcccactcgattctgcagtgcttggatgctttgcacaaaaacagaataattcactgtgaccttaagcccgagaacattttgttaaagcagcagggtagaagcggtattaaagtaattgattttggctccagttgttacgagcatcagcgtgtctacacgtacatccagtcgcgtttttaccgggctccagaagtgatccttggggccaggtatggcatgcccattgatatgtggagcctgggctgcattttagcagagctcctgacgggttaccccctcttgcctggggaagatgaaggggaccagctggcctgtatgattgaactgttgggcatgccctcacagaaactgctggatgcatccaaacgagccaaaaattttgtgagctccaagggttatccccgttactgcactgtcacgactctctcagatggctctgtggtcctaaacggaggccgttcccggagggggaaactgaggggcccaccggagagcagagagtgggggaacgcgctgaaggggtgtgatgatccccttttccttgacttcttaaaacagtgtttagagtgggatcctgcagtgcgcatgaccccaggccaggctttgcggcacccctggctgaggaggcggttgccaaagcctcccaccggggagaaaacgtcagtgaaaaggataactgagagcaccggtgctatcacatctatatccaagttacctccaccttctagctcagcttccaaactgaggactaatttggcgcagatgacagatgccaatgggaatattcagcagaggacagtgttgccaaaacttgttagctgagctcacgtcccctgatgctggtaacctgaaagatacgacattgctgagccttactgggttgaaaaggagtagctcagacctgtttttatttgctcaataactctactcatttgtatcttttcagcacttaattttaatgtaagaaagttgttcattttgtttttataaaatacatgaggacaatgctttaagtttttatactttcagaaactttttgtgttctaaaagtacaatgagccttactgtatttagtgtggcagaataataacatcagtggcaggccactgattacttcatgactgccacgcatttacagattggtgtcaaagacattcactatgtttttatggttcatgttatatcctccccagggtgacagccccttaaggccctccttttccctccatgctccaggtccatgcacaggtgtagcatgtcctgcttccgtttttcataaattaatctgggtgttgggggtagtgggaggagaacggtcagaatcaaagtgacattctaagaaaaactgtaccttagagattttcctctagtgctcaaacaaatacaaaataagatccccaaggtttaaactgcccagttagcattctgacattctaaaagccggcaaagcagcttttagtggataaatgggaatggaaacgtgtgtgttcctccaaattttctagtatgatcggtgagctgttttgtaaagaagcctcatattacagagttgcttttgcacctaaatttagaattgtattccatgaactgttcctcccttttctctgcttttctcctctctgttcctcttttaataccacacgtctgttgcttgcatttagtttgtcttcttccttcagctgtgtatcccagactgttaatacagaaaagagacatttcagctgtgattatgaccattgtttcatattccaattaaaaaaagaacagcagcctagctacttaaggtggggatttccatagttccaaagaagatttagcagattagagtgagttcacacttttcaggtgccactgtaaggttctctcagcctgggaaactatcaactctttctttaaaaagaaagagggttgaaaatcctctggacgaacagaagtcactttggctgttcagtaaggccaatgttaacaacacgtttagaggaggaaaagttcaacctcaagttaaatggtttgacttattcttcgtatcattagaagaaccccagagatagcattcctctattttattttactttcttttggattgcactgattgtttttgtgggaatgacactttatctggcaaagtaactgagagtttggtaaaagaatattttcttctctgaataataattattttcacagtgaaaatttcagtattttatcactaatgtatgagcaatgatctatatcaatttcaaggcacgtgaaaaaaattttttagtatgtgcaatttaatatagaaagatttctgcctgtttggacaataggttttgggtagtacagattaggataagtaagcttatatatgcacagagattattgtattacctgtaaattgatttacaagtacttaaaagcgtggtccccagtgaggccaagaaagtttccggttaagttctttaataataatcctacagtttatcttaagaaaaaaaaaaaggtttgaaaaaaacactttaatttaggcttcgttggttgatggtggaaaaaaatgctcaggaaatatttcagatatttgccaaaaaaccagtaataaggttaccttattaaaatagtgatatttgctttactatttaaggtgtcactgataaattaatttgtacttctgtgtttagaaattatagcttcttttcccttagtcaaattttttagcatattatacacatttctgtgtaatctgtggaagtgcaataatatgttagtaagttacattttaaataatgctcatgtgacaatactcccaatcaatggcttatagaatttaaagatctgtatattagattttggcttaaaggcatgagaagtataagacttggtttggtggctttgtaagaccaccagcctcttaatgatggttagcttctttaggtcattaaatcaataaaaacatataatgctgttttgctcttctaatgctcctcttccatttccagttatcttcacatttacatttaaatatacaaacctgagcctgccattattaatttccctataaaatgacgatacatgtgaacatttataaatggactaatactgcttgtctttcccccaccgcacaaaactggttcttaagatgccagcaatgaatttgagactatctttatttataaatggaaaccggaaacttttataccaaactataataatgtgcagcactgtagggcttttttttttttccctccaaatacagtgaaatttttttattcacaagagctgccacatctcagcatttagtaatagagctgctttaataaaattctagtttgattgtcatgtcaaaaaaagaaaaatgttgcatctttgtgattttaaaacataaattaatgaaggctctgataggctattaggagttggcttggaaacagtttttggtctcacaggttaccattgtttggggatgtctgagctgttttcagatctaggaatagcacagtgttgtcttgtctttggcagtctcatttggctctgtttcttgcaccaccagcgtgttcattaccacttaaatatattgctacagcagtggaacaacagagtggtgcaagacactgtagattaacggtagaggagaaattgtgcccttagtgttaacaatgtgccttttgttctgaatgccatgttgtagggcatgcattttttggcctctttaactcttcgaattctagtcagtaagaatggaacccatctctgcaaagatacatctgtcttaaatatctagttacaggccttaatagaaaccataaggcatgactcatcttcaggcactgaaaaaagataaccatcaggtagtgttacacaaggacttcctatatttaaggggttaaagatggtctttgttgtatcttaacatcagactgatttttacattttttttttgttatgctaacactagacaaaaatcaactgtatttgtaaaaatttacctcaaaccatttaattttatagtgtgattaatcccagggcatttggtatgaaccaaagtgcattccttttatatgtgcctggctctagtaaggatggccagggatttttacaatttgggtgcaaggcacttaagccacttttaaacttaatgggtggtttggggtcgtgttaaatgactccatcagaatgttagaaaacactttaggcatcagtagcattgggccatattggaatcctaaagtgtgaattattttaaggagagcattcatttttgtaatttttttcatcaaaaatatttctggtaagcagaagactttttaaaaaaactgatctggtctcggtaaaggttttaatattgcccaacataatgctgtaatagcattaaaaaaagtatttgtgaactctgtttcttaggggcttgtacatctctctgctatggacatacataaaattaattgtaattatactcagctcaactgctacagttctgtctaggcagtggcttgggtttttatcgagcaacaacttagacacgtgactgtaatatgctgcaactgtgtgtactgaaaatatgtgaaaatggttgaatgtggactgtgtatatatgtatgtaaaaatttctgtgagatgctgctgtcgccacttaacattaaatatgttctagtggattttaatcctagtggccagttctatgatactgtatgtattatacagctgatgacaggagtaagactgtttagtgaatatctgttaaattttattgttgtggccagagataatttcagaataaaattttaatgtcctaccttacttctctcccctttctaactataatttaactcctgatctatttctggtattatcctttgtcaattagcctggagagggtttagaatgcaaaatggatagctctatatcagggtcttgagaagttaaaataattcattctactagtttgttcatagcaatactttattagttcaatataagtatgcagattccaagtggaaaaacaaaggttttagtaagtagttcttgcttttcccaggatattctattccttcacctgtcagatttttatgttaacttttttatatatagcctctgctgtgttctttattatgctagagcttcatatcttcttttattttaaccttcacaatgatagttaagctgggggagcagaacctgtcaattattccccaccagtcttcattcttttctctgcacaagttctggtaaattattctaatgtgctctaaccagttccacccaatgttttttaatgcttatgagtttgcagtttttgtacttggtggtctctgtggttcacatttttttgtgttgtagtgtctcctgcctcggttggctcagaaaataaggcctaggaactgcaattagctcatgatttgtcaagttcagttagtaccaagctaagagtttacttacagatgacagcaagcagatgctctagtaattcgtcagacattgcagggatattgtgtagtcagatattaccctcttgtggaaagaactacctcacatcattatttatttcccttctgttaccaacagccaaggaattacttagtgtggctccctgcatcaatactgggatatgcttaaacaagggaatgccataagagttcccaattgcctcgtcatagcctgggccatagatttttgttactgctaatcttgcttcttaaagttcacacccagtgcaaaaaacccaatcagcaaactaaccccaaaatccaatatatttagaaatgtaagtgttaagagatgtgcattatgtacaaaattgaaaattggtgctaaagtggcaatgtcaatttaaaatttcttgtccagatctgactgactgactcaggagattatagttcctactcattctctttccttttatcagatctttcaaaagcgctttttaaaattgatcaatgtgcaattctgtttgagtctctacagtcctatcccttttggaatgaacagctacacaaataaatattcttggaacttcgaagttgtcttcaaactagctctagaaaatgtccctagttgacattagtgttggtctgttagaaggggaaattgatttgactgcttcatgttttgaaaagagcattaagagggatttgaggaaggtatatgtggctttctttttttttcttaagtttgaattacacttgatttcctttgggttattaggcagataaacccttgtcattagtaatacttagcactgtccaaaatgaaaaatgactgccagtgtgttgcacatacataagaaaattacatcttactgcgaagtctttggtttgtttccttatttggtttgactttgacttactattttgctatggtcatatccttaatatctgcggtacatttcatatatatatatggggtgggagcataattgccattcccatgtgtctcaaggaagcttaatgaggaaactaatgagttaatattaactcttctgaagaaagctgacattttaggagtattaagtcatctgtcgttaaggagcagcaagaatatattatgattgtatcacatgttccagaagagcattaccccttacatagaaagctccttggagatttcatgatgttggatgaacatcagtttatccttatacatccctatgagctataattatcctcatttgatacttgaggaaactgaagtgacttgctccaaagttgactacaaaaacattgcagtttgaggcttaggttgtaatcaggtaattttggtcttggacagtaagggaaaatccataatacataaaacacaaaagtttagaaagggggggaagttgagctagcaatgggcatttctattatttaagttacatatcagtttccaggaatatttttcaaatgggacaaactaaaaagttgaggactagagcatcgtagtgtctaagtgcacctaataacttaatgcatgtgcacacaccctcagttaatttgtaagagagtgacttctcattgttatttgtggagaggctaattatagtagcttcattctttattttctgtgttcttaaatttttttttacatttgaaagtatgaaaatactatttttgacactttactgatactcagggattaaaagttaaattttactgactgtagcagcaggtaaatctcttaaatttactcaggtttcctatcctttgcctccatatttaagaaaatatagaatgcctgccagggaaatatataaaaataaaaatttcaaatacaattttaaaataccaatttgtaaataaaccaattttacaaactaaaatattgtgtctttccttgctttttatcccaatttatctcccctcctaagtttgaggagttttatatattaaggctatttcttcatttgtaaaaatgaagtatgctatttgcaaagcaaaagcccatgaaaagccccaaatcatttaagtaaagcttactgaattgttttcaattgttttgggagaaatgtaactaattataagcaatttatgtggaccagcagcaaataaatgtatgagtaca

SEQ ID NO: 8909 - DNA, 2209 bp, Homo sapiens
  source 1..2209: mol_type = unassigned DNA
cggtcttcggtcctcgcagcgcttccagctccccgcgcccctatgtgagggagacggggaggcccgcggcgcgcaggggagggcgaggcatgtgcacgggccggagggtgctgcagccgcccgaggaagaggaggacggcggcgaggaggagagcggggggctcgcggcggcgggccccggccgaggggatgcagtggactgtgtgtgtctggctgtagcagacgcgaggcggcgacgaggcgccggggacccgcgcgaggggcggccgggaggcggcggcggcggccgccagaagtagcagcaggaccggcggcggcgacggcagccctgaaatgcattttcctctccagcggccatgttaaccaggaaaccttcggccgccgctcccgccgcctacccgaccgattggcggcagtaagcacacaatgaatgatcacctgcatgtcggcagccacgctcacggacagatccaggttcaacagttgtttgaggataacagtaacaagcggacagtgctcacgacacaaccaaatgggcttacaacagtgggcaaaacgggcttgccagtggtgccagagcggcagctggacagcattcatagacggcaggggagctccacctctctaaagtccatggaaggcatggggaaggtgaaagccacccccatgacacctgaacaagcaatgaagcaatacatgcaaaaactcacagccttcgaacaccatgagattttcagctaccctgaaatatatttcttgggtctaaatgctaagaagcgccagggcatgacaggtgggcccaacaatggtggctatgatgatgaccagggatcatatgtgcaggtgccccacgatcacgtggcttacaggtatgaggtcctcaaggtcattgggaaggggagctttgggcaggtggtcaaggcctacgatcacaaagtccaccagcacgtggccctaaagatggtgcggaatgagaagcgcttccaccggcaagcagcggaggagatccgaatcctggaacacctgcggaagcaggacaaggataacacaatgaatgtcatccatatgctggagaatttcaccttccgcaaccacatctgcatgacgtttgagctgctgagcatgaacctctatgagctcatcaagaagaataaattccagggcttcagtctgcctttggttcgcaagtttgcccactcgattctgcagtgcttggatgctttgcacaaaaacagaataattcactgtgaccttaagcccgagaacattttgttaaagcagcagggtagaagcggtattaaagtaattgattttggctccagttgttacgagcatcagcgtgtctacacgtacatccagtcgcgtttttaccgggctccagaagtgatccttggggccaggtatggcatgcccattgatatgtggagcctgggctgcattttagcagagctcctgacgggttaccccctcttgcctggggaagatgaaggggaccagctggcctgtatgattgaactgttgggcatgccctcacagaaactgctggatgcatccaaacgagccaaaaattttgtgagctccaagggttatccccgttactgcactgtcacgactctctcagatggctctgtggtcctaaacggaggccgttcccggagggggaaactgaggggcccaccggagagcagagagtgggggaacgcgctgaaggggtgtgatgatccccttttccttgacttcttaaaacagtgtttagagtgggatcctgcagtgcgcatgaccccaggccaggctttgcggcacccctggctgaggaggcggttgccaaagcctcccaccggggagaaaacgtcagtgaaaaggataactgagagcaccggtgctatcacatctatatccaagttacctccaccttctagctcagcttccaaactgaggactaatttggcgcagatgacagatgccaatgggaatattcagcagaggacagtgttgccaaaacttgttagctgagctcacgtcccctgatgctggtaacctgaaagatacgacattgctgagccttactgggttgaaaaggagtagctcagacctgtttttatttgctcaataactctactcatttgtatcttttcagcacttaattttaatgtaagaaagttgttcattttgtttttataaaatacatgaggacaatgctttaagtttt

SEQ ID NO: 8910 - DNA, 568 bp, Homo sapiens
  source 1..568: mol_type = unassigned DNA
gaaaatgcatttatgtttaggggtgcgcatggcaggggaggggtctctgcggcgctttcggccggagggcagcagcgattggcggcagtaagcacacaatgaatgatcacctgcatgtcggcagccacgctcacggacagatccaggttcaacagttgtttgaggataacagtaacaagcggacagtgctcacgacacaaccaaatgggcttacaacagtgggcaaaacgggcttgccagtggtgccagagcggcagctggacagcattcatagacggcaggggagctccacctctctaaagtccatggaaggcatggggaaggtgaaagccacccccatgacacctgaacaagcaatgaagcaatacatgcaaaaactcacagccttcgaacaccatgagattttcagctaccctgaaatatatttcttgggtctaaatgctaagaagcgccagggcatgacaggtgggcccaacaatggtggctatgatgatgaccagggatcatatgtgcaggtgccccacgatcacgtggcttacaggtatgaggtcctcaaggtcattgggaa

SEQ ID NO: 8911 - DNA, 2329 bp, Homo sapiens
  source 1..2329: mol_type = unassigned DNA
ggcgctggcaagcgaagcttgggggtggggaggaggtagagtgagccctcagtaggagggacgagggcaggggtctgactgcctccccgggaccgcccccacctcctctctatcagggccccctccccccatccctgtctcaccgggcgcgggggacggggctagagcggagttagagcaagaagaatttccacccctggattccctctgaaaccctagatcggggtatatgttaagggattacgaaaatctaggactttttgtggggctttttattaaagggggggagcccgggagcaataccttggaaagaagccctgttgcttagagcggataaccaacggctgaactcttggggtttgctgtgaggggtgcggtctagcttcgaatgtacagtggtggagccacagtgttaaagaacagagaagtgatccttaatcatttagaattttgcctccaccatccaccagaaaatgaagtggaaagagaagttgggggatggtgtctatgacaccttcatgatgatagatgaaaccaaatgtcccccctgttcaaatgtactctgcaatccttctgaaccacctccacccagaagactaaatatgaccactgagcagtttacaggagatcatactcagcactttttggatggaggtgagatgaaggtagaacagctgtttcaagaatttggcaacagaaaatccaatactattcagtcagatggcatcagtgactctgaaaaatgctctcctactgtttctcagggtaaaagttcagattgcttgaatacagtaaaatccaacagttcatccaaggcacccaaagtggtgcctctgactccagaacaagccctgaagcaatataaacaccacctcactgcctatgagaaactggaaataattaattatccagaaatttactttgtaggtccaaatgccaagaaaagacatggagttattggtggtcccaataatggagggtatgatgatgcagatggggcctatattcatgtacctcgagaccatctagcttatcgatatgaggtgctgaaaattattggcaaggggagttttgggcaggtggccagggtctatgatcacaaacttcgacagtacgtggccctaaaaatggtgcgcaatgagaagcgctttcatcgtcaagcagctgaggagatccggattttggagcatcttaagaaacaggataaaactggtagtatgaacgttatccacatgctggaaagtttcacattccggaaccatgtttgcatggcctttgaattgctgagcatagacctttatgagctgattaaaaaaaataagtttcagggttttagcgtccagttggtacgcaagtttgcccagtccatcttgcaatctttggatgccctccacaaaaataagattattcactgcgatctgaagccagaaaacattctcctgaaacaccacgggcgcagttcaaccaaggtcattgactttgggtccagctgtttcgagtaccagaagctctacacatatatccagtctcggttctacagagctccagaaatcatcttaggaagccgctacagcacaccaattgacatatggagttttggctgcatccttgcagaacttttaacaggacagcctctcttccctggagaggatgaaggagaccagttggcctgcatgatggagcttctagggatgccaccaccaaaacttctggagcaatccaaacgtgccaagtactttattaattccaagggcataccccgctactgctctgtgactacccaggcagatgggagggttgtgcttgtggggggtcgctcacgtaggggtaaaaagcggggtcccccaggcagcaaagactgggggacagcactgaaagggtgtgatgactacttgtttatagagttcttgaaaaggtgtcttcactgggacccctctgcccgcttgaccccagctcaagcattaagacacccttggattagcaagtctgtccccagacctctcaccaccatagacaaggtgtcagggaaacgggtagttaatcctgcaagtgctttccagggattgggttctaagctgcctccagttgttggaatagccaataagcttaaagctaacttaatgtcagaaaccaatggtagtatacccctatgcagtgtattgccaaaactgattagctagtggacagagatatgcccagagatgcatatgtgtatatttttatgatcttacaaacctgcaaatggaaaaaatgcaagcccattggtggatgtttttgttagagtagactttttttaaacaagacaaaacatttttatatgattataaaa

SEQ ID NO: 8912 - DNA, 2218 bp, Homo sapiens
  source 1..2218: mol_type = unassigned DNA
gcagtgtctggtcgagagtacccgtgggagcgtcgcgccgcggaggcagccgtcccggcgtaggtggcgtggccgaccggacccccaactggcgcctctccccgcgcggggtcccgagctaggagatgggaggcacagctcgtgggcctgggcggaaggatgcggggccgcctggggccgggctcccgccccagcagcggagtggtggagccacagtgttaaagaacagagaagtgatccttaatcatttagaattttgcctccaccatccaccagaaaatgaagtggaaagagaagttgggggatggtgtctatgacaccttcatgatgatagatgaaaccaaatgtcccccctgttcaaatgtactctgcaatccttctgaaccacctccacccagaagactaaatatgaccactgagcagtttacaggagatcatactcagcactttttggatggaggtgagatgaaggtagaacagctgtttcaagaatttggcaacagaaaatccaatactattcagtcagatggcatcagtgactctgaaaaatgctctcctactgtttctcagggtaaaagttcagattgcttgaatacagtaaaatccaacagttcatccaaggcacccaaagtggtgcctctgactccagaacaagccctgaagcaatataaacaccacctcactgcctatgagaaactggaaataattaattatccagaaatttactttgtaggtccaaatgccaagaaaagacatggagttattggtggtcccaataatggagggtatgatgatgcagatggggcctatattcatgtacctcgagaccatctagcttatcgatatgaggtgctgaaaattattggcaaggggagttttgggcaggtggccagggtctatgatcacaaacttcgacagtacgtggccctaaaaatggtgcgcaatgagaagcgctttcatcgtcaagcagctgaggagatccggattttggagcatcttaagaaacaggataaaactggtagtatgaacgttatccacatgctggaaagtttcacattccggaaccatgtttgcatggcctttgaattgctgagcatagacctttatgagctgattaaaaaaaataagtttcagggttttagcgtccagttggtacgcaagtttgcccagtccatcttgcaatctttggatgccctccacaaaaataagattattcactgcgatctgaagccagaaaacattctcctgaaacaccacgggcgcagttcaaccaaggtcattgactttgggtccagctgtttcgagtaccagaagctctacacatatatccagtctcggttctacagagctccagaaatcatcttaggaagccgctacagcacaccaattgacatatggagttttggctgcatccttgcagaacttttaacaggacagcctctcttccctggagaggatgaaggagaccagttggcctgcatgatggagcttctagggatgccaccaccaaaacttctggagcaatccaaacgtgccaagtactttattaattccaagggcataccccgctactgctctgtgactacccaggcagatgggagggttgtgcttgtggggggtcgctcacgtaggggtaaaaagcggggtcccccaggcagcaaagactgggggacagcactgaaagggtgtgatgactacttgtttatagagttcttgaaaaggtgtcttcactgggacccctctgcccgcttgaccccagctcaagcattaagacacccttggattagcaagtctgtccccagacctctcaccaccatagacaaggtgtcagggaaacgggtagttaatcctgcaagtgctttccagggattgggttctaagctgcctccagttgttggaatagccaataagcttaaagctaacttaatgtcagaaaccaatggtagtatacccctatgcagtgtattgccaaaactgattagctagtggacagagatatgcccagagatgcatatgtgtatatttttatgatcttacaaacctgcaaatggaaaaaatgcaagcccattggtggatgtttttgttagagtagactttttttaaacaagacaaaacatttttatatgattataaaagaattcttcaagggctaattacctaaccagcttgtattggccatctggaatatgcattaaatgactttttataggtcaatgca

SEQ ID NO: 8913 - DNA, 2163 bp, Homo sapiens
  source 1..2163: mol_type = unassigned DNA
acttcccagccggggccagtcgggagcgaaagtgcgctgagctgcagtgtctggtcgagagtacccgtgggagcgtcgcgccgcggaggcagccgtcccggcgtaggtggcgtggccgaccggacccccaactggcgcctctccccgcgcggggtcccgagctaggagatgggaggcacagctcgtgggcctgggcggaaggatgcggggccgcctggggccgggctcccgccccagcagcggaggttgggggatggtgtctatgacaccttcatgatgatagatgaaaccaaatgtcccccctgttcaaatgtactctgcaatccttctgaaccacctccacccagaagactaaatatgaccactgagcagtttacaggagatcatactcagcactttttggatggaggtgagatgaaggtagaacagctgtttcaagaatttggcaacagaaaatccaatactattcagtcagatggcatcagtgactctgaaaaatgctctcctactgtttctcagggtaaaagttcagattgcttgaatacagtaaaatccaacagttcatccaaggcacccaaagtggtgcctctgactccagaacaagccctgaagcaatataaacaccacctcactgcctatgagaaactggaaataattaattatccagaaatttactttgtaggtccaaatgccaagaaaagacatggagttattggtggtcccaataatggagggtatgatgatgcagatggggcctatattcatgtacctcgagaccatctagcttatcgatatgaggtgctgaaaattattggcaaggggagttttgggcaggtggccagggtctatgatcacaaacttcgacagtacgtggccctaaaaatggtgcgcaatgagaagcgctttcatcgtcaagcagctgaggagatccggattttggagcatcttaagaaacaggataaaactggtagtatgaacgttatccacatgctggaaagtttcacattccggaaccatgtttgcatggcctttgaattgctgagcatagacctttatgagctgattaaaaaaaataagtttcagggttttagcgtccagttggtacgcaagtttgcccagtccatcttgcaatctttggatgccctccacaaaaataagattattcactgcgatctgaagccagaaaacattctcctgaaacaccacgggcgcagttcaaccaaggtcattgactttgggtccagctgtttcgagtaccagaagctctacacatatatccagtctcggttctacagagctccagaaatcatcttaggaagccgctacagcacaccaattgacatatggagttttggctgcatccttgcagaacttttaacaggacagcctctcttccctggagaggatgaaggagaccagttggcctgcatgatggagcttctagggatgccaccaccaaaacttctggagcaatccaaacgtgccaagtactttattaattccaagggcataccccgctactgctctgtgactacccaggcagatgggagggttgtgcttgtggggggtcgctcacgtaggggtaaaaagcggggtcccccaggcagcaaagactgggggacagcactgaaagggtgtgatgactacttgtttatagagttcttgaaaaggtgtcttcactgggacccctctgcccgcttgaccccagctcaagcattaagacacccttggattagcaagtctgtccccagacctctcaccaccatagacaaggtgtcagggaaacgggtagttaatcctgcaagtgctttccagggattgggttctaagctgcctccagttgttggaatagccaataagcttaaagctaacttaatgtcagaaaccaatggtagtatacccctatgcagtgtattgccaaaactgattagctagtggacagagatatgcccagagatgcatatgtgtatatttttatgatcttacaaacctgcaaatggaaaaaatgcaagcccattggtggatgtttttgttagagtagactttttttaaacaagacaaaacatttttatatgattataaaagaattcttcaagggctaattacctaaccagcttgtattggccatctggaatatgcattaaatgactttttataggtcaa

SEQ ID NO: 8914 - DNA, 870 bp, Homo sapiens
  source 1..870: mol_type = unassigned DNA
agcggaggtaacggcgccacggggtaacgggctggaggcgccacagggagcggctggcgctgtggtggagccacagtgttaaagaacagagaagtgatccttaatcatttagaattttgcctccaccatccaccagaaaatgaagtggaaagagaagttgggggatggtgtctatgacaccttcatgatgatagatgaaaccaaatgtcccccctgttcaaatgtactctgcaatccttctgaaccacctccacccagaagactaaatatgaccactgagcagtttacaggagatcatactcagcactttttggatggaggtgagatgaaggtagaacagctgtttcaagaatttggcaacagaaaatccaatactattcagtcagatggcatcagtgactctgaaaaatgctctcctactgtttctcagggtaaaagttcagattgcttgaatacagtaaaatccaacagttcatccaaggcacccaaagtggtgcctctgactccagaacaagccctgaagcaatataaacaccacctcactgcctatgagaaactggaaataattaattatccagaaatttactttgtaggtccaaatgccaagaaaagacatggagttattggtggtcccaataatggagggtatgatgatgcagatggggcctatattcatgtacctcgagaccatctagcttatcgatatgaggtgctgaaaattattggcaaggggagttttgggcaggtggccagggtctatgatcacaaacttcgacagtacgtggccctaaaaatggtgcgcaatgagaagcgctttcatcgtcaagcagctgaggagatccggattttggagcatcttaagaaacagga

SEQ ID NO: 8915 - DNA, 1816 bp, Homo sapiens
  source 1..1816: mol_type = unassigned DNA
ccttctacagaacaccagtgttacttcactcccctttgtggacaccaaggggaagaagaatacggtaagcttcccacacattagcaagaaagtcctgctgaagtcatccctgctgtatcaggagaatcaagctcacaatcagatgccggcctcagagctcaaggcttcagaaatacctttccaccctagcattaaaacccaggatcccaaggcagaggagaagtcaccaaagaagcaaaaggtgactctgacagcggcagaggccctaaagctttttaagaaccagctgtctccatatgaacaaagtgaaatcctgggctacgcggagctgtggttcctgggtcttgaagccaagaagctcgacacggctcctgagaaatttagcaagacgagttttgatgatgagcatggcttctatctgaaggtcctgcatgatcacattgcctaccgctatgaagttctggagacaatcgggaaggggtcctttggacaggtggccaagtgcttggatcacaaaaacaatgagctggtggccctgaaaatcatcaggaacaagaagaggtttcaccagcaggccctgatggagctgaagatcctggaagctctcagaaagaaggacaaagacaacacctacaatgtggtgcatatgaaggactttttctactttcgcaatcacttctgcatcacctttgagctcctgggaatcaacttgtatgagttgatgaagaataacaactttcaaggcttcagtctgtccatagttcggcgcttcactctctctgttttgaagtgcttgcagatgctttcggtagagaaaatcattcactgtgatctcaagcccgaaaatatagtgctataccaaaagggccaagcctctgttaaagtcattgactttggatcaagctgttatgaacaccagaaagtatacacgtacatccaaagccggttctaccgatccccagaagtgatcctgggccacccctacgacgtggccattgacatgtggagcctgggctgcatcacggcggagttgtacacgggctaccccctgttccccggggagaatgaggtggagcagctggcctgcatcatggaggtgctgggtctgccgccagccggcttcattcagacagcctccaggagacagacattctttgattccaaaggttttcctaaaaatataaccaacaacagggggaaaaaaagatacccagattccaaggacctcacgatggtgctgaaaacctatgacaccagcttcctggactttctcagaaggtgtttggtatgggaaccttctcttcgcatgaccccggaccaggccctcaagcatgcttggattcatcagtctcggaacctcaagccacagcccaggccccagaccctgaggaaatccaattcctttttcccctctgagacaaggaaggacaaggttcaaggctgtcatcactcgagcagaaaagcagatgagatcaccaaagagactacagagaaaacaaaagatagccccacgaagcatgttcagcattcaggtgatcagcaggactgtctccagcacggagctgacactgttcagctgcctcaactggtagacgctcccaagaagtcagaggcagctgtcggggcggaggtgtccatgacctccccaggacagagcaaaaacttctccctcaagaacacaaacgttttaccccctattgtatgacctttgctgagggtatgtcctgctcctttccaccagtgatttgtattaagacagcacttatattgtacaatacttcagactgttttttttaaatacataaaactttatgtt

SEQ ID NO: 8916 - DNA, 1794 bp, Homo sapiens
  source 1..1794: mol_type = unassigned DNA
agtgtgagctgttgaaagcctgcagctaaacaccagtgttacttcactcccctttgtggacaccaaggggaagaagaatacggtaagcttcccacacattagcaagaaagtcctgctgaagtcatccctgctgtatcaggagaatcaagctcacaatcagatgccggcctcagagctcaaggcttcagaaatacctttccaccctagcattaaaacccaggatcccaaggcagaggagaagtcaccaaagaagcaaaaggtgactctgacagcggcagaggccctaaagctttttaagaaccagctgtctccatatgaacaaagtgaaatcctgggctacgcggagctgtggttcctgggtcttgaagccaagaagctcgacacggctcctgagaaatttagcaagacgagttttgatgatgagcatggcttctatctgaaggtcctgcatgatcacattgcctaccgctatgaagttctggagacaatcgggaaggggtcctttggacaggtggccaagtgcttggatcacaaaaacaatgagctggtggccctgaaaatcatcaggaacaagaagaggtttcaccagcaggccctgatggagctgaagatcctggaagctctcagaaagaaggacaaagacaacacctacaatgtggtgcatatgaaggactttttctactttcgcaatcacttctgcatcacctttgagctcctgggaatcaacttgtatgagttgatgaagaataacaactttcaaggcttcagtctgtccatagttcggcgcttcactctctctgttttgaagtgcttgcagatgctttcggtagagaaaatcattcactgtgatctcaagcccgaaaatatagtgctataccaaaagggccaagcctctgttaaagtcattgactttggatcaagctgttatgaacaccagaaagtatacacgtacatccaaagccggttctaccgatccccagaagtgatcctgggccacccctacgacgtggccattgacatgtggagcctgggctgcatcacggcggagttgtacacgggctaccccctgttccccggggagaatgaggtggagcagctggcctgcatcatggaggtgctgggtctgccgccagccggcttcattcagacagcctccaggagacagacattctttgattccaaaggttttcctaaaaatataaccaacaacagggggaaaaaaagatacccagattccaaggacctcacgatggtgctgaaaacctatgacaccagcttcctggactttctcagaaggtgtttggtatgggaaccttctcttcgcatgaccccggaccaggccctcaagcatgcttggattcatcagtctcggaacctcaagccacagcccaggccccagaccctgaggaaatccaattcctttttcccctctgagacaaggaaggacaaggttcaaggctgtcatcactcgagcagaaaagcagatgagatcaccaaagagactacagagaaaacaaaagatagccccacgaagcatgttcagcattcaggtgatcagcaggactgtctccagcacggagctgacactgttcagctgcctcaactggtagacgctcccaagaagtcagaggcagctgtcggggcggaggtgtccatgacctccccaggacagagcaaaaacttctccctcaagaacacaaacgttttaccccctattgtatgacctttgctgagggtatgtcctgctcctttccaccagtgatttgtattaagacagcacttatattgtacaat

SEQ ID NO: 8917 - DNA, 1747 bp, Homo sapiens
  source 1..1747: mol_type = unassigned DNA
cacattagcaagaaagtcctgctgaagtcatccctgctgtatcaggagaatcaagctcacaatcagatgccggcctcagagctcaaggcttcagaaatacctttccaccctagcattaaaacccaggatcccaaggcagaggagaagtcaccaaagaagcaaaaggtgactctgacagcggcagaggccctaaagctttttaagaaccagctgtctccatatgaacaaagtgaaatcctgggctacgcggagctgtggttcctgggtcttgaagccaagaagctcgacacggctcctgagaaatttagcaagacgagttttgatgatgagcatggcttctatctgaaggtcctgcatgatcacattgcctaccgctatgaagttctggagacaatcgggaaggggtcctttggacaggtggccaagtgcttggatcacaaaaacaatgagctggtggccctgaaaatcatcaggaacaagaagaggtttcaccagcaggccctgatggagctgaagatcctggaagctctcagaaagaaggacaaagacaacacctacaatgtggtgcatatgaaggactttttctactttcgcaatcacttctgcatcacctttgagctcctgggaatcaacttgtatgagttgatgaagaataacaactttcaaggcttcagtctgtccatagttcggcgcttcactctctctgttttgaagtgcttgcagatgctttcggtagagaaaatcattcactgtgatctcaagcccgaaaatatagtgctataccaaaagggccaagcctctgttaaagtcattgactttggatcaagctgttatgaacaccagaaagtatacacgtacatccaaagccggttctaccgatccccagaagtgatcctgggccacccctacgacgtggccattgacatgtggagcctgggctgcatcacggcggagttgtacacgggctaccccctgttccccggggagaatgaggtggagcagctggcctgcatcatggaggtgctgggtctgccgccagccggcttcattcagacagcctccaggagacagacattctttgattccaaaggttttcctaaaaatataaccaacaacagggggaaaaaaagatacccagattccaaggacctcacgatggtgctgaaaacctatgacaccagcttcctggactttctcagaaggtgtttggtatgggaaccttctcttcgcatgaccccggaccaggccctcaagcatgcttggattcatcagtctcggaacctcaagccacagcccaggccccagaccctgaggaaatccaattcctttttcccctctgagacaaggaaggacaaggttcaaggctgtcatcactcgagcagaaaagatgagatcaccaaagagactacagagaaaacaaaagatagccccacgaagcatgttcagcattcaggtgatcagcaggactgtctccagcacggagctgacactgttcagctgcctcaactggtagacgctcccaagaagtcagaggcagctgtcggggcggaggtgtccatgacctccccaggacagagcaaaaacttctccctcaagaacacaaacgttttaccccctattgtatgacctttgctgagggtatgtcctgctcctttccaccagtgatttgtattaagacagcacttatattgtacaatacttcagactgttttttttaaatacataaaactttatgttaaaaaactct

SEQ ID NO: 8918 - DNA, 1056 bp, Homo sapiens
  source 1..1056: mol_type = unassigned DNA
attgacatgtggagcctgggctgcatcacggcggagttgtacacgggctaccccctgttccccggggagaatgaggtggagcagctggcctgcatcatggagattccaaaggttttcctaaaaatataaccaacaacagggggaaaaaaagatacccagattccaaggacctcacgatggtgctgaaaacctatgacaccagcttcctggactttctcagaaggtgtttggtatgggaaccttctcttcgcatgaccccggaccaggccctcaagcatgcttggattcatcagtctcggaacctcaagccacagcccaggccccagaccctgaggaaatccaattcctttttcccctctgagacaaggaaggacaaggttcaaggctgtcatcactcgagcagaaaagcagatgagatcaccaaagagactacagagaaaacaaaagatagccccacgaagcatgttcagcattcaggtgatcagcaggactgtctccagcacggagctgacactgttcagctgcctcaactggtagacgctcccaagaagtcagaggcagctgtcggggcggaggtgtccatgacctccccaggacagagcaaaaacttctccctcaagaacacaaacgttttaccccctattgtatgacctttgctgagggtatgtcctgctcctttccaccagtgatttgtattaagacagcacttatattgtacaatacttcagactgttttttttaaatacataaaactttatgttaaaaaactctattaacatggccaattggcatgactcctcttatgagggatgggggaggatgtccttgcacttaaactcattccatatgcatctgtgtgtgtagagggggcgggtagttttgaactctcagtgttacagcatcattaatggaactccaaacaaaagaaattttttttcttcttgcccatgactgccaacctatgtcaggatttttgtttgaaaatgatagaagctgaattcaaaagcagtttaaacaacggaagacacttattgacttacataattggggcatcag

SEQ ID NO: 8919 - DNA, 2006 bp, Homo sapiens
  source 1..2006: mol_type = unassigned DNA
cccccagtagaaatatgaatagaaatcaccctgtgggcaatggtcccattttaaaatatgctgtcccattgtcccctagagcctactttaacttgtcagaccatgtattccacttcatatgcaagaggcatgcactgagcccataggtggctaggcaaacacccaatagctccctgaaatggcttcattatgcagcctcgacagccaccccaaccctcccactctcacactgaaacacccagacctagagatagctagacacacccagacacccgccaagcccctcacatacagatatgtgcacaatgatacacagcaaacgtacacagagttcagtacacacaaagagctcacgcccacgtgcacacacccctcagttgggacagagttgaccaccaccacctttctcccaaacacatggcttttgaactgcctttccttggatccagttcaaggggatggaggagcagtgagagtcagccgcccttccactccaatttcccagcacctcccttatctctgcctcacaagtcacccagcccccctctcttccttccttgtgcttgaagaatctctccttgctggaaagccccctgttttctcaatctccctttccacttcggtaaaatctctacttgctggaaagccccctgttttctcaatctccctttccacttcggtaaaatgcccactttctggtccccacctttttcctgagtgtagtcccaaccagccaaatccaacctcaaaacaggaagacccaaggccagtgacccccataggcctgaggcttgtgcaggcagtgggcgtggggtaaggcttcctgatgccccctgtccctgcccagaacctgatggccctcattagtccttggctcttatcttggaagcacaggcgctgacagccgtcccagcccttctgtctgcgggcctgaaccaaacggtgccatggggaactgtctgcacagggcggagctctccccctcaactgagaactcaagtcagctggacttcgaagatgtatggaattcttcctatggtgtgaatgattccttcccagatggagactatggtgccaacctggaagcagctgccccctgccactcctgtaacctgctggatgactctgcactgcccttcttcatcctcaccagtgtcctgggtatcctagctagcagcactgtcctcttcatgcttttcagacctctcttccgctggcagctctgccctggctggcctgtcctggcacagctggctgtgggcagtgccctcttcagcattgtggtgcccgtcttggccccagggctaggtagcactcgcagctctgccctgtgtagcctgggctactgtgtctggtatggctcagcctttgcccaggctttgctgctagggtgccatgcctccctgggccacagactgggtgcaggccaggtcccaggcctcaccctggggctcactgtgggaatttggggagtggctgccctactgacactgcctgtcaccctggccagtggtgcttctggtggactctgcaccctgatatacagcacggagctgaaggctttgcaggccacacacactgtagcctgtcttgccatctttgtcttgttgccattgggtttgtttggagccaaggggctgaagaaggcattgggtatggggccaggcccctggatgaatatcctgtgggcctggtttattttctggtggcctcatggggtggttctaggactggatttcctggtgaggtccaagctgttgctgttgtcaacatgtctggcccagcaggctctggacctgctgctgaacctggcagaagccctggcaattttgcactgtgtggctacgcccctgctcctcgccctattctgccaccaggccacccgcaccctcttgccctctctgcccctccctgaaggatggtcttctcatctggacacccttggaagcaaatcctagttctcttcccacctgtcaacctgaattaaagtctacactgcctttgtg

SEQ ID NO: 8920 - DNA, 1088 bp, Homo sapiens
  source 1..1088: mol_type = unassigned DNA
gagactcttccggtgtaactctgatggcctcctctgggtatgtcctccaggcggagctctccccctcaactgagaactcaagtcagctggacttcgaagatgtatggaattcttcctatggtgtgaatgattccttcccagatggagactatggtgccaacctggaagcagctgccccctgccactcctgtaacctgctggatgactctgcactgcccttcttcatcctcaccagtgtcctgggtatcctagctagcagcactgtcctcttcatgcttttcagacctctcttccgctggcagctctgccctggctggcctgtcctggcacagctggctgtgggcagtgccctcttcagcattgtggtgcccgtcttggccccagggctaggtagcactcgcagctctgccctgtgtagcctgggctactgtgtctggtatggctcagcctttgcccaggctttgctgctagggtgccatgcctccctgggccacagactgggtgcaggccaggtcccaggcctcaccctggggctcactgtgggaatttggggagtggctgccctactgacactgcctgtcaccctggccagtggtgcttctggtggactctgcaccctgatatacagcacggagctgaaggctttgcaggccacacacactgtagcctgtcttgccatctttgtcttgttgccattgggtttgtttggagccaaggggctgaagaaggcattgggtatggggccaggcccctggatgaatatcctgtgggcctggtttattttctggtggcctcatggggtggttctaggactggatttcctggtgaggtccaagctgttgctgttgtcaacatgtctggcccagcaggctctggacctgctgctgaacctggcagaagccctggcaattttgcactgtgtggctacgcccctgctcctcgccctattctgccaccaggccacccgcaccctcttgccctctctgcccctccctgaaggatggtcttctcatctggacacccttggaagcaaatcctagttctcttcccacctgtcaacctgaattaaagtctacactgcctttgtg

SEQ ID NO: 8921 - DNA, 1905 bp, Homo sapiens
  source 1..1905: mol_type = unassigned DNA
caagggagagaagtgtgttcacttccttttgctaagcccttcctttccagagagtgtcttggggggcatctgactgcttccccccaccctctgccaggcattgctggagaatgttaagacggcgatggagatgccatcaaccccaccctgcagagcatcacccagacacccgccaagcccctcacatacagatatgtgcacaatgatacacagcaaacgtacacagagttcagtacacacaaagagctcacgcccacgtgcacacacccctcagttgggacagagttgaccaccaccacctttctcccaaacacatggcttttgaactgcctttccttggatccagttcaaggggatggaggagcagtgagagtcagccgcccttccactccaatttcccagcacctcccttatctctgcctcacaagtcacccagcccccctctcttccttccttgtgcttgaagaatctctccttgctggaaagccccctgttttctcaatctccctttccacttcggtaaaatctctacttgctggaaagccccctgttttctcaatctccctttccacttcggtaaaatgcccactttctggtccccacctttttcctgagtgtagtcccaaccagccaaatccaacctcaaaacaggaagacccaaggccagtgacccccataggcctgaggcttgtgcaggcagtgggcgtggggtaaggcttcctgatgccccctgtccctgcccagaacctgatggccctcattagtccttggctcttatcttggaagcacaggcgctgacagccgtcccagcccttctgtctgcgggcctgaaccaaacggtgccatggggaactgtctgcacagggcggagctctccccctcaactgagaactcaagtcagctggacttcgaagatgtatggaattcttcctatggtgtgaatgattccttcccagatggagactatggtgccaacctggaagcagctgccccctgccactcctgtaacctgctggatgactctgcactgcccttcttcatcctcaccagtgtcctgggtatcctagctagcagcactgtcctcttcatgcttttcagacctctcttccgctggcagctctgccctggctggcctgtcctggcacagctggctgtgggcagtgccctcttcagcattgtggtgcccgtcttggccccagggctaggtagcactcgcagctctgccctgtgtagcctgggctactgtgtctggtatggctcagcctttgcccaggctttgctgctagggtgccatgcctccctgggccacagactgggtgcaggccaggtcccaggcctcaccctggggctcactgtgggaatttggggagtggctgccctactgacactgcctgtcaccctggccagtggtgcttctggtggactctgcaccctgatatacagcacggagctgaaggctttgcaggccacacacactgtagcctgtcttgccatctttgtcttgttgccattgggtttgtttggagccaaggggctgaagaaggcattgggtatggggccaggcccctggatgaatatcctgtgggcctggtttattttctggtggcctcatggggtggttctaggactggatttcctggtgaggtccaagctgttgctgttgtcaacatgtctggcccagcaggctctggacctgctgctgaacctggcagaagccctggcaattttgcactgtgtggctacgcccctgctcctcgccctattctgccaccaggccacccgcaccctcttgccctctctgcccctccctgaaggatggtcttctcatctggacacccttggaagcaaatcctagttctcttcccacctgtcaacctgaattaaagtctacactgcctttgtgaa

SEQ ID NO: 8922 - DNA, 550 bp, Homo sapiens
  source 1..550: mol_type = unassigned DNA
gtcccagcccttctgtctgcgggcctgaaccaaacggtgccatggggaactgtctgcacagggagactcttccggtgtaactctgatggcctcctctgggtatgtcctccaggcggagctctccccctcaactgagaactcaagtcagctggacttcgaagatgtatggaattcttcctatggtgtgaatgattccttcccagatggagactatggtgccaacctggaagcagctgccccctgccactcctgtaacctgctggatgactctgcactgcccttcttcatcctcaccagtgtcctgggtatcctagctagcagcactgtcctcttcatgcttttcagacctctcttccgctggcagctctgccctggctggcctgtcctggcacagctggctgtgggcagtgccctcttcagcattgtggtgcccgtcttggccccagggctaggtagcactcgcagctctgccctgtgtagcctgggctactgtgtctggtatggctcagcctttgcccaggctttgctgctagggtgccatgcctccctg

SEQ ID NO: 8923 - DNA, 1902 bp, Homo sapiens
  source 1..1902: mol_type = unassigned DNA
caagggagagaagtgtgttcacttccttttgctaagcccttcctttccagagagtgtcttggggggcatctgactgcttccccccaccctctgccaggcattgctggagaatgttaagacggcgatggagatgccatcaaccccaccctgcagagcatcaccagacacccgccaagcccctcacatacagatatgtgcacaatgatacacagcaaacgtacacagagttcagtacacacaaagagctcacgcccacgtgcacacacccctcagttgggacagagttgaccaccaccacctttctcccaaacacatggcttttgaactgcctttccttggatccagttcaaggggatggaggagcagtgagagtcagccgcccttccactccaatttcccagcacctcccttatctctgcctcacaagtcacccagcccccctctcttccttccttgtgcttgaagaatctctccttgctggaaagccccctgttttctcaatctccctttccacttcggtaaaatctctacttgctggaaagccccctgttttctcaatctccctttccacttcggtaaaatgcccactttctggtccccacctttttcctgagtgtagtcccaaccagccaaatccaacctcaaaacaggaagacccaaggccagtgacccccataggcctgaggcttgtgcaggcagtgggcgtggggtaaggcttcctgatgccccctgtccctgcccagaacctgatggccctcattagtccttggctcttatcttggaagcacaggcgctgacagccgtcccagcccttctgtctgcgggcctgaaccaaacggtgccatggggaactgtctgcacagggcggagctctccccctcaactgagaactcaagtcagctggacttcgaagatgtatggaattcttcctatggtgtgaatgattccttcccagatggagactatggtgccaacctggaagcagctgccccctgccactcctgtaacctgctggatgactctgcactgcccttcttcatcctcaccagtgtcctgggtatcctagctagcagcactgtcctcttcatgcttttcagacctctcttccgctggcagctctgccctggctggcctgtcctggcacagctggctgtgggcagtgccctcttcagcattgtggtgcccgtcttggccccagggctaggtagcactcgcagctctgccctgtgtagcctgggctactgtgtctggtatggctcagcctttgcccaggctttgctgctagggtgccatgcctccctgggccacagactgggtgcaggccaggtcccaggcctcaccctggggctcactgtgggaatttggggagtggctgccctactgacactgcctgtcaccctggccagtggtgcttctggtggactctgcaccctgatatacagcacggagctgaaggctttgcaggccacacacactgtagcctgtcttgccatctttgtcttgttgccattgggtttgtttggagccaaggggctgaagaaggcattgggtatggggccaggcccctggatgaatatcctgtgggcctggtttattttctggtggcctcatggggtggttctaggactggatttcctggtgaggtccaagctgttgctgttgtcaacatgtctggcccagcaggctctggacctgctgctgaacctggcagaagccctggcaattttgcactgtgtggctacgcccctgctcctcgccctattctgccaccaggccacccgcaccctcttgccctctctgcccctccctgaaggatggtcttctcatctggacacccttggaagcaaatcctagttctcttcccacctgtcaacctgaattaaagtctacactgcctttgtg

SEQ ID NO: 8924 - DNA, 2610 bp, Homo sapiens
  source 1..2610: mol_type = unassigned DNA
acgtgaccacctggctggcgcgcgcgcctgggggtctggtccctagccgcgttctcggtcgcttccctcttctctcgccgcctcctggcctccgcaccgacgcggcccgggctggagccgagccggggccgagctgcaggccggaccggagccggatctgtacccgctgagacgtggaaacatggaggcctgagccggtgtgcgccacctgggctgcggcggcgacagcgacttctcctgacccctctgccaccctcccatccgtccgcgggtccgtggagctggagcagatcccccagccggctgagacaggttgtcttttggaaatgcaggtttaaggacaaattatctgcttaagctagaagatgggatcgaatagcagcagaatcggcgatcttcctaaaaatgagtacttgaaaaagttatcaggcacggaatctatctctgagaatgacccgttctggaatcagcttctctcattttctttccctgcaccaactagcagtagtgagttgaaactcttggaggaagcaaccatttcagtctgcaggtcattagttgaaaacaatcctcgaacaggaaatcttggtgcactaattaaggtcttcctttctagaaccaaagaactaaaactttcagcagaatgtcagaaccacatcttcatttggcagacacacaatgctttgtttattatttgctgtttgctgaaagtgttcatctgtcagatgtcagaggaggaattacaacttcattttacttatgaagaaaaatctcctggcaattacagttctgactcagaagatcttttggaagaattgctgtgctgtttgatgcagttgatcactgatattccactcttagatattacatatgaaatatcagtagaagctatatcaacaatggttgttttcctttcctgccaactcttccacaaagaagttttgcgacagagcatcagccacaagtatttgatgcgaggtccatgtcttccatacaccagcaaacttgtgaagaccttattatataactttatcagacaagaaaagccacctcctccaggggcccatgttttccctcagcagtcggatgggggaggactgctttatggacttgcatcaggagtagcaacaggactctggactgtcttcacactaggtggtgtgggcagcaaagcggctgcctctccagagctttcttcccctctggccaaccagagtctcctgcttctgctggtgttggccaatctgacagatgcctcagatgcgccaaacccctacagacaagccattatgtccttcaagaacacacaagatagcagtcctttcccctcatcaattccacatgccttccagatcaactttaatagtttgtacacagctctttgtgaacagcagacatctgatcaagcaactctcctcttgtataccttgctccatcaaaatagtaatattagaacatacatgttggctcgcacagatatggaaaatcttgttttaccaattcttgagattctgtatcatgttgaagaaaggaattcacaccatgtgtatatggcccttataatattgttgatccttacggaagatgatggcttcaacagatccattcatgaagtgatactaaaaaatattacttggtattcagaacgagttttaactgaaatctccttggggagtctcctgatcctggtggtaataagaaccattcaatacaacatgactaggacacgagacaagtaccttcacacaaattgtttggcagctttagcaaatatgtcggcacagtttcgttctctccatcagtatgctgcccagaggatcatcagtttattttctttgctgtctaaaaaacacaacaaagttctggaacaagccacacagtccttgagaggttcgctgagttctaatgatgttcctctaccagattatgcacaagacctaaatgtcattgaagaagtgattcgaatgatgttagagatcatcaactcctgcctgacaaattcccttcaccacaacccaaacttggtatacgccctgctttacaaacgcgatctctttgaacaatttcgaactcatccttcatttcaggatataatgcaaaatattgatctggtgatctccttctttagctcaaggttgctgcaagctggagctgagctgtcagtggaacgggtcctggaaatcattaagcaaggcgtcgttgcgctgcccaaagacagactgaagaaatttccagaattgaaattcaaatatgtggaagaggagcagcccgaggagttttttatcccctatgtctggtctcttgtctacaactcagcagtcggcctgtactggaatccacaggacatccagctgttcaccatggattccgactgagggcaggatgctctcccacccggacccctccagccaagcagcccttcaagttcttttatttctgggtaacagaagtagacagacaggttacttggtgtatcttctgttaaagaggattgcacgagtgtgttttcctcacacactttgatttggagaattggtgctagttggcaatagataactcagcgtagatagtattgcaaaaaggggaggaaatacacaacaataataaatg

SEQ ID NO: 8925 - DNA, 2793 bp, Homo sapiens
  source 1..2793: mol_type = unassigned DNA
acgtgaccacctggctggcgcgcgcgcctgggggtctggtccctagccgcgttctcggtcgcttccctcttctctcgccgcctcctggcctccgcaccgacgcggcccgggctggagccgagccggggccgagctgcaggccggaccggagccggatctgtacccgctgagacgtggaaacatggaggcctgagccggtgtgcgccacctgggctgcggcggcgacagcgacttctcctgacccctctgccaccctcccatccgtccgcgggtccgtggagctggagcagatcccccagccggctgagacaggttgtcttttggaaatgcaggtttaaggacaaattatctgcttaagctagaagatgggatcgaatagcagcagaatcggcgatcttcctaaaaatgagtacttgaaaaagttatcaggcacggaatctatctctgagaatgacccgttctggaatcagcttctctcattttctttccctgcaccaactagcagtagtgagttgaaactcttggaggaagcaaccatttcagtctgcaggtcattagttgaaaacaatcctcgaacaggaaatcttggtgcactaattaaggtcttcctttctagaaccaaagaactaaaactttcagcagaatgtcagaaccacatcttcatttggcagacacacaatgctttgtttattatttgctgtttgctgaaagtgttcatctgtcagatgtcagaggaggaattacaacttcattttacttatgaagaaaaatctcctggcaattacagttctgactcagaagatcttttggaagaattgctgtgctgtttgatgcagttgatcactgatattccactcttagatattacatatgaaatatcagtagaagctatatcaacaatggttgttttcctttcctgccaactcttccacaaagaagttttgcgacagagcatcagccacaagtatttgatgcgaggtccatgtcttccatacaccagcaaacttgtgaagaccttattatataactttatcagacaagaaaagccacctcctccaggggcccatgttttccctcagcagtcggatgggggaggactgctttatggacttgcatcaggagtagcaacaggactctggactgtcttcacactaggtggtgtgggcagcaaagcggctgcctctccagagctttcttcccctctggccaaccagagtctcctgcttctgctggtgttggccaatctgacagatgcctcagatgcgccaaacccctacagacaagccattatgtccttcaagaacacacaagatagcagtcctttcccctcatcaattccacatgccttccagatcaactttaatagtttgtacacagctctttgtgaacagcagacatctgatcaagcaactctcctcttgtataccttgctccatcaaaatagtaatattagaacatacatgttggctcgcacagatatggaaaatcttgttttaccaattcttgagattctgtatcatgttgaagaaaggaattcacaccatgtgtatatggcccttataatattgttgatccttacggaagatgatggcttcaacagatccattcatgaagtgatactaaaaaatattacttggtattcagaacgagttttaactgaaatctccttggggagtctcctgatcctggtggtaataagaaccattcaatacaacatgactaggacacgagacaagtaccttcacacaaattgtttggcagctttagcaaatatgtcggcacagtttcgttctctccatcagtatgctgcccagaggatcatcagttatacctgccgccacttgcggagatatgtttatgtgttggacaaactgtatttcccccactctcactgttctacgcttcagcattgcttctcgaccctcagtgacaatggagaggaactcttgtctttaacttgctctcacattctcagatcctatgcttccagtttattttctttgctgtctaaaaaacacaacaaagttctggaacaagccacacagtccttgagaggttcgctgagttctaatgatgttcctctaccagattatgcacaagacctaaatgtcattgaagaagtgattcgaatgatgttagagatcatcaactcctgcctgacaaattcccttcaccacaacccaaacttggtatacgccctgctttacaaacgcgatctctttgaacaatttcgaactcatccttcatttcaggatataatgcaaaatattgatctggtgatctccttctttagctcaaggttgctgcaagctggagctgagctgtcagtggaacgggtcctggaaatcattaagcaaggcgtcgttgcgctgcccaaagacagactgaagaaatttccagaattgaaattcaaatatgtggaagaggagcagcccgaggagttttttatcccctatgtctggtctcttgtctacaactcagcagtcggcctgtactggaatccacaggacatccagctgttcaccatggattccgactgagggcaggatgctctcccacccggacccctccagccaagcagcccttcaagttcttttatttctgggtaacagaagtagacagacaggttacttggtgtatcttctgttaaagaggattgcacgagtgtgttttcctcacacactttgatttggagaattggtgctagttggcaatagataactcagcgtagatagtattgcaaaaaggggaggaaatacacaacaataataaatgtaaaaacctgctattcaa

SEQ ID NO: 8926 - DNA, 2058 bp, Homo sapiens
  source 1..2058: mol_type = unassigned DNA
acgtgaccacctggctggcgcgcgcgcctgggggtctggtccctagccgcgttctcggtcgcttccctcttctctcgccgcctcctggcctccgcaccgacgcggcccgggctggagccgagccggggccgagctgcaggccggaccggagccggatctgtacccgctgagacgtggaaacatggaggcctgagccggtgtgcgccacctgggctgcggcggcgacagcgacttctcctgacccctctgccaccctcccatccgtccgcgggtccgtggagctggagcagatcccccagccggctgagacaggttgtcttttggaaatgcaggtttaaggacaaattatctgcttaagctagaagatgggatcgaatagcagcagaatcggcgatcttcctaaaaatgagtacttgaaaaagttatcaggcacggaatctatctctgagaatgacccgttctggaatcagcttctctcattttctttccctgcaccaactagcagtagtgagttgaaactcttggaggaagcaaccatttcagtctgcaggtcattagcaggactctggactgtcttcacactaggtggtgtgggcagcaaagcggctgcctctccagagctttcttcccctctggccaaccagagtctcctgcttctgctggtgttggccaatctgacagatgcctcagatgcgccaaacccctacagacaagccattatgtccttcaagaacacacaagatagcagtcctttcccctcatcaattccacatgccttccagatcaactttaatagtttgtacacagctctttgtgaacagcagacatctgatcaagcaactctcctcttgtataccttgctccatcaaaatagtaatattagaacatacatgttggctcgcacagatatggaaaatcttgttttaccaattcttgagattctgtatcatgttgaagaaaggaattcacaccatgtgtatatggcccttataatattgttgatccttacggaagatgatggcttcaacagatccattcatgaagtgatactaaaaaatattacttggtattcagaacgagttttaactgaaatctccttggggagtctcctgatcctggtggtaataagaaccattcaatacaacatgactaggacacgagacaagtaccttcacacaaattgtttggcagctttagcaaatatgtcggcacagtttcgttctctccatcagtatgctgcccagaggatcatcagtttattttctttgctgtctaaaaaacacaacaaagttctggaacaagccacacagtccttgagaggttcgctgagttctaatgatgttcctctaccagattatgcacaagacctaaatgtcattgaagaagtgattcgaatgatgttagagatcatcaactcctgcctgacaaattcccttcaccacaacccaaacttggtatacgccctgctttacaaacgcgatctctttgaacaatttcgaactcatccttcatttcaggatataatgcaaaatattgatctggtgatctccttctttagctcaaggttgctgcaagctggagctgagctgtcagtggaacgggtcctggaaatcattaagcaaggcgtcgttgcgctgcccaaagacagactgaagaaatttccagaattgaaattcaaatatgtggaagaggagcagcccgaggagttttttatcccctatgtctggtctcttgtctacaactcagcagtcggcctgtactggaatccacaggacatccagctgttcaccatggattccgactgagggcaggatgctctcccacccggacccctccagccaagcagcccttcaagttcttttatttctgggtaacagaagtagacagacaggttacttggtgtatcttctgttaaagaggattgcacgagtgtgttttcctcacacactttgatttggagaattggtgctagttggcaatagataactcagcgtagatagtattgcaaaaaggggaggaaatacacaacaataataaatgtaaaaacctgctattcaa

SEQ ID NO: 8927 - DNA, 4500 bp, Homo sapiens
  source 1..4500: mol_type = unassigned DNA
agaggctagcacggttcctgacaagtctagagcagcactagcgcagagtgagactcatcagctggcaagcaggattctgtgtctctgggttcaggaatcctcaggcagcagaggggacttgctcctcagcccccatcactgcccccacccctacccgtgtaggccaccgagtgaggcccatggactggggagggctgtgcctgacgactcctgtgtccctctatgagggcccagcgccctgaccctcctgcctaggtttctaccttttctctctgtctttggccagctgggggagggggtagaggccgggtgagcaacatggcacagagcaagaggcacgtgtacagccggacgcccagcggcagcaggatgagtgcggaggcaagcgcccggcctctgcgggtgggctcccgtgtagaggtgattggaaaaggccaccgaggcactgtggcctatgttggagccacactgtttgccactggcaaatgggtaggcgtgattctggatgaagcaaagggcaaaaatgatggaactgttcaaggcaggaagtacttcacttgtgatgaagggcatggcatctttgtgcgccagtcccagatccaggtatttgaagatggagcagatactacttccccagagacacctgattcttctgcttcaaaagtcctcaaaagagagggaactgatacaactgcaaagactagcaaactgcggggactgaagcctaagaaggcaccgacagcccgaaagaccacaactcggcgacccaagcccacgcgcccagccagtactggggtggctggggccagtagctccctgggcccctctggctcagcgtcagcaggtgagctgagcagcagtgagcccagcaccccggctcagactccgctggcagcacccatcatccccacgccggtcctcacctctcctggagcagtccccccgcttccttccccatccaaggaggaggagggactaagggctcaggtgcgggacctggaggagaaactagagaccctgagactgaaacgggcagaagacaaagcaaagctaaaagagctggagaaacacaaaatccagctggagcaggtgcaggaatggaagagcaaaatgcaggagcagcaggccgacctgcagcggcgcctcaaggaggcgagaaaggaagccaaggaggcgctggaggcaaaggaacgctatatggaggagatggctgatactgctgatgccattgagatggccactttggacaaggagatggctgaagagcgggctgagtccctgcagcaggaggtggaggcactgaaggagcgggtggacgagctcactactgacttagagatcctcaaggctgagattgaagagaagggctcagatggcgctgcatccagttatcagctcaagcagcttgaggagcagaatgcccgcctgaaggatgccctggtgaggatgcgggatctttcttcctcagagaagcaggagcatgtgaagctccagaagctcatggaaaagaagaaccaagagctggaagttgtgaggcaacagcgggagcgtctgcaggaggagctaagccaggcagagagcaccattgatgagctcaaggagcaggtggatgctgctctgggtgctgaggagatggtggagatgctgacagatcggaacctgaatctggaagagaaagtgcgcgagttgagggagactgtgggagacttggaagcgatgaatgagatgaacgatgagctgcaggagaatgcacgtgagacagaactggagctgcgggagcagctggacatggcaggcgcgcgggttcgtgaggcccagaagcgtgtggaggcagcccaggagacggttgcagactaccagcagaccatcaagaagtaccgccagctgaccgcccatctacaggatgtgaatcgggaactgacaaaccagcaggaagcatctgtggagaggcaacagcagccacctccagagacctttgacttcaaaatcaagtttgctgagactaaggcccatgccaaggcaattgagatggaattgaggcagatggaggtggcccaggccaatcgacacatgtccctgctgacagccttcatgcctgacagcttccttcggccaggtggggaccatgactgcgttctggtgctgttgctcatgcctcgtctcatttgcaaggcagagctgatccggaagcaggcccaggagaagtttgaactaagtgagaactgttcagagcggcctgggctgcgaggagctgctggggagcaactcagctttgctgctggactggtgtactcgctgagcctgctgcaggccacgctacaccgctatgagcatgccctctctcagtgcagtgtggatgtgtataagaaagtgggcagcctgtaccctgagatgagtgcccatgagcgctccttggatttcctcattgaactgctgcacaaggatcagctggatgagactgtcaatgtggagcctctcaccaaggccatcaagtactatcagcatctgtacagcatccaccttgccgaacagcctgaggactgtactatgcagctggctgaccacattaagttcacgcagagtgctctggactgcatgagtgtggaggtaggacggctgcgtgccttcttgcagggtgggcaggaggctacagatattgccctcctgctccgggatctggaaacttcatgcagtgacatccgccagttctgcaagaagatccgaaggcgaatgccagggacagatgctcctgggatcccagctgcactggcctttggaccacaggtatctgacacgctcctagactgcaggaaacacttgacgtgggtcgtggctgtgctgcaggaggtggcagctgctgctgcccagctcattgccccactggcagagaatgaggggctacttgtggctgctctggaggaactggctttcaaagcaagcgagcagatctatgggaccccctccagcagcccctatgagtgtctgcgccagtcatgcaacatcctcatcagtaccatgaacaagctggccacagccatgcaggagggggagtatgatgcagagcggccccccagcaagcctccaccggttgaactgcgggctgctgcccttcgtgcagagatcacagatgctgaaggcctgggtttgaagctcgaagatcgagagacagttattaaggagttgaagaagtcactcaagattaagggagaggagctaagtgaggccaatgtgcggctgagcctcctggagaagaagttggacagtgctgccaaggatgcagatgagcgcatcgagaaagtccagactcggctggaggagacccaggcactgctgcgaaagaaggagaaagagtttgaggagacaatggatgcactccaggctgacatcgaccagctggaggcagagaaggcagaactaaagcagcgtctgaacagccagtccaaacgcacgattgagggactccggggccctcctccttcaggcattgctactctggtctctggcattgctggtgaagaacagcagcgaggagccatccctgggcaggctccagggtctgtgccaggcccagggctggtgaaggactcaccactgctgcttcagcagatctctgccatgaggctgcacatctcccagctccagcatgagaacagcatcctcaagggagcccagatgaaggcatccttggcatccctgccccctctgcatgttgcaaagctatcccatgagggccctggcagtgagttaccagctggagcgctgtatcgtaagaccagccagctgctggagacattgaatcaattgagcacacacacgcacgtagtagacatcactcgcaccagccctgctgccaagagcccgtcggcccaacttatggagcaagtggctcagcttaagtccctgagtgacaccgtcgagaagctcaaggatgaggtcctcaaggagacagtatctcagcgccctggagccacagtacccactgactttgccaccttcccttcatcagccttcctcagggccaaggaggagcagcaggatgacacagtctacatgggcaaagtgaccttctcatgtgcggctggttttggacagcgacaccggctggtgctgacccaggagcagctgcaccagcttcacagtcgcctcatctcctaagcactcctttcccctgctgtccccttcgaccctcagccctctggtgccgctctgcccgatgcacagccacctcagccagcccccaggtagaaacgtgggttaagctcttcctgccccgttcagcttcactcccaccctttcagcgtcctgccccttcaccttgacccgggttcccccactcccattccctggcctctgccataatttgttgttcaactgctccctccttcctgaggggcctcagggcttgtggggggtaggctgagaccccaccaccaaaggttaagtgaggtccccttgattgaggacttcaccccttgattaaagcaacttctgcttcagtgc

SEQ ID NO: 8928 - DNA, 4492 bp, Homo sapiens
  source 1..4492: mol_type = unassigned DNA
agcacggttcctgacaagtctagagcagcactagcgcagagtgagactcatcagctggcaagcaggattctgtgtctctgggttcaggaatcctcaggcagcagaggggacttgctcctcagcccccatcactgcccccacccctacccgtgtaggccaccgagtgaggcccatggactggggagggctgtgcctgacgactcctgtgtccctctatgagggcccagcgccctgaccctcctgcctaggtttctaccttttctctctgtctttggccagctgggggagggggtagaggccgggtgagcaacatggcacagagcaagaggcacgtgtacagccggacgcccagcggcagcaggatgagtgcggaggcaagcgcccggcctctgcgggtgggctcccgtgtagaggtgattggaaaaggccaccgaggcactgtggcctatgttggagccacactgtttgccactggcaaatgggtaggcgtgattctggatgaagcaaagggcaaaaatgatggaactgttcaaggcaggaagtacttcacttgtgatgaagggcatggcatctttgtgcgccagtcccagatccaggtatttgaagatggagcagatactacttccccagagacacctgattcttctgcttcaaaagtcctcaaaagagagggaactgatacaactgcaaagactagcaaactgcggggactgaagcctaagaaggcaccgacagcccgaaaggggaggcgggtgaggacgaagcccacgcgcccagccagtactggggtggctggggccagtagctccctgggcccctctggctcagcgtcagcaggtgagctgagcagcagtgagcccagcaccccggctcagactccgctggcagcacccatcatccccacgccggtcctcacctctcctggagcagtccccccgcttccttccccatccaaggaggaggagggactaagggctcaggtgcgggacctggaggagaaactagagaccctgagactgaaacgggcagaagacaaagcaaagctaaaagagctggagaaacacaaaatccagctggagcaggtgcaggaatggaagagcaaaatgcaggagcagcaggccgacctgcagcggcgcctcaaggaggcgagaaaggaagccaaggaggcgctggaggcaaaggaacgctatatggaggagatggctgatactgctgatgccattgagatggccactttggacaaggagatggctgaagagcgggctgagtccctgcagcaggaggtggaggcactgaaggagcgggtggacgagctcactactgacttagagatcctcaaggctgagattgaagagaagggctcagatggcgctgcatccagttatcagctcaagcagcttgaggagcagaatgcccgcctgaaggatgccctggtgaggatgcgggatctttcttcctcagagaagcaggagcatgtgaagctccagaagctcatggaaaagaagaaccaagagctggaagttgtgaggcaacagcgggagcgtctgcaggaggagctaagccaggcagagagcaccattgatgagctcaaggagcaggtggatgctgctctgggtgctgaggagatggtggagatgctgacagatcggaacctgaatctggaagagaaagtgcgcgagttgagggagactgtgggagacttggaagcgatgaatgagatgaacgatgagctgcaggagaatgcacgtgagacagaactggagctgcgggagcagctggacatggcaggcgcgcgggttcgtgaggcccagaagcgtgtggaggcagcccaggagacggttgcagactaccagcagaccatcaagaagtaccgccagctgaccgcccatctacaggatgtgaatcgggaactgacaaaccagcaggaagcatctgtggagaggcaacagcagccacctccagagacctttgacttcaaaatcaagtttgctgagactaaggcccatgccaaggcaattgagatggaattgaggcagatggaggtggcccaggccaatcgacacatgtccctgctgacagccttcatgcctgacagcttccttcggccaggtggggaccatgactgcgttctggtgctgttgctcatgcctcgtctcatttgcaaggcagagctgatccggaagcaggcccaggagaagtttgaactaagtgagaactgttcagagcggcctgggctgcgaggagctgctggggagcaactcagctttgctgctggactggtgtactcgctgagcctgctgcaggccacgctacaccgctatgagcatgccctctctcagtgcagtgtggatgtgtataagaaagtgggcagcctgtaccctgagatgagtgcccatgagcgctccttggatttcctcattgaactgctgcacaaggatcagctggatgagactgtcaatgtggagcctctcaccaaggccatcaagtactatcagcatctgtacagcatccaccttgccgaacagcctgaggactgtactatgcagctggctgaccacattaagttcacgcagagtgctctggactgcatgagtgtggaggtaggacggctgcgtgccttcttgcagggtgggcaggaggctacagatattgccctcctgctccgggatctggaaacttcatgcagtgacatccgccagttctgcaagaagatccgaaggcgaatgccagggacagatgctcctgggatcccagctgcactggcctttggaccacaggtatctgacacgctcctagactgcaggaaacacttgacgtgggtcgtggctgtgctgcaggaggtggcagctgctgctgcccagctcattgccccactggcagagaatgaggggctacttgtggctgctctggaggaactggctttcaaagcaagcgagcagatctatgggaccccctccagcagcccctatgagtgtctgcgccagtcatgcaacatcctcatcagtaccatgaacaagctggccacagccatgcaggagggggagtatgatgcagagcggccccccagcaagcctccaccggttgaactgcgggctgctgcccttcgtgcagagatcacagatgctgaaggcctgggtttgaagctcgaagatcgagagacagttattaaggagttgaagaagtcactcaagattaagggagaggagctaagtgaggccaatgtgcggctgagcctcctggagaagaagttggacagtgctgccaaggatgcagatgagcgcatcgagaaagtccagactcggctggaggagacccaggcactgctgcgaaagaaggagaaagagtttgaggagacaatggatgcactccaggctgacatcgaccagctggaggcagagaaggcagaactaaagcagcgtctgaacagccagtccaaacgcacgattgagggactccggggccctcctccttcaggcattgctactctggtctctggcattgctggtgaagaacagcagcgaggagccatccctgggcaggctccagggtctgtgccaggcccagggctggtgaaggactcaccactgctgcttcagcagatctctgccatgaggctgcacatctcccagctccagcatgagaacagcatcctcaagggagcccagatgaaggcatccttggcatccctgccccctctgcatgttgcaaagctatcccatgagggccctggcagtgagttaccagctggagcgctgtatcgtaagaccagccagctgctggagacattgaatcaattgagcacacacacgcacgtagtagacatcactcgcaccagccctgctgccaagagcccgtcggcccaacttatggagcaagtggctcagcttaagtccctgagtgacaccgtcgagaagctcaaggatgaggtcctcaaggagacagtatctcagcgccctggagccacagtacccactgactttgccaccttcccttcatcagccttcctcagggccaaggaggagcagcaggatgacacagtctacatgggcaaagtgaccttctcatgtgcggctggttttggacagcgacaccggctggtgctgacccaggagcagctgcaccagcttcacagtcgcctcatctcctaagcactcctttcccctgctgtccccttcgaccctcagccctctggtgccgctctgcccgatgcacagccacctcagccagcccccaggtagaaacgtgggttaagctcttcctgccccgttcagcttcactcccaccctttcagcgtcctgccccttcaccttgacccgggttcccccactcccattccctggcctctgccataatttgttgttcaactgctccctccttcctgaggggcctcagggcttgtggggggtaggctgagaccccaccaccaaaggttaagtgaggtccccttgattgaggacttcaccccttgattaaagcaacttctgcttcagtg

SEQ ID NO: 8929 - DNA, 4479 bp, Homo sapiens
  source 1..4479: mol_type = unassigned DNA
agaggctagcacggttcctgacaagtctagagcagcactagcgcagagtgagactcatcagctggcaagcaggattctgtgtctctgggttcaggaatcctcaggcagcagaggggacttgctcctcagcccccatcactgcccccacccctacccgtgtaggccaccgagtgaggcccatggactggggagggctgtgcctgacgactcctgtgtccctctatgagggcccagcgccctgaccctcctgcctaggtttctaccttttctctctgtctttggccagctgggggagggggtagaggccgggtgagcaacatggcacagagcaagaggcacgtgtacagccggacgcccagcggcagcaggatgagtgcggaggcaagcgcccggcctctgcgggtgggctcccgtgtagaggtgattggaaaaggccaccgaggcactgtggcctatgttggagccacactgtttgccactggcaaatgggtaggcgtgattctggatgaagcaaagggcaaaaatgatggaactgttcaaggcaggaagtacttcacttgtgatgaagggcatggcatctttgtgcgccagtcccagatccaggtatttgaagatggagcagatactacttccccagagacacctgattcttctgcttcaaaagtcctcaaaagagagggaactgatacaactgcaaagactagcaaactggcaccgacagcccgaaagaccacaactcggcgacccaagcccacgcgcccagccagtactggggtggctggggccagtagctccctgggcccctctggctcagcgtcagcaggtgagctgagcagcagtgagcccagcaccccggctcagactccgctggcagcacccatcatccccacgccggtcctcacctctcctggagcagtccccccgcttccttccccatccaaggaggaggagggactaagggctcaggtgcgggacctggaggagaaactagagaccctgagactgaaacgggcagaagacaaagcaaagctaaaagagctggagaaacacaaaatccagctggagcaggtgcaggaatggaagagcaaaatgcaggagcagcaggccgacctgcagcggcgcctcaaggaggcgagaaaggaagccaaggaggcgctggaggcaaaggaacgctatatggaggagatggctgatactgctgatgccattgagatggccactttggacaaggagatggctgaagagcgggctgagtccctgcagcaggaggtggaggcactgaaggagcgggtggacgagctcactactgacttagagatcctcaaggctgagattgaagagaagggctcagatggcgctgcatccagttatcagctcaagcagcttgaggagcagaatgcccgcctgaaggatgccctggtgaggatgcgggatctttcttcctcagagaagcaggagcatgtgaagctccagaagctcatggaaaagaagaaccaagagctggaagttgtgaggcaacagcgggagcgtctgcaggaggagctaagccaggcagagagcaccattgatgagctcaaggagcaggtggatgctgctctgggtgctgaggagatggtggagatgctgacagatcggaacctgaatctggaagagaaagtgcgcgagttgagggagactgtgggagacttggaagcgatgaatgagatgaacgatgagctgcaggagaatgcacgtgagacagaactggagctgcgggagcagctggacatggcaggcgcgcgggttcgtgaggcccagaagcgtgtggaggcagcccaggagacggttgcagactaccagcagaccatcaagaagtaccgccagctgaccgcccatctacaggatgtgaatcgggaactgacaaaccagcaggaagcatctgtggagaggcaacagcagccacctccagagacctttgacttcaaaatcaagtttgctgagactaaggcccatgccaaggcaattgagatggaattgaggcagatggaggtggcccaggccaatcgacacatgtccctgctgacagccttcatgcctgacagcttccttcggccaggtggggaccatgactgcgttctggtgctgttgctcatgcctcgtctcatttgcaaggcagagctgatccggaagcaggcccaggagaagtttgaactaagtgagaactgttcagagcggcctgggctgcgaggagctgctggggagcaactcagctttgctgctggactggtgtactcgctgagcctgctgcaggccacgctacaccgctatgagcatgccctctctcagtgcagtgtggatgtgtataagaaagtgggcagcctgtaccctgagatgagtgcccatgagcgctccttggatttcctcattgaactgctgcacaaggatcagctggatgagactgtcaatgtggagcctctcaccaaggccatcaagtactatcagcatctgtacagcatccaccttgccgaacagcctgaggactgtactatgcagctggctgaccacattaagttcacgcagagtgctctggactgcatgagtgtggaggtaggacggctgcgtgccttcttgcagggtgggcaggaggctacagatattgccctcctgctccgggatctggaaacttcatgcagtgacatccgccagttctgcaagaagatccgaaggcgaatgccagggacagatgctcctgggatcccagctgcactggcctttggaccacaggtatctgacacgctcctagactgcaggaaacacttgacgtgggtcgtggctgtgctgcaggaggtggcagctgctgctgcccagctcattgccccactggcagagaatgaggggctacttgtggctgctctggaggaactggctttcaaagcaagcgagcagatctatgggaccccctccagcagcccctatgagtgtctgcgccagtcatgcaacatcctcatcagtaccatgaacaagctggccacagccatgcaggagggggagtatgatgcagagcggccccccagcaagcctccaccggttgaactgcgggctgctgcccttcgtgcagagatcacagatgctgaaggcctgggtttgaagctcgaagatcgagagacagttattaaggagttgaagaagtcactcaagattaagggagaggagctaagtgaggccaatgtgcggctgagcctcctggagaagaagttggacagtgctgccaaggatgcagatgagcgcatcgagaaagtccagactcggctggaggagacccaggcactgctgcgaaagaaggagaaagagtttgaggagacaatggatgcactccaggctgacatcgaccagctggaggcagagaaggcagaactaaagcagcgtctgaacagccagtccaaacgcacgattgagggactccggggccctcctccttcaggcattgctactctggtctctggcattgctggtgaagaacagcagcgaggagccatccctgggcaggctccagggtctgtgccaggcccagggctggtgaaggactcaccactgctgcttcagcagatctctgccatgaggctgcacatctcccagctccagcatgagaacagcatcctcaagggagcccagatgaaggcatccttggcatccctgccccctctgcatgttgcaaagctatcccatgagggccctggcagtgagttaccagctggagcgctgtatcgtaagaccagccagctgctggagacattgaatcaattgagcacacacacgcacgtagtagacatcactcgcaccagccctgctgccaagagcccgtcggcccaacttatggagcaagtggctcagcttaagtccctgagtgacaccgtcgagaagctcaaggatgaggtcctcaaggagacagtatctcagcgccctggagccacagtacccactgactttgccaccttcccttcatcagccttcctcagggccaaggaggagcagcaggatgacacagtctacatgggcaaagtgaccttctcatgtgcggctggttttggacagcgacaccggctggtgctgacccaggagcagctgcaccagcttcacagtcgcctcatctcctaagcactcctttcccctgctgtccccttcgaccctcagccctctggtgccgctctgcccgatgcacagccacctcagccagcccccaggtagaaacgtgggttaagctcttcctgccccgttcagcttcactcccaccctttcagcgtcctgccccttcaccttgacccgggttcccccactcccattccctggcctctgccataatttgttgttcaactgctccctccttcctgaggggcctcagggcttgtggggggtaggctgagaccccaccaccaaaggttaagtgaggtccccttgattgaggacttcaccccttgattaaagcaacttctgcttcagtgc

SEQ ID NO: 8930 - DNA, 4162 bp, Homo sapiens
  source 1..4162: mol_type = unassigned DNA
agtggctccacccccatggagcagaggagggtgggtgcatgacgtcaggtggagctggtgctgcggccactgaggctgccatcagcctaagctggtgaactgggccaggcaccgctccggtgcctgccggagcctggcgatccagctgcacgtctgcgggggcctctgtgtcagagcggcggccgtttgcaggctgggaagctgccgcaccgggaggctgagactgcattgttgggatttgatgcactaatctcctgtctccgccgcctttccctctgttcggtctcttgccctccctcccttcgtctgtccttcctccgtgtgtttgtctatcctcctctgtccctcctctttcctctccttgctttctttggttttctgcaatgatgagacaggcaccgacagcccgaaagaccacaactcggcgacccaagcccacgcgcccagccagtactggggtggctggggccagtagctccctgggcccctctggctcagcgtcagcaggtgagctgagcagcagtgagcccagcaccccggctcagactccgctggcagcacccatcatccccacgccggtcctcacctctcctggagcagtccccccgcttccttccccatccaaggaggaggagggactaagggctcaggtgcgggacctggaggagaaactagagaccctgagactgaaacgggcagaagacaaagcaaagctaaaagagctggagaaacacaaaatccagctggagcaggtgcaggaatggaagagcaaaatgcaggagcagcaggccgacctgcagcggcgcctcaaggaggcgagaaaggaagccaaggaggcgctggaggcaaaggaacgctatatggaggagatggctgatactgctgatgccattgagatggccactttggacaaggagatggctgaagagcgggctgagtccctgcagcaggaggtggaggcactgaaggagcgggtggacgagctcactactgacttagagatcctcaaggctgagattgaagagaagggctcagatggcgctgcatccagttatcagctcaagcagcttgaggagcagaatgcccgcctgaaggatgccctggtgaggatgcgggatctttcttcctcagagaagcaggagcatgtgaagctccagaagctcatggaaaagaagaaccaagagctggaagttgtgaggcaacagcgggagcgtctgcaggaggagctaagccaggcagagagcaccattgatgagctcaaggagcaggtggatgctgctctgggtgctgaggagatggtggagatgctgacagatcggaacctgaatctggaagagaaagtgcgcgagttgagggagactgtgggagacttggaagcgatgaatgagatgaacgatgagctgcaggagaatgcacgtgagacagaactggagctgcgggagcagctggacatggcaggcgcgcgggttcgtgaggcccagaagcgtgtggaggcagcccaggagacggttgcagactaccagcagaccatcaagaagtaccgccagctgaccgcccatctacaggatgtgaatcgggaactgacaaaccagcaggaagcatctgtggagaggcaacagcagccacctccagagacctttgacttcaaaatcaagtttgctgagactaaggcccatgccaaggcaattgagatggaattgaggcagatggaggtggcccaggccaatcgacacatgtccctgctgacagccttcatgcctgacagcttccttcggccaggtggggaccatgactgcgttctggtgctgttgctcatgcctcgtctcatttgcaaggcagagctgatccggaagcaggcccaggagaagtttgaactaagtgagaactgttcagagcggcctgggctgcgaggagctgctggggagcaactcagctttgctgctggactggtgtactcgctgagcctgctgcaggccacgctacaccgctatgagcatgccctctctcagtgcagtgtggatgtgtataagaaagtgggcagcctgtaccctgagatgagtgcccatgagcgctccttggatttcctcattgaactgctgcacaaggatcagctggatgagactgtcaatgtggagcctctcaccaaggccatcaagtactatcagcatctgtacagcatccaccttgccgaacagcctgaggactgtactatgcagctggctgaccacattaagttcacgcagagtgctctggactgcatgagtgtggaggtaggacggctgcgtgccttcttgcagggtgggcaggaggctacagatattgccctcctgctccgggatctggaaacttcatgcagtgacatccgccagttctgcaagaagatccgaaggcgaatgccagggacagatgctcctgggatcccagctgcactggcctttggaccacaggtatctgacacgctcctagactgcaggaaacacttgacgtgggtcgtggctgtgctgcaggaggtggcagctgctgctgcccagctcattgccccactggcagagaatgaggggctacttgtggctgctctggaggaactggctttcaaagcaagcgagcagatctatgggaccccctccagcagcccctatgagtgtctgcgccagtcatgcaacatcctcatcagtaccatgaacaagctggccacagccatgcaggagggggagtatgatgcagagcggccccccagcaagcctccaccggttgaactgcgggctgctgcccttcgtgcagagatcacagatgctgaaggcctgggtttgaagctcgaagatcgagagacagttattaaggagttgaagaagtcactcaagattaagggagaggagctaagtgaggccaatgtgcggctgagcctcctggagaagaagttggacagtgctgccaaggatgcagatgagcgcatcgagaaagtccagactcggctggaggagacccaggcactgctgcgaaagaaggagaaagagtttgaggagacaatggatgcactccaggctgacatcgaccagctggaggcagagaaggcagaactaaagcagcgtctgaacagccagtccaaacgcacgattgagggactccggggccctcctccttcaggcattgctactctggtctctggcattgctggtgaagaacagcagcgaggagccatccctgggcaggctccagggtctgtgccaggcccagggctggtgaaggactcaccactgctgcttcagcagatctctgccatgaggctgcacatctcccagctccagcatgagaacagcatcctcaagggagcccagatgaaggcatccttggcatccctgccccctctgcatgttgcaaagctatcccatgagggccctggcagtgagttaccagctggagcgctgtatcgtaagaccagccagctgctggagacattgaatcaattgagcacacacacgcacgtagtagacatcactcgcaccagccctgctgccaagagcccgtcggcccaacttatggagcaagtggctcagcttaagtccctgagtgacaccgtcgagaagctcaaggatgaggtcctcaaggagacagtatctcagcgccctggagccacagtacccactgactttgccaccttcccttcatcagccttcctcagggccaaggaggagcagcaggatgacacagtctacatgggcaaagtgaccttctcatgtgcggctggttttggacagcgacaccggctggtgctgacccaggagcagctgcaccagcttcacagtcgcctcatctcctaagcactcctttcccctgctgtccccttcgaccctcagccctctggtgccgctctgcccgatgcacagccacctcagccagcccccaggtagaaacgtgggttaagctcttcctgccccgttcagcttcactcccaccctttcagcgtcctgccccttcaccttgacccgggttcccccactcccattccctggcctctgccataatttgttgttcaactgctccctccttcctgaggggcctcagggcttgtggggggtaggctgagaccccaccaccaaaggttaagtgaggtccccttgattgaggacttcaccccttgattaaagcaacttctgcttcagtg

SEQ ID NO: 8931 - DNA, 4202 bp, Homo sapiens
  source 1..4202: mol_type = unassigned DNA
ccggccccgcagggtcttgggcgtcggtcgtcggtggggtcggagctgggcgcggagcccctcacagtgcagacgcccagcggcagcaggatgagtgcggaggcaagcgcccggcctctgcgggtgggctcccgtgtagaggtgattggaaaaggccaccgaggcactgtggcctatgttggagccacactgtttgccactggcaaatgggtaggcgtgattctggatgaagcaaagggcaaaaatgatggaactgttcaaggcaggaagtacttcacttgtgatgaagggcatggcatctttgtgcgccagtcccagatccaggtatttgaagatggagcagatactacttccccagagacacctgattcttctgcttcaaaagtcctcaaaagagagggaactgatacaactgcaaagactagcaaactgcggggactgaagcctaagaaggcaccgacagcccgaaagaccacaactcggcgacccaagcccacgcgcccagccagtactggggtggctggggccagtagctccctgggcccctctggctcagcgtcagcaggtgagctgagcagcagtgagcccagcaccccggctcagactccgctggcagcacccatcatccccacgccggtcctcacctctcctggagcagtccccccgcttccttccccatccaaggaggaggagggactaagggctcaggtgcgggacctggaggagaaactagagaccctgagactgaaacgggcagaagacaaagcaaagctaaaagagctggagaaacacaaaatccagctggagcaggtgcaggaatggaagagcaaaatgcaggagcagcaggccgacctgcagcggcgcctcaaggaggcgagaaaggaagccaaggaggcgctggaggcaaaggaacgctatatggaggagatggctgatactgctgatgccattgagatggccactttggacaaggagatggctgaagagcgggctgagtccctgcagcaggaggtggaggcactgaaggagcgggtggacgagctcactactgacttagagatcctcaaggctgagattgaagagaagggctcagatggcgctgcatccagttatcagctcaagcagcttgaggagcagaatgcccgcctgaaggatgccctggtgaggatgcgggatctttcttcctcagagaagcaggagcatgtgaagctccagaagctcatggaaaagaagaaccaagagctggaagttgtgaggcaacagcgggagcgtctgcaggaggagctaagccaggcagagagcaccattgatgagctcaaggagcaggtggatgctgctctgggtgctgaggagatggtggagatgctgacagatcggaacctgaatctggaagagaaagtgcgcgagttgagggagactgtgggagacttggaagcgatgaatgagatgaacgatgagctgcaggagaatgcacgtgagacagaactggagctgcgggagcagctggacatggcaggcgcgcgggttcgtgaggcccagaagcgtgtggaggcagcccaggagacggttgcagactaccagcagaccatcaagaagtaccgccagctgaccgcccatctacaggatgtgaatcgggaactgacaaaccagcaggaagcatctgtggagaggcaacagcagccacctccagagacctttgacttcaaaatcaagtttgctgagactaaggcccatgccaaggcaattgagatggaattgaggcagatggaggtggcccaggccaatcgacacatgtccctgctgacagccttcatgcctgacagcttccttcggccaggtggggaccatgactgcgttctggtgctgttgctcatgcctcgtctcatttgcaaggcagagctgatccggaagcaggcccaggagaagtttgaactaagtgagaactgttcagagcggcctgggctgcgaggagctgctggggagcaactcagctttgctgctggactggtgtactcgctgagcctgctgcaggccacgctacaccgctatgagcatgccctctctcagtgcagtgtggatgtgtataagaaagtgggcagcctgtaccctgagatgagtgcccatgagcgctccttggatttcctcattgaactgctgcacaaggatcagctggatgagactgtcaatgtggagcctctcaccaaggccatcaagtactatcagcatctgtacagcatccaccttgccgaacagcctgaggactgtactatgcagctggctgaccacattaagttcacgcagagtgctctggactgcatgagtgtggaggtaggacggctgcgtgccttcttgcagggtgggcaggaggctacagatattgccctcctgctccgggatctggaaacttcatgcagtgacatccgccagttctgcaagaagatccgaaggcgaatgccagggacagatgctcctgggatcccagctgcactggcctttggaccacaggtatctgacacgctcctagactgcaggaaacacttgacgtgggtcgtggctgtgctgcaggaggtggcagctgctgctgcccagctcattgccccactggcagagaatgaggggctacttgtggctgctctggaggaactggctttcaaagcaagcgagcagatctatgggaccccctccagcagcccctatgagtgtctgcgccagtcatgcaacatcctcatcagtaccatgaacaagctggccacagccatgcaggagggggagtatgatgcagagcggccccccagcaagcctccaccggttgaactgcgggctgctgcccttcgtgcagagatcacagatgctgaaggcctgggtttgaagctcgaagatcgagagacagttattaaggagttgaagaagtcactcaagattaagggagaggagctaagtgaggccaatgtgcggctgagcctcctggagaagaagttggacagtgctgccaaggatgcagatgagcgcatcgagaaagtccagactcggctggaggagacccaggcactgctgcgaaagaaggagaaagagtttgaggagacaatggatgcactccaggctgacatcgaccagctggaggcagagaaggcagaactaaagcagcgtctgaacagccagtccaaacgcacgattgagggactccggggccctcctccttcaggcattgctactctggtctctggcattgctggtggagccatccctgggcaggctccagggtctgtgccaggcccagggctggtgaaggactcaccactgctgcttcagcagatctctgccatgaggctgcacatctcccagctccagcatgagaacagcatcctcaagggagcccagatgaaggcatccttggcatccctgccccctctgcatgttgcaaagctatcccatgagggccctggcagtgagttaccagctggagcgctgtatcgtaagaccagccagctgctggagacattgaatcaattgagcacacacacgcacgtagtagacatcactcgcaccagccctgctgccaagagcccgtcggcccaacttatggagcaagtggctcagcttaagtccctgagtgacaccgtcgagaagctcaaggatgaggtcctcaaggagacagtatctcagcgccctggagccacagtacccactgactttgccaccttcccttcatcagccttcctcagggccaaggaggagcagcaggatgacacagtctacatgggcaaagtgaccttctcatgtgcggctggttttggacagcgacaccggctggtgctgacccaggagcagctgcaccagcttcacagtcgcctcatctcctaagcactcctttcccctgctgtccccttcgaccctcagccctctggtgccgctctgcccgatgcacagccacctcagccagcccccaggtagaaacgtgggttaagctcttcctgccccgttcagcttcactcccaccctttcagcgtcctgccccttcaccttgacccgggttcccccactcccattccctggcctctgccataatttgttgttcaactgctccctccttcctgaggggcctcagggcttgtggggggtaggctgagaccccaccaccaaaggttaagtgaggtccccttgattgaggacttcaccccttgattaaagcaacttctgcttca

SEQ ID NO: 8932 - DNA, 4229 bp, Homo sapiens
  source 1..4229: mol_type = unassigned DNA
ggccggccccgcagggtcttgggcgtcggtcgtcggtggggtcggagctgggcgcggagcccctcacagtgcagacgcccagcggcagcaggatgagtgcggaggcaagcgcccggcctctgcgggtgggctcccgtgtagaggtgattggaaaaggccaccgaggcactgtggcctatgttggagccacactgtttgccactggcaaatgggtaggcgtgattctggatgaagcaaagggcaaaaatgatggaactgttcaaggcaggaagtacttcacttgtgatgaagggcatggcatctttgtgcgccagtcccagatccaggtatttgaagatggagcagatactacttccccagagacacctgattcttctgcttcaaaagtcctcaaaagagagggaactgatacaactgcaaagactagcaaactgcccacgcgcccagccagtactggggtggctggggccagtagctccctgggcccctctggctcagcgtcagcaggtgagctgagcagcagtgagcccagcaccccggctcagactccgctggcagcacccatcatccccacgccggtcctcacctctcctggagcagtccccccgcttccttccccatccaaggaggaggagggactaagggctcaggtgcgggacctggaggagaaactagagaccctgagactgaaacgggcagaagacaaagcaaagctaaaagagctggagaaacacaaaatccagctggagcaggtgcaggaatggaagagcaaaatgcaggagcagcaggccgacctgcagcggcgcctcaaggaggcgagaaaggaagccaaggaggcgctggaggcaaaggaacgctatatggaggagatggctgatactgctgatgccattgagatggccactttggacaaggagatggctgaagagcgggctgagtccctgcagcaggaggtggaggcactgaaggagcgggtggacgagctcactactgacttagagatcctcaaggctgagattgaagagaagggctcagatggcgctgcatccagttatcagctcaagcagcttgaggagcagaatgcccgcctgaaggatgccctggtgaggatgcgggatctttcttcctcagagaagcaggagcatgtgaagctccagaagctcatggaaaagaagaaccaagagctggaagttgtgaggcaacagcgggagcgtctgcaggaggagctaagccaggcagagagcaccattgatgagctcaaggagcaggtggatgctgctctgggtgctgaggagatggtggagatgctgacagatcggaacctgaatctggaagagaaagtgcgcgagttgagggagactgtgggagacttggaagcgatgaatgagatgaacgatgagctgcaggagaatgcacgtgagacagaactggagctgcgggagcagctggacatggcaggcgcgcgggttcgtgaggcccagaagcgtgtggaggcagcccaggagacggttgcagactaccagcagaccatcaagaagtaccgccagctgaccgcccatctacaggatgtgaatcgggaactgacaaaccagcaggaagcatctgtggagaggcaacagcagccacctccagagacctttgacttcaaaatcaagtttgctgagactaaggcccatgccaaggcaattgagatggaattgaggcagatggaggtggcccaggccaatcgacacatgtccctgctgacagccttcatgcctgacagcttccttcggccaggtggggaccatgactgcgttctggtgctgttgctcatgcctcgtctcatttgcaaggcagagctgatccggaagcaggcccaggagaagtttgaactaagtgagaactgttcagagcggcctgggctgcgaggagctgctggggagcaactcagctttgctgctggactggtgtactcgctgagcctgctgcaggccacgctacaccgctatgagcatgccctctctcagtgcagtgtggatgtgtataagaaagtgggcagcctgtaccctgagatgagtgcccatgagcgctccttggatttcctcattgaactgctgcacaaggatcagctggatgagactgtcaatgtggagcctctcaccaaggccatcaagtactatcagcatctgtacagcatccaccttgccgaacagcctgaggactgtactatgcagctggctgaccacattaagttcacgcagagtgctctggactgcatgagtgtggaggtaggacggctgcgtgccttcttgcagggtgggcaggaggctacagatattgccctcctgctccgggatctggaaacttcatgcagtgacatccgccagttctgcaagaagatccgaaggcgaatgccagggacagatgctcctgggatcccagctgcactggcctttggaccacaggtatctgacacgctcctagactgcaggaaacacttgacgtgggtcgtggctgtgctgcaggaggtggcagctgctgctgcccagctcattgccccactggcagagaatgaggggctacttgtggctgctctggaggaactggctttcaaagcaagcgagcaggtgggcctggatggctgggtagaaggtgtggggagagttagtgaccagtgtggggcttttacttctgcccttggctcctgcagatctatgggaccccctccagcagcccctatgagtgtctgcgccagtcatgcaacatcctcatcagtaccatgaacaagctggccacagccatgcaggagggggagtatgatgcagagcggccccccagcaagcctccaccggttgaactgcgggctgctgcccttcgtgcagagatcacagatgctgaaggcctgggtttgaagctcgaagatcgagagacagttattaaggagttgaagaagtcactcaagattaagggagaggagctaagtgaggccaatgtgcggctgagcctcctggagaagaagttggacagtgctgccaaggatgcagatgagcgcatcgagaaagtccagactcggctggaggagacccaggcactgctgcgaaagaaggagaaagagtttgaggagacaatggatgcactccaggctgacatcgaccagctggaggcagagaaggcagaactaaagcagcgtctgaacagccagtccaaacgcacgattgagggactccggggccctcctccttcaggcattgctactctggtctctggcattgctggtggagccatccctgggcaggctccagggtctgtgccaggcccagggctggtgaaggactcaccactgctgcttcagcagatctctgccatgaggctgcacatctcccagctccagcatgagaacagcatcctcaagggagcccagatgaaggcatccttggcatccctgccccctctgcatgttgcaaagctatcccatgagggccctggcagtgagttaccagctggagcgctgtatcgtaagaccagccagctgctggagacattgaatcaattgagcacacacacgcacgtagtagacatcactcgcaccagccctgctgccaagagcccgtcggcccaacttatggagcaagtggctcagcttaagtccctgagtgacaccgtcgagaagctcaaggatgaggtcctcaaggagacagtatctcagcgccctggagccacagtacccactgactttgccaccttcccttcatcagccttcctcagggccaaggaggagcagcaggatgacacagtctacatgggcaaagtgaccttctcatgtgcggctggttttggacagcgacaccggctggtgctgacccaggagcagctgcaccagcttcacagtcgcctcatctcctaagcactcctttcccctgctgtccccttcgaccctcagccctctggtgccgctctgcccgatgcacagccacctcagccagcccccaggtagaaacgtgggttaagctcttcctgccccgttcagcttcactcccaccctttcagcgtcctgccccttcaccttgacccgggttcccccactcccattccctggcctctgccataatttgttgttcaactgctccctccttcctgaggggcctcagggcttgtggggggtaggctgagaccccaccaccaaaggttaagtgaggtccccttgattgaggacttcaccccttgattaaagcaacttctgcttcagt

SEQ ID NO: 8933 - DNA, 565 bp, Homo sapiens
  source 1..565: mol_type = unassigned DNA
acttgatgcttatgggcctgctgaggccttacatcctgggggagaggggaacagtgatgacgcccagcggcagcaggatgagtgcggaggcaagcgcccggcctctgcgggtgggctcccgtgtagaggtgattggaaaaggccaccgaggcactgtggcctatgttggagccacactgtttgccactggcaaatgggtaggcgtgattctggatgaagcaaagggcaaaaatgatggaactgttcaaggcaggaagtacttcacttgtgatgaagggcatggcatctttgtgcgccagtcccagatccaggtatttgaagatggagcagatactacttccccagagacacctgattcttctgcttcaaaagtcctcaaaagagagggaactgatacaactgcaaagactagcaaactgcggggactgaagcctaagaaggcaccgacagcccgaaagaccacaactcggcgacccaagcccacgcgcccagccagtactggggtggctggggccagtagctccctgggcccctctggctcagcgtcagcaggtgagctgagcag

SEQ ID NO: 8934 - DNA, 4365 bp, Homo sapiens
  source 1..4365: mol_type = unassigned DNA
acagtgcgcgtgcgcttatcctgtcccaggtgtccagctttgtgcctgattgatgtaatcccggctgcggtcggtgcgcagttttcagtcagggctggactgcgggaaaagagggttcactcgacccagaacgcctctgggcctctgggccgaagggttctgggcggtcctggaagggtctggcggcgagtcgggcagcccacgagggcggggagggcggggccggccccgcagggtcttgggcgtcggtcgtcggtggggtcggagctgggcgcggagcccctcacagtgcagacgcccagcggcagcaggatgagtgcggaggcaagcgcccggcctctgcgggtgggctcccgtgtagaggtgattggaaaaggccaccgaggcactgtggcctatgttggagccacactgtttgccactggcaaatgggtaggcgtgattctggatgaagcaaagggcaaaaatgatggaactgttcaaggcaggaagtacttcacttgtgatgaagggcatggcatctttgtgcgccagtcccagatccaggtatttgaagatggagcagatactacttccccagagacacctgattcttctgcttcaaaagtcctcaaaagagagggaactgatacaactgcaaagactagcaaactgcccacgcgcccagccagtactggggtggctggggccagtagctccctgggcccctctggctcagcgtcagcaggtgagctgagcagcagtgagcccagcaccccggctcagactccgctggcagcacccatcatccccacgccggtcctcacctctcctggagcagtccccccgcttccttccccatccaaggaggaggagggactaagggctcaggtgcgggacctggaggagaaactagagaccctgagactgaaacgggcagaagacaaagcaaagctaaaagagctggagaaacacaaaatccagctggagcaggtgcaggaatggaagagcaaaatgcaggagcagcaggccgacctgcagcggcgcctcaaggaggcgagaaaggaagccaaggaggcgctggaggcaaaggaacgctatatggaggagatggctgatactgctgatgccattgagatggccactttggacaaggagatggctgaagagcgggctgagtccctgcagcaggaggtggaggcactgaaggagcgggtggacgagctcactactgacttagagatcctcaaggctgagattgaagagaagggctcagatggcgctgcatccagttatcagctcaagcagcttgaggagcagaatgcccgcctgaaggatgccctggtgaggatgcgggatctttcttcctcagagaagcaggagcatgtgaagctccagaagctcatggaaaagaagaaccaagagctggaagttgtgaggcaacagcgggagcgtctgcaggaggagctaagccaggcagagagcaccattgatgagctcaaggagcaggtggatgctgctctgggtgctgaggagatggtggagatgctgacagatcggaacctgaatctggaagagaaagtgcgcgagttgagggagactgtgggagacttggaagcgatgaatgagatgaacgatgagctgcaggagaatgcacgtgagacagaactggagctgcgggagcagctggacatggcaggcgcgcgggttcgtgaggcccagaagcgtgtggaggcagcccaggagacggttgcagactaccagcagaccatcaagaagtaccgccagctgaccgcccatctacaggatgtgaatcgggaactgacaaaccagcaggaagcatctgtggagaggcaacagcagccacctccagagacctttgacttcaaaatcaagtttgctgagactaaggcccatgccaaggcaattgagatggaattgaggcagatggaggtggcccaggccaatcgacacatgtccctgctgacagccttcatgcctgacagcttccttcggccaggtggggaccatgactgcgttctggtgctgttgctcatgcctcgtctcatttgcaaggcagagctgatccggaagcaggcccaggagaagtttgaactaagtgagaactgttcagagcggcctgggctgcgaggagctgctggggagcaactcagctttgctgctggactggtgtactcgctgagcctgctgcaggccacgctacaccgctatgagcatgccctctctcagtgcagtgtggatgtgtataagaaagtgggcagcctgtaccctgagatgagtgcccatgagcgctccttggatttcctcattgaactgctgcacaaggatcagctggatgagactgtcaatgtggagcctctcaccaaggccatcaagtactatcagcatctgtacagcatccaccttgccgaacagcctgaggactgtactatgcagctggctgaccacattaagttcacgcagagtgctctggactgcatgagtgtggaggtaggacggctgcgtgccttcttgcagggtgggcaggaggctacagatattgccctcctgctccgggatctggaaacttcatgcagtgacatccgccagttctgcaagaagatccgaaggcgaatgccagggacagatgctcctgggatcccagctgcactggcctttggaccacaggtatctgacacgctcctagactgcaggaaacacttgacgtgggtcgtggctgtgctgcaggaggtggcagctgctgctgcccagctcattgccccactggcagagaatgaggggctacttgtggctgctctggaggaactggctttcaaagcaagcgagcagatctatgggaccccctccagcagcccctatgagtgtctgcgccagtcatgcaacatcctcatcagtaccatgaacaagctggccacagccatgcaggagggggagtatgatgcagagcggccccccagcaagcctccaccggttgaactgcgggctgctgcccttcgtgcagagatcacagatgctgaaggcctgggtttgaagctcgaagatcgagagacagttattaaggagttgaagaagtcactcaagattaagggagaggagctaagtgaggccaatgtgcggctgagcctcctggagaagaagttggacagtgctgccaaggatgcagatgagcgcatcgagaaagtccagactcggctggaggagacccaggcactgctgcgaaagaaggagaaagagtttgaggagacaatggatgcactccaggctgacatcgaccagctggaggcagagaaggcagaactaaagcagcgtctgaacagccagtccaaacgcacgattgagggactccggggccctcctccttcaggcattgctactctggtctctggcattgctggtggagccatccctgggcaggctccagggtctgtgccaggcccagggctggtgaaggactcaccactgctgcttcagcagatctctgccatgaggctgcacatctcccagctccagcatgagaacagcatcctcaagggagcccagatgaaggcatccttggcatccctgccccctctgcatgttgcaaagctatcccatgagggccctggcagtgagttaccagctggagcgctgtatcgtaagaccagccagctgctggagacattgaatcaattgagcacacacacgcacgtagtagacatcactcgcaccagccctgctgccaagagcccgtcggcccaacttatggagcaagtggctcagcttaagtccctgagtgacaccgtcgagaagctcaaggatgaggtcctcaaggagacagtatctcagcgccctggagccacagtacccactgactttgccaccttcccttcatcagccttcctcagggccaaggaggagcagcaggatgacacagtctacatgggcaaagtgaccttctcatgtgcggctggttttggacagcgacaccggctggtgctgacccaggagcagctgcaccagcttcacagtcgcctcatctcctaagcactcctttcccctgctgtccccttcgaccctcagccctctggtgccgctctgcccgatgcacagccacctcagccagcccccaggtagaaacgtgggttaagctcttcctgccccgttcagcttcactcccaccctttcagcgtcctgccccttcaccttgacccgggttcccccactcccattccctggcctctgccataatttgttgttcaactgctccctccttcctgaggggcctcagggcttgtggggggtaggctgagaccccaccaccaaaggttaagtgaggtccccttgattgaggacttcaccccttgattaaagcaacttctgcttcag

SEQ ID NO: 8935 - DNA, 4145 bp, Homo sapiens
  source 1..4145: mol_type = unassigned DNA
agtggctccacccccatggagcagaggagggtgggtgcatgacgtcaggtggagctggtgctgcggccactgaggctgccatcagcctaagctggtgaactgggccaggcaccgctccggtgcctgccggagcctggcgatccagctgcacgtctgcgggggcctctgtgtcagagcggcggccgtttgcaggctgggaagctgccgcaccgggaggctgagactgcattgttgggatttgatgcactaatctcctgtctccgccgcctttccctctgttcggtctcttgccctccctcccttcgtctgtccttcctccgtgtgtttgtctatcctcctctgtccctcctctttcctctccttgctttctttggttttctgcaatgatgagacaggcaccgacagcccgaaagaccacaactcggcgacccaagcccacgcgcccagccagtactggggtggctggggccagtagctccctgggcccctctggctcagcgtcagcaggtgagctgagcagcagtgagcccagcaccccggctcagactccgctggcagcacccatcatccccacgccggtcctcacctctcctggagcagtccccccgcttccttccccatccaaggaggaggagggactaagggctcaggtgcgggacctggaggagaaactagagaccctgagactgaaacgggcagaagacaaagcaaagctaaaagagctggagaaacacaaaatccagctggagcaggtgcaggaatggaagagcaaaatgcaggagcagcaggccgacctgcagcggcgcctcaaggaggcgagaaaggaagccaaggaggcgctggaggcaaaggaacgctatatggaggagatggctgatactgctgatgccattgagatggccactttggacaaggagatggctgaagagcgggctgagtccctgcagcaggaggtggaggcactgaaggagcgggtggacgagctcactactgacttagagatcctcaaggctgagattgaagagaagggctcagatggcgctgcatccagttatcagctcaagcagcttgaggagcagaatgcccgcctgaaggatgccctggtgaggatgcgggatctttcttcctcagagaagcaggagcatgtgaagctccagaagctcatggaaaagaagaaccaagagctggaagttgtgaggcaacagcgggagcgtctgcaggaggagctaagccaggcagagagcaccattgatgagctcaaggagcaggtggatgctgctctgggtgctgaggagatggtggagatgctgacagatcggaacctgaatctggaagagaaagtgcgcgagttgagggagactgtgggagacttggaagcgatgaatgagatgaacgatgagctgcaggagaatgcacgtgagacagaactggagctgcgggagcagctggacatggcaggcgcgcgggttcgtgaggcccagaagcgtgtggaggcagcccaggagacggttgcagactaccagcagaccatcaagaagtaccgccagctgaccgcccatctacaggatgtgaatcgggaactgacaaaccagcaggaagcatctgtggagaggcaacagcagccacctccagagacctttgacttcaaaatcaagtttgctgagactaaggcccatgccaaggcaattgagatggaattgaggcagatggaggtggcccaggccaatcgacacatgtccctgctgacagccttcatgcctgacagcttccttcggccaggtggggaccatgactgcgttctggtgctgttgctcatgcctcgtctcatttgcaaggcagagctgatccggaagcaggcccaggagaagtttgaactaagtgagaactgttcagagcggcctgggctgcgaggagctgctggggagcaactcagctttgctgctggactggtgtactcgctgagcctgctgcaggccacgctacaccgctatgagcatgccctctctcagtgcagtgtggatgtgtataagaaagtgggcagcctgtaccctgagatgagtgcccatgagcgctccttggatttcctcattgaactgctgcacaaggatcagctggatgagactgtcaatgtggagcctctcaccaaggccatcaagtactatcagcatctgtacagcatccaccttgccgaacagcctgaggactgtactatgcagctggctgaccacattaagttcacgcagagtgctctggactgcatgagtgtggaggtaggacggctgcgtgccttcttgcagggtgggcaggaggctacagatattgccctcctgctccgggatctggaaacttcatgcagtgacatccgccagttctgcaagaagatccgaaggcgaatgccagggacagatgctcctgggatcccagctgcactggcctttggaccacaggtatctgacacgctcctagactgcaggaaacacttgacgtgggtcgtggctgtgctgcaggaggtggcagctgctgctgcccagctcattgccccactggcagagaatgaggggctacttgtggctgctctggaggaactggctttcaaagcaagcgagcagatctatgggaccccctccagcagcccctatgagtgtctgcgccagtcatgcaacatcctcatcagtaccatgaacaagctggccacagccatgcaggagggggagtatgatgcagagcggccccccagcaagcctccaccggttgaactgcgggctgctgcccttcgtgcagagatcacagatgctgaaggcctgggtttgaagctcgaagatcgagagacagttattaaggagttgaagaagtcactcaagattaagggagaggagctaagtgaggccaatgtgcggctgagcctcctggagaagaagttggacagtgctgccaaggatgcagatgagcgcatcgagaaagtccagactcggctggaggagacccaggcactgctgcgaaagaaggagaaagagtttgaggagacaatggatgcactccaggctgacatcgaccagctggaggcagagaaggcagaactaaagcagcgtctgaacagccagtccaaacgcacgattgagggactccggggccctcctccttcaggcattgctactctggtctctggcattgctggtggagccatccctgggcaggctccagggtctgtgccaggcccagggctggtgaaggactcaccactgctgcttcagcagatctctgccatgaggctgcacatctcccagctccagcatgagaacagcatcctcaagggagcccagatgaaggcatccttggcatccctgccccctctgcatgttgcaaagctatcccatgagggccctggcagtgagttaccagctggagcgctgtatcgtaagaccagccagctgctggagacattgaatcaattgagcacacacacgcacgtagtagacatcactcgcaccagccctgctgccaagagcccgtcggcccaacttatggagcaagtggctcagcttaagtccctgagtgacaccgtcgagaagctcaaggatgaggtcctcaaggagacagtatctcagcgccctggagccacagtacccactgactttgccaccttcccttcatcagccttcctcagggccaaggaggagcagcaggatgacacagtctacatgggcaaagtgaccttctcatgtgcggctggttttggacagcgacaccggctggtgctgacccaggagcagctgcaccagcttcacagtcgcctcatctcctaagcactcctttcccctgctgtccccttcgaccctcagccctctggtgccgctctgcccgatgcacagccacctcagccagcccccaggtagaaacgtgggttaagctcttcctgccccgttcagcttcactcccaccctttcagcgtcctgccccttcaccttgacccgggttcccccactcccattccctggcctctgccataatttgttgttcaactgctccctccttcctgaggggcctcagggcttgtggggggtaggctgagaccccaccaccaaaggttaagtgaggtccccttgattgaggacttcaccccttgattaaagcaacttctgcttcag

SEQ ID NO: 8936 - DNA, 4024 bp, Homo sapiens
  source 1..4024: mol_type = unassigned DNA
atcagctggcaagcaggattctgtgtctctgggttcaggaatcctcaggcagcagaggggacttgctcctcagcccccatcactgcccccacccctacccgtgtaggccaccgagtgaggcccatggactggggagggctgtgcctgacgactcctgtgtccctctatgagggcccagcgccctgaccctcctgcctaggtttctaccttttctctctgtctttggccagctgggggagggggtagaggccgggtgagcaacatggcacagagcaagaggcacgtgtacagccggacgcccagcggcagcaggatgagtgcggaggcaagcgcccggcctctgcgggtgggctcccgtgtagaggtgattggaaaaggccaccgaggcactgtggcctatgttggagccacactgtttgccactggcaaatgggtaggcgtgattctggatgaagcaaagggcaaaaatgatggaactgttcaaggcaggaagtacttcacttgtgatgaagggcatggcatctttgtgcgccagtcccagatccaggtatttgaagatggagcagatactacttccccagagacacctgattcttctgcttcaaaagtcctcaaaagagagggaactgatacaactgcaaagactagcaaactgcccacgcgcccagccagtactggggtggctggggccagtagctccctgggcccctctggctcagcgtcagcaggtgagctgagcagcagtgagcccagcaccccggctcagactccgctggcagcacccatcatccccacgccggtcctcacctctcctggagcagtccccccgcttccttccccatccaaggaggaggagggactaagggctcaggtgcgggacctggaggagaaactagagaccctgagactgaaacgggcagaagacaaagcaaagctaaaagagctggagaaacacaaaatccagctggagcaggtgcaggaatggaagagcaaaatgcaggagcagcaggccgacctgcagcggcgcctcaaggaggcgagaaaggaagccaaggaggcgctggaggcaaaggaacgctatatggaggagatggctgatactgctgatgccattgagatggccactttggacaaggagatggctgaagagcgggctgagtccctgcagcaggaggtggaggcactgaaggagcgggtggacgagctcactactgacttagagatcctcaaggctgagattgaagagaagggctcagatggcgctgcatccagttatcagctcaagcagcttgaggagcagaatgcccgcctgaaggatgccctggtgaggatgcgggatctttcttcctcagagaagcaggagcatgtgaagctccagaagctcatggaaaagaagaaccaagagctggaagttgtgaggcaacagcgggagcgtctgcaggaggagctaagccaggcagagagcaccattgatgagctcaaggagcaggtggatgctgctctgggtgctgaggagatggtggagatgctgacagatcggaacctgaatctggaagagaaagtgcgcgagttgagggagactgtgggagacttggaagcgatgaatgagatgaacgatgagctgcaggagaatgcacgtgagacagaactggagctgcgggagcagctggacatggcaggcgcgcgggttcgtgaggcccagaagcgtgtggaggcagcccaggagacggttgcagactaccagcagaccatcaagaagtaccgccagctgaccgcccatctacaggatgtgaatcgggaactgacaaaccagcaggaagcatctgtggagaggcaacagcagccacctccagagacctttgacttcaaaatcaagtttgctgagactaaggcccatgccaaggcaattgagatggaattgaggcagatggaggtggcccaggccaatcgacacatgtccctgctgacagccttcatgcctgacagcttccttcggccaggtggggaccatgactgcgttctggtgctgttgctcatgcctcgtctcatttgcaaggcagagctgatccggaagcaggcccaggagaagtttgaactaagtgagaactgttcagagcggcctgggctgcgaggagctgctggggagcaactcagctttgctgctggactggtgtactcgctgagcctgctgcaggccacgctacaccgctatgagcatgccctctctcagtgcagtgtggatgtgtataagaaagtgggcagcctgtaccctgagatgagtgcccatgagcgctccttggatttcctcattgaactgctgcacaaggatcagctggatgagactgtcaatgtggagcctctcaccaaggccatcaagtactatcagcatctgtacagcatccaccttgccgaacagcctgaggactgtactatgcagctggctgaccacattaagttcacgcagagtgctctggactgcatgagtgtggaggtaggacggctgcgtgccttcttgcagggtgggcaggaggctacagatattgccctcctgctccgggatctggaaacttcatgcagtgacatccgccagttctgcaagaagatccgaaggcgaatgccagggacagatgctcctgggatcccagctgcactggcctttggaccacaggtatctgacacgctcctagactgcaggaaacacttgacgtgggtcgtggctgtgctgcaggaggtggcagctgctgctgcccagctcattgccccactggcagagaatgaggggctacttgtggctgctctggaggaactggctttcaaagcaagcgagcagatctatgggaccccctccagcagcccctatgagtgtctgcgccagtcatgcaacatcctcatcagtaccatgaacaagctggccacagccatgcaggagggggagtatgatgcagagcggccccccagcaagcctccaccggttgaactgcgggctgctgcccttcgtgcagagatcacagatgctgaaggcctgggtttgaagctcgaagatcgagagacagttattaaggagttgaagaagtcactcaagattaagggagaggagctaagtgaggccaatgtgcggctgagcctcctggagaagaagttggacagtgctgccaaggatgcagatgagcgcatcgagaaagtccagactcggctggaggagacccaggcactgctgcgaaagaaggagaaagagtttgaggagacaatggatgcactccaggctgacatcgaccagctggaggcagagaaggcagaactaaagcagcgtctgaacagccagtccaaacgcacgattgagggactccggggccctcctccttcaggcattgctactctggtctctggcattgctggtggagccatccctgggcaggctccagggtctgtgccaggcccagggctggtgaaggactcaccactgctgcttcagcagatctctgccatgaggctgcacatctcccagctccagcatgagaacagcatcctcaagggagcccagatgaaggcatccttggcatccctgccccctctgcatgttgcaaagctatcccatgagggccctggcagtgagttaccagctggagcgctgtatcgtaagaccagccagctgctggagacattgaatcaattgagcacacacacgcacgtagtagacatcactcgcaccagccctgctgccaagagcccgtcggcccaacttatggagcaagtggctcagcttaagtccctgagtgacaccgtcgagaagctcaaggatgaggtcctcaaggagacagtatctcagcgccctggagccacagtacccactgactttgccaccttcccttcatcagccttcctcagggccaaggaggagcagcaggatgacacagtctacatgggcaaagtgaccttctcatgtgcggctggttttggacagcgacaccggctggtgctgacccaggagcagctgcaccagcttcacagtcgcctcatctcctaa

SEQ ID NO: 8937 - DNA, 1677 bp, Homo sapiens
  source 1..1677: mol_type = unassigned DNA
aacccagcctctcccctacccgaacaccggccccggctccaccgaggcccgggtcccccagcccgtctcgccgccgccatggcggaccctaaatacgccgaccttcccggcattgccaggaatgagccagatgtttatgaaactagcgacctacctgaggatgatcaagcggagttcgatgcgtttgcacaagagctggaggagctgacaagcacaagtgtggaacacatcattgtcaatcctaatgctgcctatgacaagttcaaggacaagagagtggggacaaagggacttgatttctcagatcgtattggaaaaaccaagaggacaggatatgaatctggagaatatgagatgcttggagagggtctgggagtgaaggagacaccccagcaaaagtaccagcgcctactgcatgaggtccaagagctgacaactgaagttgaaaaaatcaagacgacagtgaaggagtcagccacagaggagaagctgacccctgtgttgctggctaaacagctggcagccctgaagcagcagctggttgcttcccacctggagaagctgctgggaccagatgctgcaatcaaccttaccgaccccgatggcgccctggctaagcgcctactactgcagctggaagcaacaaagaacagcaaagggggatcagggggaaaaaccactgggacccccccagatagcagccttgtcacttatgaactacattctcggcctgagcaggacaagttctctcaagctgccaaagtcgcagaacttgaaaagcgcctgacagagctggagacagctgtacgttgtgatcaggatgctcagaatcccctttctgcaggtctacagggagcctgtctcatggagactgtagagctgttgcaagcaaaggtgagcgccctagaccttgcagttttggatcaagtggaggctcggctacagagtgtcctgggaaaggtgaacgagattgccaagcataaagcctctgtagaagatgcagatacacaaagcaaggtgcaccagctatatgaaactatacagcgctggagccccattgcctccaccctccctgagctggtgcagagacttgtcaccatcaagcagctgcacgagcaagccatgcagtttggtcagctcctgacacacttggataccacccagcagatgattgctaattccttgaaggacaataccaccctcttgacccaggtgcagacaaccatgcgtgaaaacctggccacagttgaggggaactttgccagcattgatgaacggatgaagaagctgggaaagtgagcacatttgggagctggagaacaggggttatccctacccctgtgaactctgttaacagcttacatagggtttcccctttactataactctagcatccccatcccatttgacactgggggcaagggttcttcttgcatgtggggtttatacccctcccctgatgaatacagagtggtagctaggggttggttatcatcagaaggtggtctcccctcaggcctgggggataaggacgtgggcccagccacatgccaactcatgtccaatactgctttgcctggtgtggggaaggattgggtcttgtcccccaacacagcttctgtggctgactgtaatactgtacaactgtttctgaccattaaatgctgttgtactctg

SEQ ID NO: 8938 - DNA, 1515 bp, Homo sapiens
  source 1..1515: mol_type = unassigned DNA
atgtatgcacagggaacagaggattcaaggactcttgaggagctgacaagcacaagtgtggaacacatcattgtcaatcctaatgctgcctatgacaagttcaaggacaagagagtggggacaaagggacttgatttctcagatcgtattggaaaaaccaagaggacaggatatgaatctggagaatatgagatgcttggagagggtctgggagtgaaggagacaccccagcaaaagtaccagcgcctactgcatgaggtccaagagctgacaactgaagttgaaaaaatcaagacgacagtgaaggagtcagccacagaggagaagctgacccctgtgttgctggctaaacagctggcagccctgaagcagcagctggttgcttcccacctggagaagctgctgggaccagatgctgcaatcaaccttaccgaccccgatggcgccctggctaagcgcctactactgcagctggaagcaacaaagaacagcaaagggggatcagggggaaaaaccactgggacccccccagatagcagccttgtcacttatgaactacattctcggcctgagcaggacaagttctctcaagctgccaaagtcgcagaacttgaaaagcgcctgacagagctggagacagctgtacgttgtgatcaggatgctcagaatcccctttctgcaggtctacagggagcctgtctcatggagactgtagagctgttgcaagcaaaggtgagcgccctagaccttgcagttttggatcaagtggaggctcggctacagagtgtcctgggaaaggtgaacgagattgccaagcataaagcctctgtagaagatgcagatacacaaagcaaggtgcaccagctatatgaaactatacagcgctggagccccattgcctccaccctccctgagctggtgcagagacttgtcaccatcaagcagctgcacgagcaagccatgcagtttggtcagctcctgacacacttggataccacccagcagatgattgctaattccttgaaggacaataccaccctcttgacccaggtgcagacaaccatgcgtgaaaacctggccacagttgaggggaactttgccagcattgatgaacggatgaagaagctgggaaagtgagcacatttgggagctggagaacaggggttatccctacccctgtgaactctgttaacagcttacatagggtttcccctttactataactctagcatccccatcccatttgacactgggggcaagggttcttcttgcatgtggggtttatacccctcccctgatgaatacagagtggtagctaggggttggttatcatcagaaggtggtctcccctcaggcctgggggataaggacgtgggcccagccacatgccaactcatgtccaatactgctttgcctggtgtggggaaggattgggtcttgtcccccaacacagcttctgtggctgactgtaatactgtacaactgtttctgaccattaaatgctgttgtactctg

SEQ ID NO: 8939 - DNA, 1439 bp, Homo sapiens
  source 1..1439: mol_type = unassigned DNA
gaacaccggccccggctccaccgaggcccgggtcccccagcccgtctcgccgccgccatggcggaccctaaatacgccgaccttcccggcattgccaggaatgagccagatgtttatgaaactagcgacctacctgaggatgatcaagcggagttcgatgcgatgccccagatcttcaagacactgctggagtaggtgctactggaggactagagtgtgctcccgggccacagccttggagaggctccagaggatgccagcgccaggaggagctgacaagcacaagtgtggaacacatcattgtcaatcctaatgctgcctatgacaagttcaaggacaagagagtggggacaaagggacttgatttctcagatcgtattggaaaaaccaagaggacaggatatgaatctggagaatatgagatgcttggagagggtctgggagtgaaggagacaccccagcaaaagtaccagcgcctactgcatgaggtccaagagctgacaactgaagttgaaaaaatcaagacgacagtgaaggagtcagccacagaggagaagctgacccctgtgttgctggctaaacagctggcagccctgaagcagcagctggttgcttcccacctggagaagctgctgggaccagatgctgcaatcaaccttaccgaccccgatggcgccctggctaagcgcctactactgcagctggaagcaacaaagaacagcaaagggggatcagggggaaaaaccactgggacccccccagatagcagccttgtcacttatgaactacattctcggcctgagcaggacaagttctctcaagctgccaaagtcgcagaacttgaaaagcgcctgacagagctggagacagctgtacgttgtgatcaggatgctcagaatcccctttctgcaggtctacagggagcctgtctcatggagactgtagagctgttgcaagcaaaggtgagcgccctagaccttgcagttttggatcaagtggaggctcggctacagagtgtcctgggaaaggtgaacgagattgccaagcataaagcctctgtagaagatgcagatacacaaagcaaggtgcaccagctatatgaaactatacagcgctggagccccattgcctccaccctccctgagctggtgcagagacttgtcaccatcaagcagctgcacgagcaagccatgcagtttggtcagctcctgacacacttggataccacccagcagatgattgctaattccttgaaggacaataccaccctcttgacccaggtgcagacaaccatgcgtgaaaacctggccacagttgaggggaactttgccagcattgatgaacggatgaagaagctgggaaagtgagcacatttgggagctggagaacaggggttatccctacccctgtgaactctgttaacagcttacatagggttt

SEQ ID NO: 8940 - DNA, 1745 bp, Homo sapiens
  source 1..1745: mol_type = unassigned DNA
gctactgctgtcgcgagacttcctgctcatctgccgctccctttgccgccgccttagcccgggacccgaacccagcctctcccctacccgaacaccggccccggctccaccgaggcccgggtcccccagcccgtctcgccgccgccatggcggaccctaaatacgccgaccttcccggcattgccaggaatgagccagatgtttatgaaactagcgacctacctgaggatgatcaagcggagttcgatgcgactgttcaacatctagaggagctgacaagcacaagtgtggaacacatcattgtcaatcctaatgctgcctatgacaagttcaaggacaagagagtggggacaaagggacttgatttctcagatcgtattggaaaaaccaagaggacaggatatgaatctggagaatatgagatgcttggagagggtctgggagtgaaggagacaccccagcaaaagtaccagcgcctactgcatgaggtccaagagctgacaactgaagttgaaaaaatcaagacgacagtgaaggagtcagccacagaggagaagctgacccctgtgttgctggctaaacagctggcagccctgaagcagcagctggttgcttcccacctggagaagctgctgggaccagatgctgcaatcaaccttaccgaccccgatggcgccctggctaagcgcctactactgcagctggaagcaacaaagaacagcaaagggggatcagggggaaaaaccactgggacccccccagatagcagccttgtcacttatgaactacattctcggcctgagcaggacaagttctctcaagctgccaaagtcgcagaacttgaaaagcgcctgacagagctggagacagctgtacgttgtgatcaggatgctcagaatcccctttctgcaggtctacagggagcctgtctcatggagactgtagagctgttgcaagcaaaggtgagcgccctagaccttgcagttttggatcaagtggaggctcggctacagagtgtcctgggaaaggtgaacgagattgccaagcataaagcctctgtagaagatgcagatacacaaagcaaggtgcaccagctatatgaaactatacagcgctggagccccattgcctccaccctccctgagctggtgcagagacttgtcaccatcaagcagctgcacgagcaagccatgcagtttggtcagctcctgacacacttggataccacccagcagatgattgctaattccttgaaggacaataccaccctcttgacccaggtgcagacaaccatgcgtgaaaacctggccacagttgaggggaactttgccagcattgatgaacggatgaagaagctgggaaagtgagcacatttgggagctggagaacaggggttatccctacccctgtgaactctgttaacagcttacatagggtttcccctttactataactctagcatccccatcccatttgacactgggggcaagggttcttcttgcatgtggggtttatacccctcccctgatgaatacagagtggtagctaggggttggttatcatcagaaggtggtctcccctcaggcctgggggataaggacgtgggcccagccacatgccaactcatgtccaatactgctttgcctggtgtggggaaggattgggtcttgtcccccaacacagcttctgtggctgactgtaatactgtacaactgtttctgaccattaaatgctgttgtactctg

SEQ ID NO: 8941 - DNA, 2061 bp, Homo sapiens
  source 1..2061: mol_type = unassigned DNA
aatcctaggcggcgtcccctggccattacctcattccctggcctcgttctccccaatcccggcctctccaggggtgtggcagcagggctgttctcgcgacttttgctttacccttctgctgtgctactgctgtcgcgagacttcctgctcatctgccgctccctttgccgccgccttagcccgggacccgaacccagcctctcccctacccgaacaccggccccggctccaccgaggcccgggtcccccagcccgtctcgccgccgccatggcggaccctaaatacgccgaccttcccggcattgccaggaatgagccagatgtttatgaaactagcgacctacctgaggatgatcaagcggagttcgatgcggaggagctgacaagcacaagtgtggaacacatcattgtcaatcctaatgctgcctatgacaagttcaaggacaagagagtggggacaaagggacttgatttctcagatcgtattggaaaaaccaagaggacaggatatgaatctggagaatatgagatgcttggagagggtctgggagtgaaggagacaccccagcaaaagtaccagcgcctactgcatgaggtccaagagctgacaactgaagttgaaaaaatcaagacgacagtgaaggagtcagccacagaggagaagctgacccctgtgttgctggctaaacagctggcagccctgaagcagcagctggttgcttcccacctggagaagctgctgggaccagatgctgcaatcaaccttaccgaccccgatggcgccctggctaagcgcctactactgcagctggaagcaacaaagaacagcaaagggggatcagggggaaaaaccactgggacccccccagatagcagccttgtcacttatgaactacattctcggcctgagcaggacaagttctctcaagctgccaaagtcgcagaacttgaaaagcgcctgacagagctggagacagctgtacgttgtgatcaggatgctcagaatcccctttctgcaggtctacagggagcctgtctcatggagactgtagagctgttgcaagcaaaggtgagcgccctagaccttgcagttttggatcaagtggaggctcggctacagagtgtcctgggaaaggtgaacgagattgccaagcataaagcctctgtagaagatgcagatacacaaagcaaggtgcaccagctatatgaaactatacagcgctggagccccattgcctccaccctccctgagctggtgcagagacttgtcaccatcaagcagctgcacgagcaagccatgcagtttggtcagctcctgacacacttggataccacccagcagatgattgctaattccttgaaggacaataccaccctcttgacccaggtgcagacaaccatgcgtgaaaacctggccacagttgaggggaactttgccagcattgatgaacggatgaagaagctgggaaagtgagcacatttgggagctggagaacaggggttatccctacccctgtgaactctgttaacagcttacatagggtttcccctttactataactctagcatccccatcccatttgacactgggggcaagggttcttcttgcatgtggggtttatacccctcccctgatgaatacagagtggtagctaggggttggttatcatcagaaggtggtctcccctcaggcctgggggataaggacgtgggcccagccacatgccaactcatgtccaatactgctttgcctggtgtggggaaggattgggtcttgtcccccaacacagcttctgtggctgactgtaatactgtacaactgtttctgaccattaaatgctgttgtactctgtgtggcctctgctgtgtttcctggggaggaagcagcactaggatatagatattcattcgtcataacaggcaatctaagccactctatactacaagagatggatttaaattgtaacctgttcttaccaaagaactaaataaaaaatgagtacagagccagagccagagtttcaaaatattctcatctgttaaattaagagtgtctcccat

SEQ ID NO: 8942 - DNA, 808 bp, Homo sapiens
  source 1..808: mol_type = unassigned DNA
tgggtcggtagtagcgatggcgggtctgactgacttgcagcggctacaggcccgagtggaagagctggagcgctgggtgtacgggccgggcggggcgcgcggctcacggaaggtggctgacggcctggtcaaggtgcaggtggctttggggaacatttccagcaagagggagagggtgaagattctctacaaaaagattgaagatctgatcaagtacctggatcctgagtacatcgaccgcattgccatacctgatgcctctaagctgcaattcatcctagcagaggagcagtttatcctttcccaggttgcactcctggagcaggtgaatgccttggtgcccatgctggacagtgctcacatcaaagccgttcctgagcatgctgcccgcctgcagcgcttggcccagatccacattcagcagcaggaccagtgtgtggaaatcactgaggagtccaaggctctcctggaggaatacaacaagactacaatgcttctctccaagcaattcgtgcagtgggatgagctactttgccagctagaggccgccacgcaagtgaagccagcagaggagtgatagctgctccccatcccaaagtgggcctgggcagtcaggctccagggccctatgccaacctgcctttgttacaaggcagaggaagctttgtatttattggcttcaaggcccacctctctgtactctgggctctaaagttggaggtcaggttacctgaggtttgcaatttgcaacacccaccctccccccaatcagtgttcttatttcagtgacaataaaccatagagatga

SEQ ID NO: 8943 - DNA, 899 bp, Homo sapiens
  source 1..899: mol_type = unassigned DNA
ggtagtagcgatggcgggtctgactgacttgcagcggctacaggcccgagtggaagagctggagcgctgggtgtacgggccgggcggggcgcgcggctcacggaaggtggctgacggcctggtcaaggtgcaggtggctttggggaacatttccagcaagagggagagggtgaagattctctacaaaaagattgaagatctgatcaagtacctggatcctgagtacatcgaccgcattgccatacctgatgcctctaagctgcaattcatcctagcagaggagcagtttatcctttcccaggttgcactcctggagcaggtgaatgccttggtgcccatgctggacagtgctcacatcaaagccgttcctgagcatgctgcccgcctgcagcgcttggcccagatccacattcagcagcaggctccatggggagtgggagtccgtgatgaggcaggaagtttagtggaagatgtgggctttgcccagttcctttctgtgctacactttggccctacaggaccagtgtgtggaaatcactgaggagtccaaggctctcctggaggaatacaacaagactacaatgcttctctccaagcaattcgtgcagtgggatgagctactttgccagctagaggccgccacgcaagtgaagccagcagaggagtgatagctgctccccatcccaaagtgggcctgggcagtcaggctccagggccctatgccaacctgcctttgttacaaggcagaggaagctttgtatttattggcttcaaggcccacctctctgtactctgggctctaaagttggaggtcaggttacctgaggtttgcaatttgcaacacccaccctccccccaatcagtgttcttatttcagtgacaataaaccatagagatga

SEQ ID NO: 8944 - DNA, 482 bp, Homo sapiens
  source 1..482: mol_type = unassigned DNA
atggcgggtctgactgacttgcagcggctacaggcccgagtggaagagctggagcgctgggtgtacgggccgggcggggcgcgcggctcacggaaggtggctgacggcctggtcaaggtgcaggtggctttggggaacatttccagcaagagggagagggtgaagattctctacaaaaagattgaagatctgatcaagtacctggatcctgagtacatcgaccgcattgccatacctgatgcctctaagctgcaattcatcctagcaggtaatgctggactacatgtgtacatgcatctgaggatgtgggtcgtcggggaggttaagcacagagatggcctctccatccagtcttctggtggatacaagccctggatgctgctctctggaattgtggcctggttctgggttgaggatcctatggatcctctagtagacattgagtacagtatacctctgcaccagctgcaggccatggtgcc

SEQ ID NO: 8945 - DNA, 677 bp, Homo sapiens
  source 1..677: mol_type = unassigned DNA
gtgggtcggtagtagcgatggcgggtctgactgacttgcagcggctacaggcccgagtggaagagctggagcgctgggtgtacgggccgggcggggcgcgcggctcacggaaggtggctgacggcctggtcaaggtgcaggtggctttggggaacatttccagcaagagggagagggtgaagattctctacaaaaagattgaagatctgatcaagtacctggatcctgagtacatcgaccgcattgccatacctgatgcctctaagctgcaattcatcctagcagagaggagcagtttatcctttcccaggttgcactcctggagcaggtgaatgccttggtgcccatgctggacagtgctcacatcaaagccgttcctgagcatgctgcccgcctgcagcgcttggcccagatccacattcagcagcaggtatgggaggggagatgactagaagcgaagatggaggtggcgcagcacctcatcccaactcatgccacctggggaagcagcttcaggcctttctgttgtaacctcagcagaaactttggggtttatcctttatcttgcatatgccccagggaggtaaagggacttgcctaggttcatgtacaaactttctgcttccagagcaggactttattgggacaccataaggttgaggctgggaggtacccaa

SEQ ID NO: 8946 - DNA, 742 bp, Homo sapiens
  source 1..742: mol_type = unassigned DNA
ggctgtttcctggccgaggtgggtcggtagtagcgatggcgggtctgactgacttgcagcggctacaggcccgagtggaagagctggagcgctgggtgtacgggccgggcggggcgcgcggctcacggaaggtggctgacggcctggtcaaggtgcaggtggctttggggaacatttccagcaagagggagagggtgaagattctctacaaaaagattgaagatctgatcaagtacctggatcctgagtacatcgaccgcattgccatacctgatgcctctaagctgcaattcatcctagcagccgttcctgagcatgctgcccgcctgcagcgcttggcccagatccacattcagcagcaggaccagtgtgtggaaatcactgaggagtccaaggctctcctggaggaatacaacaagactacaatgcttctctccaagcaattcgtgcagtgggatgagctactttgccagctagaggccgccacgcaagtgaagccagcagaggagtgatagctgctccccatcccaaagtgggcctgggcagtcaggctccagggccctatgccaacctgcctttgttacaaggcagaggaagctttgtatttattggcttcaaggcccacctctctgtactctgggctctaaagttggaggtcaggttacctgaggtttgcaatttgcaacacccaccctccccccaatcagtgttcttatttcagtgacaataaaccatagagatg

SEQ ID NO: 8947 - DNA, 687 bp, Homo sapiens
  source 1..687: mol_type = unassigned DNA
cagcggctacaggcccgagtggaagagctggagcgctgggtgtacgggccgggcggggcgcgcggctcacggaaggtggctgacggcctggtcaaggtgcaggtggctttggggaacatttccagcaagagggagagggtgaagattctctacaaaaagattgaagatctgatcaagtacctggatcctgagtacatcgaccgcattgccatacctgatgcctctaagctgcaattcatcctagcagccgttcctgagcatgctgcccgcctgcagcgcttggcccagatccacattcagcagcaggaccagtgtgtggaaatcactgaggagtccaaggctctcctggaggaatacaacaagactacaatgcttctctccaagcaattcgtgcagtgggatgagctactttgccagctagaggccgccacgcaagtgaagccagcagaggagtgatagctgctccccatcccaaagtgggcctgggcagtcaggctccagggccctatgccaacctgcctttgttacaaggcagaggaagctttgtatttattggcttcaaggcccacctctctgtactctgggctctaaagttggaggtcaggttacctgaggtttgcaatttgcaacacccaccctccccccaatcagtgttcttatttcagtgacaataaaccatagagatga

SEQ ID NO: 8948 - DNA, 3877 bp, Homo sapiens
  source 1..3877: mol_type = unassigned DNA
gactgacgtcccgccctctggctgtttcctggccgaggtgggtcggtagtagcgatggcgggtctgactgacttgcagcggctacaggcccgagtggaagagctggagcgctgggtgtacgggccgggcggggcgcgcggctcacggaaggtggctgacggcctggtcaaggtgcaggtggctttggggaacatttccagcaagagggagagggtgaagattctctacaaaaagattgaagatctgatcaagtacctggatcctgagtacatcgaccgcattgccatacctgatgcctctaagctgcaattcatcctagcaggtaatgctggactacatgtgtacatgcatctgaggatgtgggtcgtcggggaggttaagcacagagatggcctctccatccagtcttctggtggatacaagccctggatgctgctctctggaattgtggcctggttctgggttgaggatcctatggatcctctagtagacattgagtacagtatacctctgcaccagctgcaggccatggtgccagccacagtgggagctagtccagtgttctatcaatagtttgcctcttggattttccttcagaaccttcctcacttctgctcactagacagaggagcttctaggaaagggtaggggcagagagcattgccattaaagaacagagagagtattggcatgagtttcaacatctttctttcatgtgagaaagctctgcagtgtcagagttctaggcaggaactattgccttggcaatgtctgctaatcagtcagccattctataagctagggttttttgagcttcgttattcatccaaaagatgtataatgatcatctactctgatccaggttctttcctaagtgaggaagcatacagtggtgaaccagaaagtccctgccctcatgggcacagccagagctaggggagacagggtccctgcttcagggacctgagcttataacccagatgggagatcagtctcccaggagactgatcagtgcaatgcagcactgaggactgggtaaggatgggccactcctgctaaaagggctgtcagagttcccaaagggctcttggtcaattgccatcgctcaagcaccaagtttagatattctcctgcactgactcttgagtccagcctctccatccctccctgtggcactgcctcaggaattgtgcatccacttgcatatgaatggttgcacagtctcctaaatcatactcttgaccctaatctttcccttcctgcatgtggttcagtctcaccctcacaaaaacatgttcccaacatgtcactttgcctactttggaacctcagtgtatcctgccttgctaggataaagtcctaattccatagtctgccattcaaagcctttcagtcggccgggtctaccctcccatccaactctgtttcctgtgctctccctactccagttcagctaattgaattctttctcctctactaattgacaggcattcctgcctctaagcatttgcacgtaacagtcctctctcttgaatacccttcccactctatggatttcagtgcattgaaatcccgtgtgcatacagggcctagcccagatcctgctctcctcactggactcttccattactgtcccagctctcctccagcatataattgtctatgcctctgagagccactgagcagaacctgcctggcgtagtctgccacatatctcttttagaccttcctggggacccttgggtgtggggatccaagtctgaagtattttgtattttgtggcctaggaggtgctccctgagtttgttgataggaggctagaagaagaggtcttgaagttaaaccttggagaaaggtgggatttggagaaattgagaggctcattaggctcagatgggtcagacctgaggcatccaggagagttgggggcaggatggaaatgtgcacctagagaagggggcagtggacagagtcactgtccaaagctctaggacctagccatctcccttgccaggtcctcaggcccttacatgggctgattagcaatgcccaggtttgcttcactgcaactatcttgtccatttttgctttagaggagcagtttatcctttcccaggttgcactcctggagcaggtgaatgccttggtgcccatgctggacagtgctcacatcaaaggtatctctctggggttatagcttcactactctggttggggaggtaggtggatggatgggcaagactttcctgtgtttcaggttgtgtggattcgggttgggtctgttccttatcttttttttttttttttggacagagtcgtactctgtcacccaggctggagtgcagtggcatgatcttgactcactgcaaccgctgcctcctggttcaaacaaacttcccaccttgcctcccaagtagctaggattacaggtgtgtgccaccacacctggctatttttagtagagacggggtttcaccatgttgtccaggctggtctcaaactcctggccccatgtgatccacctgcctcggcctctcagagtgctgggattacaggcgtgagctactgtgcctggcctgttccttatctttatcctcaccctgaggtacttgccacatccaccaattaaaattaccaggatagagagcccagttttaggacctcaggcaatttgggcctgagaacactagcctaagctctagcagtccccagctctggggattccttctgccttctacctacccccaagcatctcttcttcaaggtgctgcagaacccagattttactatcagagtctctgccaggtccatgaatgtatgtgaattctttctgctgcactgctgagagcagtccctgggcctggactttgacaagcagatagtggctttaattgaatccagatatccatcttgtctgtctgtggaggtatttttcccagctccccctccctacccctgatcagctgcccgctgagtatctgacagccttaagctttgagcccagcatggtggccaagccttggcgtgttggattccagcttagggacctggcatccatcttcagactccctgttccctaagccaggcagacctgcccccgctgggctgagagcaaagggacaggtcctataatagccaaagctctctttacctggtcctgcttatagcactggggtgggggtagggagcaacactgggaaccccaaggttttgtcttctcctcgggacatgtatcttcccctcccctatgggtcctggagtaagactggagtgggcagggagccccactgccacctccagctgcagcagtcgatgaagtctggcgtttgtttagcttctccactcaatactctaatcctgccaaagacctaatagactattgagcagtcccgggggagggcacaagcatcatccagcagtgtgtgttgtgttttacagccgttcctgagcatgctgcccgcctgcagcgcttggcccagatccacattcagcagcaggaccagtgtgtggaaatcactgaggagtccaaggctctcctggaggaatacaacaagactacaatgcttctctccaagcaattcgtgcagtgggatgagctactttgccagctagaggccgccacgcaagtgaagccagcagaggagtgatagctgctccccatcccaaagtgggcctgggcagtcaggctccagggccctatgccaacctgcctttgttacaaggcagaggaagctttgtatttattggcttcaaggcccacctctctgtactctgggctctaaagttggaggtcaggttacctgaggtttgcaatttgcaacacccaccctccccccaatcagtgttcttatttcagtgacaataaaccatagagatg

SEQ ID NO: 8949 - DNA, 3430 bp, Homo sapiens
  source 1..3430: mol_type = unassigned DNA
gaggccgcctaaaggagagccgcgctgtcgatgagtcccagtgggccacctggagcggaagtggaggagcggccggaagtagccggaatctctgaaagactgaccgactgactctgacaggatccggggctgagggaaggaggcggcggccatggagttgggcgagctgctctacaacaagtctgagtacatcgagacggcatctgggaacaaagtcagtcgccagtcagtgttgtgtggaagccagaacatcgttctcaatggcaagaccattgtgatgaatgactgtattatccgaggggatctggcaaatgtaagagttggacgtcattgtgttgtgaaaagtcgtagtgtcataaggccaccattcaagaagttcagcaaaggtgttgcattctttcctttacatattggagaccatgtctttattgaggaagattgtgtggtcaacgcagcacagattggttcctatgttcatgttgggaagaactgtgtgattgggcgccgatgtgtgttgaaagactgctgcaaaattcttgacaacacagtattacctccagaaactgtggttccaccattcactgtcttctcaggctgcccaggactcttctcaggggagctcccggagtgcactcaggagctgatgattgacgtcaccaagagctactaccagaagtttttgcccctgacgcaagtctagcatctctgcctcatgtcttgaatctgcttgagctctaagatgaacctggggacaaagtgagccagtcagcacctacaaagagcttttgtgtctttgacatctaccaccctcctccttttaaaaaatttctttagaatttctcaatcttcaaggctctaagtgcttaagaattcactaacagacagaccatctggaggagctgtcttcaaatgctgtgcttacaccttatctatgaacagtcactttgtaccattatctgtggaacacagaatcatctgttcccaacactccagccccttggtcctgtggatggctggatcccgcctgaaacggacctgcagagcagcagcacccttccggtgtggaggctatgtagctggtgcgctgctcacggccattcactgcccatgctgagcgcctctcacacaggtaatgcccagcttttctgctgctaacacatttggccagttgttgcagttgctcatcatcttgggaaaggtgtttgtgacttttcagagcccagattcctgttgtctattaaaacttgaagggaggggtgaatagtgtttctctcttcttcccaaaatgaccttagctgtcctaggatagttagtaaaagactttttagcattttgacctagggcctttggctttcactaaaagtggggacctcagtatcccagattgtaattttgccaagtgttagatttgagtctctcatgtggatgcattagtcaggtggttactccttgcttcaaggtacttaccttatttcattgaagacaccgcatttgtgaactcttgcttcctggcctagaaccattcagcctaccctgtatttgccataaactccacaattcacaccaaaatgtctgtacttagagctaattcgcatatatacaggaagggctcttagaatcagtttgtgggcacagagcctcaggagtaaatgaagttactagggctgttcttaccatctccttctggccaaatagcacaacatttcctcgttctgctctgacctcttagcttagaaggaagattcagaagtgaggggctaagaaggttgtccttgcctaatgctctgatctgtaagtgaatagggcagaacagttcagccttgaggttagaatttagcaggagctatcctgacttaatatccagttgtggggtttgcaaaacaaaacagctgtatgtaatcattgccactagttccatctagaactcctttctagtttgttatttttaaaatgtttatacataaaaccaccaaaatacatagcttcgacaagatggaagtttatttctctctcccataacagtgcagtgatagtcagctggtccaggccaggcaaggggctggtccatgatgtcatcaggcacccaggttcctactgtcttgccatgtggccacagttagcaacaaaggaggctgtaaatttagtttctacttgggcagccaaaactctgaggaaggagattctgctagtaaaaaggagtgggggaagaatggccattgggagacaacaagcagactcaaccaggcctctttgttggcttcctttcctcctgctgcacatgagccttcgccgtgcatttggagccatgacagctgatagctccagacctgcatcctcctagcttgggggctctgaatgaaaggtttcttcccttccagttcgaatttggaaactcccaaagttctcaatggtttgttgtgagttccatgtcctcttggatcagtcactgtggccatgcatgtttggccacatgattaatccagtctgggtcatgaccttttcttcatccaaaacaaggtgatgggaagacaaaaacaatagctactacaaacaataggagtttataattatgtgctgatgtattcgaagatgtgttgacagtcgtgagtgtgtatcctaggaaaggcgagctggactctgtctccatggtggctctcaccccagggacctaggaacagcctgtcaccacacaattacttttataaccctggagatgaaaatctccttgtcctcaaaatacttccagaagaacaaccagatgggaaggaccttggttgggactctttccagttcacttggggcagagggaatttaatggctcacgtagctgaaaaggatgggctagattgggcttcaggctgcatcccaggactccaaacagggatctgtctctttggctctcagctctgctttcatttgagttggctttattcttgggcttcacagtgtggccccacagcaccagttattgataaaaagagctcccctttgctgacagaactgctggatttggttctcattggtccagacgaggaaggtatccagcctcaagtcatcattgtggccaggaagatggaatacaccaaatggacaggcctggcatgtacccacagagactgagagttggtgctggtggttgtggtggcagatgatattacctgaagaagggacgaatgggtgctgggcaggacaaagcatcagctgtccagttcaggcctctcctctttccctggtgtcttcattttcctccgtctccctgctgtcccttaccctctgcccaatctctcattactcctggtcttgggagttgccttctgaggatactccactgggggtacctgagcctggattagagggcagggggaggatattgcctagccaaagtgggtgttcaataaagaaccatttggagatggtcttctgtctggaa

SEQ ID NO: 8950 - DNA, 523 bp, Homo sapiens
  source 1..523: mol_type = unassigned DNA
aggaggcggcggccatggagttgggcgagctgctctacaacaagtctgagtacatcgagacggcatctgggaacaaagtcagtcgccagtcagtgttgtgtggaagccagaacatcgttctcaatggcaagaactttgtcatttctgttttcctgagcccatatatcagatgtcacagtgcctgcagggatagaaagagatcagatgagtcagtaagactgagtgtgaacaatagagagtggtggggcctggtgaattggagaatgtgaccaatctaagcccaagctggttgttactgtgtgggaatacaggcccacgtggcaacaatcagctttccagagcgtctgattctttttcaaaagcaactggaaatctcactttttaaaatgcaagatgttccactactcaaatagtaatgtttaattttaaatgatttgttaaaatgccacgtgtccttcctgtaggagatagctaaaaaaaattaaaagaaataaataataaaaatgctgcatgagccaaacaa

SEQ ID NO: 8951 - DNA, 1127 bp, Homo sapiens
  source 1..1127: mol_type = unassigned DNA
caaccctgccaggctctccaatcgcatgtggaattatcgctctacccaggcggtggtgtcgatctacgttccaattggggccgtaccatggcggagaagactcaaaagagtgtgaagattgctcctggagcagttgtatgtgtagaaagtgaaatcagaggagatgtaactatcggacctcggacagtgatccaccctaaagcaagaattattgcggaagccgggccaatagtgattggcgaagggaacctaatagaagaacaggcccttatcataaatgcttacccagataatatcactcctgacactgaagatccagaaccaaaacctatgatcattggcaccaataatgtgtttgaagttggctgttattcccaagccatgaagatgggagataataatgtcattgaatcaaaagcatatgtaggcagaaatgtaatattgacaagtggctgcatcattggggcttgttgcaacctaaatacatttgaagtcatccctgagaatacggtgatctatggtgcagactgccttcgtcgggtgcagactgagcgaccgcagccccagacactacagctggatttcttgatgaaaatcttgccaaattaccaccacctaaagaagactatgaaaggaagctcaactccagtaaagaactaagaacagtgtataacatgaagataacattttgtctttgaccactgtcttttgaatgggcccacagtgtttatgtactcttaacaactcacagaataatacatgttcactttattttgtaaaattgggttgagaggaaactaatggagtttcattgtaactgtcctttgtaatttatataaatgtattattttcctatatccttggttcttttctgataatttacagatttagcttttcttttgttatataaactgctagccacaaattttagttatgtaaaaggctacccttgacaagaaaagacatactgtcatgtatttatattctagcatagactaaactgaataaaaatgctgataacaggacctttagtaagcatactttaatcagtttttctccttgaattaatcttttctcttaatttttattatgtactagttgtattaaagctaatgtgtttacttttt

SEQ ID NO: 8952 - DNA, 3247 bp, Homo sapiens
  source 1..3247: mol_type = unassigned DNA
agtctgggcgcgcggctgcagcggcggagccggagtcggagccgggagcgctagcggcagccggatcgcagcctgcggggcccgccgcagccatgggcaaccgcggcatggaagatctcatcccgctggtcaaccggctgcaagacgccttctctgccatcggccagaacgcggacctcgacctgccgcagatcgctgtggtgggcggccagagcgccggcaagagctcggtgctcgagaatttcgtaggcagggacttcttgcctcgaggatctggcattgtcacccgacgtcccctggtcttgcagctggtcaatgcaaccacagaatatgccgagttcctgcactgcaagggaaagaaattcaccgacttcgaggaggtgcgccttgagatcgaggccgagaccgacagggtcaccggcaccaacaagggcatctcgccggtgcctatcaacctccgcgtctactcgccgcacgtgctgaacctgaccctggtggacctgcccggaatgaccaaggtcccggtgggggaccaacctcccgacatcgagttccagatccgagacatgcttatgcagtttgtcaccaaggagaactgcctcatcctggccgtgtcccccgccaactctgacctggccaattctgacgccctcaaggtcgccaaggaggtggacccccagggccagcgcaccatcggggtcatcaccaagctggacctgatggacgagggcacagatgcccgtgatgtgctggagaacaagctgctccccctgcgcagaggctacattggagtggtgaaccggagccagaaggacattgatggcaagaaggacattaccgccgccttggctgctgaacgaaagttcttcctctcccatccatcttatcgccacttggctgaccgtatgggcacgccctacctgcagaaggtcctcaatcagcaactgacgaaccacatccgggacacactgccggggctgcggaacaagctgcagagccagctactgtccattgagaaggaggtggaggaatacaagaacttccgccctgatgacccagctcgcaagaccaaggccctgctgcagatggtccagcagttcgccgtagactttgagaagcgcattgagggctcaggagatcagatcgacacctacgaactgtcagggggagcccgcattaaccgaatcttccacgagcgcttccctttcgagctggtcaagatggagtttgatgagaaggaactccgaagggagatcagctatgctatcaagaatatccatggcattagaacggggctgtttaccccagacatggcctttgagaccattgtgaaaaagcaggtgaagaagatccgagaaccgtgtctcaagtgtgtggacatggttatctcggagctaatcagcaccgttagacagtgcaccaagaagctccagcagtacccgcggctacgggaggagatggagcgcatcgtgaccacccacatccgggagcgcgagggccgcactaaggagcaggtcatgcttctcatcgatatcgagctggcttacatgaacaccaaccatgaggacttcataggctttgccaatgctcagcagaggagcaaccagatgaacaagaagaagacttcagggaaccaggatgagattctggtcatccgcaagggctggctgactatcaataatattggcatcatgaaagggggctccaaggagtactggtttgtgctgactgctgagaatctgtcctggtacaaggatgatgaggagaaagagaagaaatacatgctgtctgtggacaacctcaagctgcgggacgtggagaagggctttatgtcgagcaagcatatctttgccctctttaacacggagcagaggaatgtctacaaggattatcggcagctggagctagcctgtgagacacaggaggaggtggacagctggaaggcctccttcctgagggctggcgtgtaccctgagcgtgttggggacaaagagaaagccagcgagaccgaggagaatggctccgacagcttcatgcattccatggacccacagctggaacggcaagtggagaccatccggaatcttgtggactcatacatggccattgtcaacaagaccgtgagggacctcatgcccaagaccatcatgcacctcatgattaacaataccaaggagttcatcttctcggagctgctggccaacctgtactcgtgtggggaccagaacacgctgatggaggagtcggcggagcaggcacagcggcgcgacgagatgctgcgcatgtaccacgcactgaaggaggcgctcagcatcatcggcgacatcaacacgaccaccgtcagcacgcccatgcccccgcccgtggacgactcctggctgcaggtgcagagcgtaccggccggacgcaggtcgcccacgtccagccccacgccgcagcgccgagcccccgccgtgcccccagcccggcccgggtcgcggggccctgctcctgggcctccgcctgctgggtccgccctggggggggcgccccccgtgccctccaggccgggggcttcccctgaccctttcggccctccccctcaggtgccctcgcgccccaaccgcgccccgcccggggtccccagaatcactatcagtgacccctgaggagcgtcagccatgccgatcgggtcaggcaagtccatcccgtcctgagagccccaggccccccttcgacctctaaacagatccctcctcttctcggagacctccctttccaagcctgcctggacggctgttctgtgacttgacagtggctcccccagccccaaagccagcccccttcatctgtgacttaatctgttgtagtggtgagctgatacattcaggtgtgaccgttggtgaaaacttgtgccccttctgtggtatgcccttgccctgttctataaatatctataaatactcatatatatacacacctacacatggccaaccgcctcgcctctagcgctgggaatcagtcactgtgctatccttgtggagtcttgtggcccaactaccagagaacgctgtcccccgacatcccactccaaagtgtgccacctccagtgagcctccttgtcatgcccggcctgtggacagccagcccccgccatccctcccaccccctaccaagcatgggggtgctgtgcaggcagccgtgtggcctgacagtttctaccagtcctgctgtccctcggctgagaataaaacccatttctggatga

SEQ ID NO: 8953 - DNA, 3221 bp, Homo sapiens
  source 1..3221: mol_type = unassigned DNA
agtctgggcgcgcggctgcagcggcggagccggagtcggagccgggagcgctagcggcagccggatcgcagcctgcggggcccgccgcagccatgggcaaccgcggcatggaagatctcatcccgctggtcaaccggctgcaagacgccttctctgccatcggccagaacgcggacctcgacctgccgcagatcgctgtggtgggcggccagagcgccggcaagagctcggtgctcgagaatttcgtaggcagggacttcttgcctcgaggatctggcattgtcacccgacgtcccctggtcttgcagctggtcaatgcaaccacagaatatgccgagttcctgcactgcaagggaaagaaattcaccgacttcgaggaggtgcgccttgagatcgaggccgagaccgacagggtcaccggcaccaacaagggcatctcgccggtgcctatcaacctccgcgtctactcgccgcacgtgctgaacctgaccctggtggacctgcccggaatgaccaaggtcccggtgggggaccaacctcccgacatcgagttccagatccgagacatgcttatgcagtttgtcaccaaggagaactgcctcatcctggccgtgtcccccgccaactctgacctggccaattctgacgccctcaaggtcgccaaggaggtggacccccagggccagcgcaccatcggggtcatcaccaagctggacctgatggacgagggcacagatgcccgtgatgtgctggagaacaagctgctccccctgcgcagaggctacattggagtggtgaaccggagccagaaggacattgatggcaagaaggacattaccgccgccttggctgctgaacgaaagttcttcctctcccatccatcttatcgccacttggctgaccgtatgggcacgccctacctgcagaaggtcctcaatcagcaactgacgaaccacatccgggacacactgccggggctgcggaacaagctgcagagccagctactgtccattgagaaggaggtggaggaatacaagaacttccgccctgatgacccagctcgcaagaccaaggccctgctgcagatggtccagcagttcgccgtagactttgagaagcgcattgagggctcaggagatcagatcgacacctacgaactgtcagggggagcccgcattaaccgaatcttccacgagcgcttccctttcgagctggtcaagatggagtttgatgagaaggaactccgaagggagatcagctatgctatcaagaatatccatggcattagaacggggctgtttaccccagacatggcctttgagaccattgtgaaaaagcaggtgaagaagatccgagaaccgtgtctcaagtgtgtggacatggttatctcggagctaatcagcaccgttagacagtgcaccaagaagctccagcagtacccgcggctacgggaggagatggagcgcatcgtgaccacccacatccgggagcgcgagggccgcactaaggagcaggtcatgcttctcatcgatatcgagctggcttacatgaacaccaaccatgaggacttcataggctttgccaatgctcagcagaggagcaaccagatgaacaagaagaagacttcagggaaccaggatgagattctggtcatccgcaagggctggctgactatcaataatattggcatcatgaaagggggctccaaggagtactggtttgtgctgactgctgagaatctgtcctggtacaaggatgatgaggagaaagagaagaaatacatgctgtctgtggacaacctcaagctgcgggacgtggagaagggctttatgtcgagcaagcatatctttgccctctttaacacggagcagaggaatgtctacaaggattatcggcagctggagctagcctgtgagacacaggaggaggtggacagctggaaggcctccttcctgagggctggcgtgtaccctgagcgtgttggggacaaagagaaagccagcgagaccgaggagaatggctccgacagcttcatgcattccatggacccacagctggaacggcaagtggagaccatccggaatcttgtggactcatacatggccattgtcaacaagaccgtgagggacctcatgcccaagaccatcatgcacctcatgattaacaataccaaggagttcatcttctcggagctgctggccaacctgtactcgtgtggggaccagaacacgctgatggaggagtcggcggagcaggcacagcggcgcgacgagatgctgcgcatgtaccacgcactgaaggaggcgctcagcatcatcggcgacatcaacacgaccaccgtcagcacgcccatgcccccgcccgtggacgactcctggctgcaggtgcagagcgtaccggccggacgcaggtcgcccacgtccagccccacgccgcagcgccgagcccccgccgtgcccccagcccggcccgggtcgcggggccctgctcctgggcctccgcctgctgggtccgccctggggggggcgccccccgtgccctccaggccgggggcttcccctgaccctttcggccctccccctcaggtgccctcgcgccccaaccgcgccccgcccggggtccccagccgatcgggtcaggcaagtccatcccgtcctgagagccccaggccccccttcgacctctaaacagatccctcctcttctcggagacctccctttccaagcctgcctggacggctgttctgtgacttgacagtggctcccccagccccaaagccagcccccttcatctgtgacttaatctgttgtagtggtgagctgatacattcaggtgtgaccgttggtgaaaacttgtgccccttctgtggtatgcccttgccctgttctataaatatctataaatactcatatatatacacacctacacatggccaaccgcctcgcctctagcgctgggaatcagtcactgtgctatccttgtggagtcttgtggcccaactaccagagaacgctgtcccccgacatcccactccaaagtgtgccacctccagtgagcctccttgtcatgcccggcctgtggacagccagcccccgccatccctcccaccccctaccaagcatgggggtgctgtgcaggcagccgtgtggcctgacagtttctaccagtcctgctgtccctcggctgagaataaaacccatttctggatgatggggaatgtc

SEQ ID NO: 8954 - DNA, 2096 bp, Homo sapiens
  source 1..2096: mol_type = unassigned DNA
agtctgggcgcgcggctgcagcggcggagccggagtcggagccgggagcgctagcggcagccggatcgcagcctgcggggcccgccgcagccatgggcaaccgcggcatggaagatctcatcccgctggtcaaccggctgcaagacgccttctctgccatcggccagaacgcggacctcgacctgccgcagatcgctgtggtgggcggccagagcgccggcaagagctcggtgctcgagaatttcgtaggcagggacttcttgcctcgaggatctggcattgtcacccgacgtcccctggtcttgcagctggtcaatgcaaccacagaatatgccgagttcctgcactgcaagggaaagaaattcaccgacttcgaggaggtgcgccttgagatcgaggccgagaccgacagggtcaccggcaccaacaagggcatctcgccggtgcctatcaacctccgcgtctactcgccgcacgtgctgaacctgaccctggtggacctgcccggaatgaccaaggtcccggtgggggaccaacctcccgacatcgagttccagatccgagacatgcttatgcagtttgtcaccaaggagaactgcctcatcctggccgtgtcccccgccaactctgacctggccaattctgacgccctcaaggtcgccaaggaggtggacccccagggccagcgcaccatcggggtcatcaccaagctggacctgatggacgagggcacagatgcccgtgatgtgctggagaacaagctgctccccctgcgcagaggctacattggagtggtgaaccggagccagaaggacattgatggcaagaaggacattaccgccgccttggctgctgaacgaaagttcttcctctcccatccatcttatcgccacttggctgaccgtatgggcacgccctacctgcagaaggtcctcaatcagcaactgacgaaccacatccgggacacactgccggggctgcggaacaagctgcagagccagctactgtccattgagaaggaggtggaggaatacaagaacttccgccctgatgacccagctcgcaagaccaaggccctgctgcagatggtccagcagttcgccgtagactttgagaagcgcattgagggctcaggagatcagatcgacacctacgaactgtcagggggagcccgcattaaccgaatcttccacgagcgcttccctttcgagctggtcaagatggagtttgatgagaaggaactccgaagggagatcagctatgctatcaagaatatccatggcattagaacggggctgtttaccccagacatggcctttgagaccattgtgaaaaagcaggtgaagaagatccgagaaccgtgtctcaagtgtgtggacatggttatctcggagctaatcagcaccgttagacagtgcaccaagaagctccagcagtacccgcggctacgggaggagatggagcgcatcgtgaccacccacatccgggagcgcgagggccgcactaaggagcaggtcatgcttctcatcgatatcgagctggcttacatgaacaccaaccatgaggacttcataggctttgccaatgctcagcagaggagcaaccagatgaacaagaagaagacttcagggaaccagatcaccctccaggtcatccgcaagggctggctgactatcaataatattggcatcatgaaagggggctccaaggagtactggtttgtgctgactgctgagaatctgtcctggtacaaggatgatgaggagaaagagaagaaatacatgctgtctgtggacaacctcaagctgcgggacgtggagaagggctttatgtcgagcaagcatatctttgccctctttaacacggagcagaggaatgtctacaaggattatcggcagctggagctagcctgtgagacacaggaggaggtggacagctggaaggcctccttcctgagggctggcgtgtaccctgagcgtgttggggacaaagagaaagtgagtgtgcccttctcttgcctcctgccaggcatctgcagcctggcaccagctccagccaggttttcaagcaagggacctggagatgttcttttctaa

SEQ ID NO: 8955 - DNA, 3211 bp, Homo sapiens
  source 1..3211: mol_type = unassigned DNA
gagccgggagcgctagcggcagccggatcgcagcctgcggggcccgccgcagccatgggcaaccgcggcatggaagatctcatcccgctggtcaaccggctgcaagacgccttctctgccatcggccagaacgcggacctcgacctgccgcagatcgctgtggtgggcggccagagcgccggcaagagctcggtgctcgagaatttcgtaggcagggacttcttgcctcgaggatctggcattgtcacccgacgtcccctggtcttgcagctggtcaatgcaaccacagaatatgccgagttcctgcactgcaagggaaagaaattcaccgacttcgaggaggtgcgccttgagatcgaggccgagaccgacagggtcaccggcaccaacaagggcatctcgccggtgcctatcaacctccgcgtctactcgccgcacgtgctgaacctgaccctggtggacctgcccggaatgaccaaggtcccggtgggggaccaacctcccgacatcgagttccagatccgagacatgcttatgcagtttgtcaccaaggagaactgcctcatcctggccgtgtcccccgccaactctgacctggccaattctgacgccctcaaggtcgccaaggaggtggacccccagggccagcgcaccatcggggtcatcaccaagctggacctgatggacgagggcacagatgcccgtgatgtgctggagaacaagctgctccccctgcgcagaggctacattggagtggtgaaccggagccagaaggacattgatggcaagaaggacattaccgccgccttggctgctgaacgaaagttcttcctctcccatccatcttatcgccacttggctgaccgtatgggcacgccctacctgcagaaggtcctcaatcagcaactgacgaaccacatccgggacacactgccggggctgcggaacaagctgcagagccagctactgtccattgagaaggaggtggaggaatacaagaacttccgccctgatgacccagctcgcaagaccaaggccctgctgcagatggtccagcagttcgccgtagactttgagaagcgcattgagggctcaggagatcagatcgacacctacgaactgtcagggggagcccgcattaaccgaatcttccacgagcgcttccctttcgagctggtcaagatggagtttgatgagaaggaactccgaagggagatcagctatgctatcaagaatatccatggcattaggacgggcctcttcacacctgacctcgcttttgaagccacagtgaaaaagcaggtgcagaagctcaaagagcccagtatcaagtgtgtggatatggtagtcagtgagctcacagccaccatcagaaagtgtagcgaaaagctccagcagtacccgcggctacgggaggagatggagcgcatcgtgaccacccacatccgggagcgcgagggccgcactaaggagcaggtcatgcttctcatcgatatcgagctggcttacatgaacaccaaccatgaggacttcataggctttgccaatgctcagcagaggagcaaccagatgaacaagaagaagacttcagggaaccaggatgagattctggtcatccgcaagggctggctgactatcaataatattggcatcatgaaagggggctccaaggagtactggtttgtgctgactgctgagaatctgtcctggtacaaggatgatgaggagaaagagaagaaatacatgctgtctgtggacaacctcaagctgcgggacgtggagaagggctttatgtcgagcaagcatatctttgccctctttaacacggagcagaggaatgtctacaaggattatcggcagctggagctagcctgtgagacacaggaggaggtggacagctggaaggcctccttcctgagggctggcgtgtaccctgagcgtgttggggacaaagagaaagccagcgagaccgaggagaatggctccgacagcttcatgcattccatggacccacagctggaacggcaagtggagaccatccggaatcttgtggactcatacatggccattgtcaacaagaccgtgagggacctcatgcccaagaccatcatgcacctcatgattaacaataccaaggagttcatcttctcggagctgctggccaacctgtactcgtgtggggaccagaacacgctgatggaggagtcggcggagcaggcacagcggcgcgacgagatgctgcgcatgtaccacgcactgaaggaggcgctcagcatcatcggcgacatcaacacgaccaccgtcagcacgcccatgcccccgcccgtggacgactcctggctgcaggtgcagagcgtaccggccggacgcaggtcgcccacgtccagccccacgccgcagcgccgagcccccgccgtgcccccagcccggcccgggtcgcggggccctgctcctgggcctccgcctgctgggtccgccctggggggggcgccccccgtgccctccaggccgggggcttcccctgaccctttcggccctccccctcaggtgccctcgcgccccaaccgcgccccgcccggggtccccagaatcactatcagtgacccctgaggagcgtcagccatgccgatcgggtcaggcaagtccatcccgtcctgagagccccaggccccccttcgacctctaaacagatccctcctcttctcggagacctccctttccaagcctgcctggacggctgttctgtgacttgacagtggctcccccagccccaaagccagcccccttcatctgtgacttaatctgttgtagtggtgagctgatacattcaggtgtgaccgttggtgaaaacttgtgccccttctgtggtatgcccttgccctgttctataaatatctataaatactcatatatatacacacctacacatggccaaccgcctcgcctctagcgctgggaatcagtcactgtgctatccttgtggagtcttgtggcccaactaccagagaacgctgtcccccgacatcccactccaaagtgtgccacctccagtgagcctccttgtcatgcccggcctgtggacagccagcccccgccatccctcccaccccctaccaagcatgggggtgctgtgcaggcagccgtgtggcctgacagtttctaccagtcctgctgtccctcggctgagaataaaacccatttctggatgatg

SEQ ID NO: 8956 - DNA, 2817 bp, Homo sapiens
  source 1..2817: mol_type = unassigned DNA
agtctgggcgcgcggctgcagcggcggagccggagtcggagccgggagcgctagcggcagccggatcgcagcctgcggggcccgccgcagccatgggcaaccgcggcatggaagatctcatcccgctggtcaaccggctgcaagacgccttctctgccatcggccagaacgcggacctcgacctgccgcagatcgctgtggtgggcggccagagcgccggcaagagctcggtgctcgagaatttcgtaggcagggacttcttgcctcgaggatctggcattgtcacccgacgtcccctggtcttgcagctggtcaatgcaaccacagaatatgccgagttcctgcactgcaagggaaagaaattcaccgacttcgaggaggtgcgccttgagatcgaggccgagaccgacagggtcaccggcaccaacaagggcatctcgccggtgcctatcaacctccgcgtctactcgccgcacgtgctgaacctgaccctggtggacctgcccggaatgaccaaggtcccggtgggggaccaacctcccgacatcgagttccagatccgagacatgcttatgcagtttgtcaccaaggagaactgcctcatcctggccgtgtcccccgccaactctgacctggccaattctgacgccctcaaggtcgccaaggaggtggacccccagggccagcgcaccatcggggtcatcaccaagctggacctgatggacgagggcacagatgcccgtgatgtgctggagaacaagctgctccccctgcgcagaggctacattggagtggtgaaccggagccagaaggacattgatggcaagaaggacattaccgccgccttggctgctgaacgaaagttcttcctctcccatccatcttatcgccacttggctgaccgtatgggcacgccctacctgcagaaggtcctcaatcagcaactgacgaaccacatccgggacacactgccggggctgcggaacaagctgcagagccagctactgtccattgagaaggaggtggaggaatacaagaacttccgccctgatgacccagctcgcaagaccaaggccctgctgcagatggtccagcagttcgccgtagactttgagaagcgcattgagggctcaggagatcagatcgacacctacgaactgtcagggggagcccgcattaaccgaatcttccacgagcgcttccctttcgagctggtcaagatggagtttgatgagaaggaactccgaagggagatcagctatgctatcaagaatatccatggcattaggacgggcctcttcacacctgacctcgcttttgaagccacagtgaaaaagcaggtgcagaagctcaaagagcccagtatcaagtgtgtggatatggtagtcagtgagctcacagccaccatcagaaagtgtagcgaaaagctccagcagtacccgcggctacgggaggagatggagcgcatcgtgaccacccacatccgggagcgcgagggccgcactaaggagcaggtcatgcttctcatcgatatcgagctggcttacatgaacaccaaccatgaggacttcataggctttgccaatgctcagcagaggagcaaccagatgaacaagaagaagacttcagggaaccaggatgagattctggtcatccgcaagggctggctgactatcaataatattggcatcatgaaagggggctccaaggagtactggtttgtgctgactgctgagaatctgtcctggtacaaggatgatgaggagaaagagaagaaatacatgctgtctgtggacaacctcaagctgcgggacgtggagaagggctttatgtcgagcaagcatatctttgccctctttaacacggagcagaggaatgtctacaaggattatcggcagctggagctagcctgtgagacacaggaggaggtggacagctggaaggcctccttcctgagggctggcgtgtaccctgagcgtgttggggacaaagagaaagccagcgagaccgaggagaatggctccgacagcttcatgcattccatggacccacagctggaacggcaagtggagaccatccggaatcttgtggactcatacatggccattgtcaacaagaccgtgagggacctcatgcccaagaccatcatgcacctcatgattaacaataccaaggagttcatcttctcggagctgctggccaacctgtactcgtgtggggaccagaacacgctgatggaggagtcggcggagcaggcacagcggcgcgacgagatgctgcgcatgtaccacgcactgaaggaggcgctcagcatcatcggcgacatcaacacgaccaccgtcagcacgcccatgcccccgcccgtggacgactcctggctgcaggtgcagagcgtaccggccggacgcaggtcgcccacgtccagccccacgccgcagcgccgagcccccgccgtgcccccagcccggcccgggtcgcggggccctgctcctgggcctccgcctgctgggtccgccctggggggggcgccccccgtgccctccaggccgggggcttcccctgaccctttcggccctccccctcaggtgccctcgcgccccaaccgcgccccgcccggggtccccagaatcactatcagtgacccctgaggagcgtcagccatggaagggcccagcctcacctacgagacctgcagccccccgaccagctgaggctcccctcttagacttataagtctatggccactggcatccggctgcctgccctccctgcctcccccagggtcccttcagagggtcctgggttttctgaacaccc

SEQ ID NO: 8957 - DNA, 3143 bp, Homo sapiens
  source 1..3143: mol_type = unassigned DNA
gcagcctgcggggcccgccgcagccatgggcaaccgcggcatggaagatctcatcccgctggtcaaccggctgcaagacgccttctctgccatcggccagaacgcggacctcgacctgccgcagatcgctgtggtgggcggccagagcgccggcaagagctcggtgctcgagaatttcgtaggcagggacttcttgcctcgaggatctggcattgtcacccgacgtcccctggtcttgcagctggtcaatgcaaccacagaatatgccgagttcctgcactgcaagggaaagaaattcaccgacttcgaggaggtgcgccttgagatcgaggccgagaccgacagggtcaccggcaccaacaagggcatctcgccggtgcctatcaacctccgcgtctactcgccgcacgtgctgaacctgaccctggtggacctgcccggaatgaccaaggtcccggtgggggaccaacctcccgacatcgagttccagatccgagacatgcttatgcagtttgtcaccaaggagaactgcctcatcctggccgtgtcccccgccaactctgacctggccaattctgacgccctcaaggtcgccaaggaggtggacccccagggccagcgcaccatcggggtcatcaccaagctggacctgatggacgagggcacagatgcccgtgatgtgctggagaacaagctgctccccctgcgcagaggctacattggagtggtgaaccggagccagaaggacattgatggcaagaaggacattaccgccgccttggctgctgaacgaaagttcttcctctcccatccatcttatcgccacttggctgaccgtatgggcacgccctacctgcagaaggtcctcaatcagcaactgacgaaccacatccgggacacactgccggggctgcggaacaagctgcagagccagctactgtccattgagaaggaggtggaggaatacaagaacttccgccctgatgacccagctcgcaagaccaaggccctgctgcagatggtccagcagttcgccgtagactttgagaagcgcattgagggctcaggagatcagatcgacacctacgaactgtcagggggagcccgcattaaccgaatcttccacgagcgcttccctttcgagctggtcaagatggagtttgatgagaaggaactccgaagggagatcagctatgctatcaagaatatccatggcattaggacgggcctcttcacacctgacctcgcttttgaagccacagtgaaaaagcaggtgcagaagctcaaagagcccagtatcaagtgtgtggatatggtagtcagtgagctcacagccaccatcagaaagtgtagcgaaaagctccagcagtacccgcggctacgggaggagatggagcgcatcgtgaccacccacatccgggagcgcgagggccgcactaaggagcaggtcatgcttctcatcgatatcgagctggcttacatgaacaccaaccatgaggacttcataggctttgccaatgctcagcagaggagcaaccagatgaacaagaagaagacttcagggaaccaggatgagattctggtcatccgcaagggctggctgactatcaataatattggcatcatgaaagggggctccaaggagtactggtttgtgctgactgctgagaatctgtcctggtacaaggatgatgaggagaaagagaagaaatacatgctgtctgtggacaacctcaagctgcgggacgtggagaagggctttatgtcgagcaagcatatctttgccctctttaacacggagcagaggaatgtctacaaggattatcggcagctggagctagcctgtgagacacaggaggaggtggacagctggaaggcctccttcctgagggctggcgtgtaccctgagcgtgttggggacaaagagaaagccagcgagaccgaggagaatggctccgacagcttcatgcattccatggacccacagctggaacggcaagtggagaccatccggaatcttgtggactcatacatggccattgtcaacaagaccgtgagggacctcatgcccaagaccatcatgcacctcatgattaacaataccaaggagttcatcttctcggagctgctggccaacctgtactcgtgtggggaccagaacacgctgatggaggagtcggcggagcaggcacagcggcgcgacgagatgctgcgcatgtaccacgcactgaaggaggcgctcagcatcatcggcgacatcaacacgaccaccgtcagcacgcccatgcccccgcccgtggacgactcctggctgcaggtgcagagcgtaccggccggacgcaggtcgcccacgtccagccccacgccgcagcgccgagcccccgccgtgcccccagcccggcccgggtcgcggggccctgctcctgggcctccgcctgctgggtccgccctggggggggcgccccccgtgccctccaggccgggggcttcccctgaccctttcggccctccccctcaggtgccctcgcgccccaaccgcgccccgcccggggtccccagccgatcgggtcaggcaagtccatcccgtcctgagagccccaggccccccttcgacctctaaacagatccctcctcttctcggagacctccctttccaagcctgcctggacggctgttctgtgacttgacagtggctcccccagccccaaagccagcccccttcatctgtgacttaatctgttgtagtggtgagctgatacattcaggtgtgaccgttggtgaaaacttgtgccccttctgtggtatgcccttgccctgttctataaatatctataaatactcatatatatacacacctacacatggccaaccgcctcgcctctagcgctgggaatcagtcactgtgctatccttgtggagtcttgtggcccaactaccagagaacgctgtcccccgacatcccactccaaagtgtgccacctccagtgagcctccttgtcatgcccggcctgtggacagccagcccccgccatccctcccaccccctaccaagcatgggggtgctgtgcaggcagccgtgtggcctgacagtttctaccagtcctgctgtccctcggctgagaataaaacccatttctggatga

SEQ ID NO: 8958 - DNA, 4103 bp, Homo sapiens
  source 1..4103: mol_type = unassigned DNA
taatagagacggggtttctccatgttggtcaggctggtctcgaactcccgacctcaggtgatctgcccacctcggcctcccaatgtactgggattacaggtgcaagccaccgcaaccggccacttttgccttttgattggtttagtggatcataattatttttttccttataggcaaaactcacctttgcctatctttgtgtatatattttttcctcccctcgagttttctaaggttatcaagtcactcctgccagaagtttaatgagtgttaataagtgaactctcattactgccagccctgctgggattagacttgccatctctgagtgaaatgaagagtttaatgttgggcatgggatgtgctgctcagttctctcaacaactctaggagggaaggtgtcattactaccccattttccacatggagaaactgaggcccagagaggtctggtcatttttctaaggagagtcagcggacagcggctggctttgaacccagggctgaatggctccaggggctgtgtccctgactgctaacccggtgggctccaggctgatcgccccctcagccaagggctgagaggggaacgttccttttgaaaagctggcggaacatcctggaaatgttcagaggcagccagaatggaaaaagatgctcaaaggggacagaacttctcaaaggggtggaggctgccctgccatgggtgacacgtggaaaacttgagacatgtgacatccaggcggttagtgggagaattggtcatgctctttggcaaattgcgccctcctcctccctccttctccctgctcctccaaactctaccctgggagggagcacttgggaccacctcagaggaggcctggtggctgtgacccagtcccaaatgtctgcccagacttggagactgcaaagagcgggagcccttccttgagcctcaggagcagtggggttcacagggcccctctagtcaccgtttttaagcccctggtctcagactgcccctccctcaggtctcctgagcttagccacatcatccacgcccttggcacagccacgggatgatgggtgtgatgcgggcatccctcgtgttggcatcctggaccgatatccagggccctgctttctccccatcctcctgcctctcccatgcccctcctcaaaactccttggcctccatcctgccctcagaatcaccacctgtgactcaggcacaccaatccctgggcctcttcctccactgggggacccacctgaagggcctgacccagccacgggaagaaggacgaggagcgctcccagctttgccccatcgtgctgcctgggccccaggtggccaccgcgtggagagggtgggcccacaggactggagcccctgggggtgggctcccaccatcagaaatgcactgagtctcctccccggaagagctgatcatgggccagagggctgaggaccctgtgccactcaccctggcatccatccttcattcattccctcattctccaacacgccctcttccagcactggccatgggcctggccctgccccagccctgcctcggggacagttgccacccagttgattggaggaggtggagtgggagaggagtggagagaggcccctaactcagctctcaagcagtcggggcaggctttctggaggagctgaagtccggcagaaccttgtagtcaagtgaatcacctgggctgtgcccagagcccgactgagctgagggcacgattcgcaggcagagggggacgggtttggagcaacttccccttcagcctcccttcataagaactggggggaaagaggtgctgctgagctcctaccccaaaggagtggggtcgagacagtgtggctggccagagccgggcagatgtggctggggatggtggtgccgggcaggggcatgcaagggagacagagctgaatggattccaccaagagggccagggcccagccaggccccgcggggtactgctcatgctgctggcccccgccttgcatgtcccccagccctcgcatgcttttgcttgtgtttcctgcatgtcctctggtgtgactgctggttttcccctgaaccccctccccagctctgacaaggagcattgcctgtcccagcctgactcaggaggccaactggcaccttgggccctgtcctcccccgattcctcctggataggaatccagaggctgtcccctgcctgattccccatctagctgtccctccacgcctttaggaaggcacagggtagccctgagtatgagggaacaccttgggagctaacggtccccagaggccttaacctaaccagtctgcggggcaggctcattcccatggcctttctcccacgggaaccacccctctgccctgaagttgcccaggtaggccagtgaagagggcccggaaccaggaagacccttgaatcaccatttggaacccacacttgggggaaaggggtggccgtggcttggtgccatcagcgtcctgggaccctaggtctctcttccccgcgttgtgggcattctgtgtgtgcctcccaccctgcgccgcggatccctggactcgtggggtgtgggtgctccctgcccgtgccctctgtgtacgtggctttctgccctcctgcccttccccagctccagcagtacccgcggctacgggaggagatggagcgcatcgtgaccacccacatccgggagcgcgagggccgcactaaggagcaggtcatgcttctcatcgatatcgagctggcttacatgaacaccaaccatgaggacttcataggctttgccaatgctcagcagaggagcaaccagatgaacaagaagaagacttcagggaaccaggatgagattctggtcatccgcaagggctggctgactatcaataatattggcatcatgaaagggggctccaaggagtactggtttgtgctgactgctgagaatctgtcctggtacaaggatgatgaggagaaagagaagaaatacatgctgtctgtggacaacctcaagctgcgggacgtggagaagggctttatgtcgagcaagcatatctttgccctctttaacacggagcagaggaatgtctacaaggattatcggcagctggagctagcctgtgagacacaggaggaggtggacagctggaaggcctccttcctgagggctggcgtgtaccctgagcgtgttggggacaaagagaaagccagcgagaccgaggagaatggctccgacagcttcatgcattccatggacccacagctggaacggcaagtggagaccatccggaatcttgtggactcatacatggccattgtcaacaagaccgtgagggacctcatgcccaagaccatcatgcacctcatgattaacaataccaaggagttcatcttctcggagctgctggccaacctgtactcgtgtggggaccagaacacgctgatggaggagtcggcggagcaggcacagcggcgcgacgagatgctgcgcatgtaccacgcactgaaggaggcgctcagcatcatcggcgacatcaacacgaccaccgtcagcacgcccatgcccccgcccgtggacgactcctggctgcaggtgcagagcgtaccggccggacgcaggtcgcccacgtccagccccacgccgcagcgccgagcccccgccgtgcccccagcccggcccgggtcgcggggccctgctcctgggcctccgcctgctgggtccgccctggggggggcgccccccgtgccctccaggccgggggcttcccctgaccctttcggccctccccctcaggtgccctcgcgccccaaccgcgccccgcccggggtccccagaatcactatcagtgacccctgaggagcgtcagccatgcaggaagggcccagcctcacctacgagacctgcagccccccgacatcccactccaaagtgtgccacctccagtgagcctccttgtcatgcccggcctgtggacagccagcccccgccatccctcccaccccctaccaagcatgggggtgctgtgcaggcagccgtgtggcctgacagtttctaccagtcctgctgtccctcggctgagaataaaacccatttctgg

SEQ ID NO: 8959 - DNA, 1886 bp, Homo sapiens
  source 1..1886: mol_type = unassigned DNA
gcatggcctgccgggagggggcaggtagccggcgggcccggtccaatgggtgccggcttccgaggagagggcggaggagaggaggaaggaggcgaactgtgggccccggccccattcattgccgtggccggcgggcactggggccccgtgttttcagagtcatggaggcgctaattcctgtcataaacaagctccaggacgtcttcaacacggtgggcgccgacatcatccagctgcctcaaatcgtcgtagtgggaacgcagagcagcggaaagagctcagtgctagaaagcctggtggggagggacctgcttcccagaggtactggaattgtcacccggagacctctcattctgcaactggtccatgtttcacaagaagataaacggaaaacaacaggagaagaaaatggggtggaagcagaagaatggggtaaatttcttcacaccaaaaataagctttacacggattttgatgaaattcgacaagaaattgaaaatgaaacagaaagaatttcaggaaataataagggagtaagccctgaaccaattcatcttaagattttttcacccaacgttgtcaatttgacacttgtggatttgccaggaatgaccaaggtgcctgtaggtgatcaacctaaggatattgagcttcaaatcagagagctcattcttcggttcatcagtaatcctaattccattatcctcgctgtcactgctgctaatacagatatggcaacatcagaggcacttaaaatttcaagagaggtagatccagatggtcgcagaaccctagctgtaatcactaaacttgatctcatggatgcgggtactgatgccatggatgtattgatgggaagggttattccagtcaaacttggaataattggagtagttaacaggagccagctagatattaacaacaagaagagtgtaactgattcaatccgtgatgagtatgcttttcttcaaaagaaatatccatctctggccaatagaaatggaacaaagtatcttgctaggactctaaacaggttactgatgcatcacatcagagattgtttaccagagttgaaaacaagaataaatgttctagctgctcagtatcagtctcttctaaatagctacggtgaacccgtggatgataaaagtgctactttactccaacttattaccaaatttgccacagaatattgtaacactattgaaggaactgcaaaatatattgaaacttcggagctatgcggtggtgctagaatttgttatattttccatgagacttttgggcgaaccttagaatctgttgatccacttggtggccttaacactattgacattttgactgccattagaaatgctactggtcctcgtcctgctttatttgtgcctgaggtttcatttgagttactggtgaagcggcaaatcaaacgtctagaagagcccagcctccgctgtgtggaactggttcatgaggaaatgcaaaggatcattcagcactgtagcaattacagtacacaggaattgttacgatttcctaaacttcatgatgccatagttgaagtggtgacttgtcttcttcgtaaaaggttgcctgttacaaatgaaatggtccataacttagtggcaattgaactggcttatatcaacacaaaacatccagactttgctgatgcttgtgggctaatgaacaataatatagaggaacaaaggagaaacaggctagccagagaattaccttcagctgtatcacgagacaaggttgcatctggaggtggtggggttggagatggtgttcaagaaccaaccacaggcaactggagaggaatgctgaaaacttcaaaagctgaagagttattagcagaaaaaaaaaaaaaaaaaaaaaaaaag

SEQ ID NO: 8960 - DNA, 3101 bp, Homo sapiens
  source 1..3101: mol_type = unassigned DNA
gggccccggccccattcattgccgtggccggcgggcactggggccccgtgttttcagagtcatggaggcgctaattcctgtcataaacaagctccaggacgtcttcaacacggtgggcgccgacatcatccagctgcctcaaatcgtcgtagtgggaacgcagagcagcggaaagagctcagtgctagaaagcctggtggggagggacctgcttcccagaggtactggaattgtcacccggagacctctcattctgcaactggtccatgtttcacaagaagataaacggaaaacaacaggagaagaaaatggggtggaagcagaagaatggggtaaatttcttcacaccaaaaataagctttacacggattttgatgaaattcgacaagaaattgaaaatgaaacagaaagaatttcaggaaataataagggagtaagccctgaaccaattcatcttaagattttttcacccaacgttgtcaatttgacacttgtggatttgccaggaatgaccaaggtgcctgtaggtgatcaacctaaggatattgagcttcaaatcagagagctcattcttcggttcatcagtaatcctaattccattatcctcgctgtcactgctgctaatacagatatggcaacatcagaggcacttaaaatttcaagagaggtagatccagatggtcgcagaaccctagctgtaatcactaaacttgatctcatggatgcgggtactgatgccatggatgtattgatgggaagggttattccagtcaaacttggaataattggagtagttaacaggagccagctagatattaacaacaagaagagtgtaactgattcaatccgtgatgagtatgcttttcttcaaaagaaatatccatctctggccaatagaaatggaacaaagtatcttgctaggactctaaacaggttactgatgcatcacatcagagattgtttaccagagttgaaaacaagaataaatgttctagctgctcagtatcagtctcttctaaatagctacggtgaacccgtggatgataaaagtgctactttactccaacttattaccaaatttgccacagaatattgtaacactattgaaggaactgcaaaatatattgaaacttcggagctatgcggtggtgctagaatttgttatattttccatgagacttttgggcgaaccttagaatctgttgatccacttggtggccttaacactattgacattttgactgccattagaaatgctactggtcctcgtcctgctttatttgtgcctgaggtttcatttgagttactggtgaagcggcaaatcaaacgtctagaagagcccagcctccgctgtgtggaactggttcatgaggaaatgcaaaggatcattcagcactgtagcaattacagtacacaggaattgttacgatttcctaaacttcatgatgccatagttgaagtggtgacttgtcttcttcgtaaaaggttgcctgttacaaatgaaatggtccataacttagtggcaattgaactggcttatatcaacacaaaacatccagactttgctgatgcttgtgggctaatgaacaataatatagaggaacaaaggagaaacaggctagccagagaattaccttcagctgtatcacgagacaaggttgcatctggaggtggtggggttggagatggtgttcaagaaccaaccacaggcaactggagaggaatgctgaaaacttcaaaagctgaagagttattagcagaagaaaaatcaaaacccattccaattatgccagccagtccacaaaaaggtcatgccgtgaacctgctagatgtgccagttcctgttgcacgaaaactatctgctcgggaacagcgagattgtgaggttattgaacgactcattaaatcatattttctcattgtcagaaagaatattcaagacagtgtgccaaaggcagtaatgcattttttggttaatcatgtgaaagacactcttcagagtgagctagtaggccagctgtataaatcatccttattggatgatcttctgacagaatctgaggacatggcacagcgcaggaaagaagcagctgatatgctaaaggcattacaaggagccagtcaaattattgctgaaatccgggagactcatctttggtgaagagaactatgtaatactgagactttgttgactcaaaacttgctagttactgcctacctgagtagaatcttatttatgaactcctgtgtattgcaatggtatgaatctgctcatgtggagactggctataaactgaaaagtgtattccaaattgcagaacacatcacacatttaatccaaataataaatggctgtttctaaagtttcccagtatatataaaatacatcaagtctgtcttgtgacagtttcatctgaacttaacttaaaaacaactgttaatgttctagttgtgcaaagcagtttgcctgtggataagatgacctgtgtaataatctttgttagtagtcttaaagctgctgccatagtcctccaagaagaaagcaccaagacaacatttcatatgactataatgcatgtactatataagctgatctggctttgaaagatgtgagttggcaagttcctcacatagagtcattgtattccacctgtccttcaatttagttttttctgagcttctttgcagcctttgatgtgtttttaagaaagctgaatgcacaagaggatctgtgacactgacatggctgtggtgtgcatactgtgtagttacatagcccttccaattctgggtccatttgcactagcaaattaaaatatgctttgattcatacttaaacctgaaagcaggaatgcctacattaattcctacattaaaaacagccatctacccttgattatctagaaagacttggtaatgatggtcagttccttttagatttcagaaaatcaaatgatgacctaaatttcccttaatttgcaaatacagtagtaattaaggtacatctctaaagtggagcacttacaccaggctctaagattcactttgaggtggaacttaaaaccagtgtactgtatgtatgcattggtaatagctacttt

SEQ ID NO: 8961 - DNA, 4618 bp, Homo sapiens
  source 1..4618: mol_type = unassigned DNA
gcatggcctgccgggagggggcaggtagccggcgggcccggtccaatgggtgccggcttccgaggagagggcggaggagaggaggaaggaggcgaactgtgggccccggccccattcattgccgtggccggcgggcactggggccccgtgttttcagagtcatggaggcgctaattcctgtcataaacaagctccaggacgtcttcaacacggtgggcgccgacatcatccagctgcctcaaatcgtcgtagtgggaacgcagagcagcggaaagagctcagtgctagaaagcctggtggggagggacctgcttcccagaggtactggaattgtcacccggagacctctcattctgcaactggtccatgtttcacaagaagataaacggaaaacaacaggagaagaaaatgaccctgctacatggaaaaactcaagacacctttctaaaggggtggaagcagaagaatggggtaaatttcttcacaccaaaaataagctttacacggattttgatgaaattcgacaagaaattgaaaatgaaacagaaagaatttcaggaaataataagggagtaagccctgaaccaattcatcttaagattttttcacccaacgttgtcaatttgacacttgtggatttgccaggaatgaccaaggtgcctgtaggtgatcaacctaaggatattgagcttcaaatcagagagctcattcttcggttcatcagtaatcctaattccattatcctcgctgtcactgctgctaatacagatatggcaacatcagaggcacttaaaatttcaagagaggtagatccagatggtcgcagaaccctagctgtaatcactaaacttgatctcatggatgcgggtactgatgccatggatgtattgatgggaagggttattccagtcaaacttggaataattggagtagttaacaggagccagctagatattaacaacaagaagagtgtaactgattcaatccgtgatgagtatgcttttcttcaaaagaaatatccatctctggccaatagaaatggaacaaagtatcttgctaggactctaaacaggttactgatgcatcacatcagagattgtttaccagagttgaaaacaagaataaatgttctagctgctcagtatcagtctcttctaaatagctacggtgaacccgtggatgataaaagtgctactttactccaacttattaccaaatttgccacagaatattgtaacactattgaaggaactgcaaaatatattgaaacttcggagctatgcggtggtgctagaatttgttatattttccatgagacttttgggcgaaccttagaatctgttgatccacttggtggccttaacactattgacattttgactgccattagaaatgctactggtcctcgtcctgctttatttgtgcctgaggtttcatttgagttactggtgaagcggcaaatcaaacgtctagaagagcccagcctccgctgtgtggaactggttcatgaggaaatgcaaaggatcattcagcactgtagcaattacagtacacaggaattgttacgatttcctaaacttcatgatgccatagttgaagtggtgacttgtcttcttcgtaaaaggttgcctgttacaaatgaaatggtccataacttagtggcaattgaactggcttatatcaacacaaaacatccagactttgctgatgcttgtgggctaatgaacaataatatagaggaacaaaggagaaacaggctagccagagaattaccttcagctgtatcacgagacaagtcttctaaagttccaagtgctttggcacctgcctcccaggagccctcccccgctgcttctgctgaggctgatggcaaggttgcatctggaggtggtggggttggagatggtgttcaagaaccaaccacaggcaactggagaggaatgctgaaaacttcaaaagctgaagagttattagcagaagaaaaatcaaaacccattccaattatgccagccagtccacaaaaaggtcatgccgtgaacctgctagatgtgccagttcctgttgcacgaaaactatctgctcgggaacagcgagattgtgaggttattgaacgactcattaaatcatattttctcattgtcagaaagaatattcaagacagtgtgccaaaggcagtaatgcattttttggttaatcatgtgaaagacactcttcagagtgagctagtaggccagctgtataaatcatccttattggatgatcttctgacagaatctgaggacatggcacagcgcaggaaagaagcagctgatatgctaaaggcattacaaggagccagtcaaattattgctgaaatccgggagactcatctttggtgaagagaactatgtaatactgagactttgttgactcaaaacttgctagttactgcctacctgagtagaatcttatttatgaactcctgtgtattgcaatggtatgaatctgctcatgtggagactggctataaactgaaaagtgtattccaaattgcagaacacatcacacatttaatccaaataataaatggctgtttctaaagtttcccagtatatataaaatacatcaagtctgtcttgtgacagtttcatctgaacttaacttaaaaacaactgttaatgttctagttgtgcaaagcagtttgcctgtggataagatgacctgtgtaataatctttgttagtagtcttaaagctgctgccatagtcctccaagaagaaagcaccaagacaacatttcatatgactataatgcatgtactatataagctgatctggctttgaaagatgtgagttggcaagttcctcacatagagtcattgtattccacctgtccttcaatttagttttttctgagcttctttgcagcctttgatgtgtttttaagaaagctgaatgcacaagaggatctgtgacactgacatggctgtggtgtgcatactgtgtagttacatagcccttccaattctgggtccatttgcactagcaaattaaaatatgctttgattcatacttaaacctgaaagcaggaatgcctacattaattcctacattaaaaacagccatctacccttgattatctagaaagacttggtaatgatggtcagttccttttagatttcagaaaatcaaatgatgacctaaatttcccttaatttgcaaatacagtagtaattaaggtacatctctaaagtggagcacttacaccaggctctaagattcactttgaggtggaacttaaaaccagtgtactgtatgtatgcattggtaatagctacttttgcttcatagcttcataccaacaaaatatatttattagaatagtatgaaagtactggaggagctgaaagaaaaacacccaaggctgggcgtggtggcacacgcctgtaatcccagcactttgggaggccgaggcaggtggatcacctgaggttgggagttggagaccagcttgaccaacatggagaaaccccgtctctactaaaaatacaaaattggccgggcgtggtggcgcatgcctgtaatcccagctactcgggagggtgaggcaggagaattgcttgaccctgggaggtggaggttgtggtgagctaagatcgtgccattgcactccagccttggcaacaagagcgaaactccgtctcaaaaaaaaaaaataaaacaacacccagatagatacacatactccttcagacttacagacctaagctgcatttatggggtagtgatgaggtttagaacatatacatattttgttaaaattccccagatgattcttggtatgaacgactatattataaattttaagatgtacttagaaatccttaagacatctagccccgtctctaatagacaacacatttatattgcagatattacttttttttcagtttatgaccaggtatttatgaaggactattggcagggaaaatatgaatatgttaactttagcttatggcatcaatttactaaggaacaacaggctcaccaactgatgtcaaacataaaaacccccacatcagtctgatacgatatggtactactttgaatctgttactagtaccatcttgacagaggatacatgctcccaaaacgtttgttaccacacttaaaaatcactgccatcattaagcatcagtttcaaaattatagccattcatgatttactttttccagatgactatcattattctagtcctttgaatttgtaaggggaaaaaaaacaaaaacaaaaacttacgatgcacttttctccagcacatcagatttcaaattgaaaattaaagacatgctatggtaatgcacttgctagtactacacactttgtacaacaaaaaacagaggcaagaaacaacggaaagagaaaagccttcctttgttggcccttaaactgagtcaagatctgaaatgtagagatgatctctgacgatacctgtatgttcttattgtgtaaataaaattgctggtatgaaatgacactaaagtttgtcaaaaaatgaattcttaacttttctcccagagaaagggagacaaaaggagctttttaatacctaatctactttggaacataaccgtatagag

SEQ ID NO: 8962 - DNA, 2097 bp, Homo sapiens
  source 1..2097: mol_type = unassigned DNA
attgccgtggccggcgggcactggggccccgtgttttcagagtcatggaggcgctaattcctgtcataaacaagctccaggacgtcttcaacacggtgggcgccgacatcatccagctgcctcaaatcgtcgtagtgggaacgcagagcagcggaaagagctcagtgctagaaagcctggtggggagggacctgcttcccagaggtactggaattgtcacccggagacctctcattctgcaactggtccatgtttcacaagaagataaacggaaaacaacaggagaagaaaatgaccctgctacatggaaaaactcaagacacctttctaaaggggtggaagcagaagaatggggtaaatttcttcacaccaaaaataaggagccagctagatattaacaacaagaagagtgtaactgattcaatccgtgatgagtatgcttttcttcaaaagaaatatccatctctggccaatagaaatggaacaaagtatcttgctaggactctaaacaggttactgatgcatcacatcagagattgtttaccagagttgaaaacaagaataaatgttctagctgctcagtatcagtctcttctaaatagctacggtgaacccgtggatgataaaagtgctactttactccaacttattaccaaatttgccacagaatattgtaacactattgaaggaactgcaaaatatattgaaacttcggagctatgcggtggtgctagaatttgttatattttccatgagacttttgggcgaaccttagaatctgttgatccacttggtggccttaacactattgacattttgactgccattagaaatgctactggtcctcgtcctgctttatttgtgcctgaggtttcatttgagttactggtgaagcggcaaatcaaacgtctagaagagcccagcctccgctgtgtggaactggttcatgaggaaatgcaaaggatcattcagcactgtagcaattacagtacacaggaattgttacgatttcctaaacttcatgatgccatagttgaagtggtgacttgtcttcttcgtaaaaggttgcctgttacaaatgaaatggtccataacttagtggcaattgaactggcttatatcaacacaaaacatccagactttgctgatgcttgtgggctaatgaacaataatatagaggaacaaaggagaaacaggctagccagagaattaccttcagctgtatcacgagacaagtcttctaaagttccaagtgctttggcacctgcctcccaggagccctcccccgctgcttctgctgaggctgatggcaagttaattcaggacagcagaagagaaactaaaaatgttgcatctggaggtggtggggttggagatggtgttcaagaaccaaccacaggcaactggagaggaatgctgaaaacttcaaaagctgaagagttattagcagaagaaaaatcaaaacccattccaattatgccagccagtccacaaaaaggtcatgccgtgaacctgctagatgtgccagttcctgttgcacgaaaactatctgctcgggaacagcgagattgtgaggttattgaacgactcattaaatcatattttctcattgtcagaaagaatattcaagacagtgtgccaaaggcagtaatgcattttttggttaatcatgtgaaagacactcttcagagtgagctagtaggccagctgtataaatcatccttattggatgatcttctgacagaatctgaggacatggcacagcgcaggaaagaagcagctgatatgctaaaggcattacaaggagccagtcaaattattgctgaaatccgggagactcatctttggtgaagagaactatgtaatactgagactttgttgactcaaaacttgctagttactgcctacctgagtagaatcttatttatgaactcctgtgtattgcaatggtatgaatctgctcatgtggagactggctataaactgaaaagtgtattccaaattgcagaacacatcacacatttaatccaaataataaatggctgtttctaaagtttcccagtatatataaaatacatcaagtctgtcttgtgacag

SEQ ID NO: 8963 - DNA, 4439 bp, Homo sapiens
  source 1..4439: mol_type = unassigned DNA
agcgcatggcctgccgggagggggcaggtagccggcgggcccggtccaatgggtgccggcttccgaggagagggcggaggagaggaggaaggaggcgaactgtgggccccggccccattcattgccgtggccggcgggcactggggccccgtgttttcagagtcatggaggcgctaattcctgtcataaacaagctccaggacgtcttcaacacggtgggcgccgacatcatccagctgcctcaaatcgtcgtagtgggaacgcagagcagcggaaagagctcagtgctagaaagcctggtggggagggacctgcttcccagaggtactggaattgtcacccggagacctctcattctgcaactggtccatgtttcacaagaagataaacggaaaacaacaggagaagaaaatggggtggaagcagaagaatggggtaaatttcttcacaccaaaaataagctttacacggattttgatgaaattcgacaagaaattgaaaatgaaacagaaagaatttcaggaaataataagggagtaagccctgaaccaattcatcttaagattttttcacccaacgttgtcaatttgacacttgtggatttgccaggaatgaccaaggtgcctgtaggtgatcaacctaaggatattgagcttcaaatcagagagctcattcttcggttcatcagtaatcctaattccattatcctcgctgtcactgctgctaatacagatatggcaacatcagaggcacttaaaatttcaagagaggtagatccagatggtcgcagaaccctagctgtaatcactaaacttgatctcatggatgcgggtactgatgccatggatgtattgatgggaagggttattccagtcaaacttggaataattggagtagttaacaggagccagctagatattaacaacaagaagagtgtaactgattcaatccgtgatgagtatgcttttcttcaaaagaaatatccatctctggccaatagaaatggaacaaagtatcttgctaggactctaaacaggttactgatgcatcacatcagagattgtttaccagagttgaaaacaagaataaatgttctagctgctcagtatcagtctcttctaaatagctacggtgaacccgtggatgataaaagtgctactttactccaacttattaccaaatttgccacagaatattgtaacactattgaaggaactgcaaaatatattgaaacttcggagctatgcggtggtgctagaatttgttatattttccatgagacttttgggcgaaccttagaatctgttgatccacttggtggccttaacactattgacattttgactgccattagaaatgctactggtcctcgtcctgctttatttgtgcctgaggtttcatttgagttactggtgaagcggcaaatcaaacgtctagaagagcccagcctccgctgtgtggaactggttcatgaggaaatgcaaaggatcattcagcactgtagcaattacagtacacaggaattgttacgatttcctaaacttcatgatgccatagttgaagtggtgacttgtcttcttcgtaaaaggttgcctgttacaaatgaaatggtccataacttagtggcaattgaactggcttatatcaacacaaaacatccagactttgctgatgcttgtgggctaatgaacaataatatagaggaacaaaggagaaacaggctagccagagaattaccttcagctgtatcacgagacaagttaattcaggacagcagaagagaaactaaaaatgttgcatctggaggtggtggggttggagatggtgttcaagaaccaaccacaggcaactggagaggaatgctgaaaacttcaaaagctgaagagttattagcagaagaaaaatcaaaacccattccaattatgccagccagtccacaaaaaggtcatgccgtgaacctgctagatgtgccagttcctgttgcacgaaaactatctgctcgggaacagcgagattgtgaggttattgaacgactcattaaatcatattttctcattgtcagaaagaatattcaagacagtgtgccaaaggcagtaatgcattttttggttaatcatgtgaaagacactcttcagagtgagctagtaggccagctgtataaatcatccttattggatgatcttctgacagaatctgaggacatggcacagcgcaggaaagaagcagctgatatgctaaaggcattacaaggagccagtcaaattattgctgaaatccgggagactcatctttggtgaagagaactatgtaatactgagactttgttgactcaaaacttgctagttactgcctacctgagtagaatcttatttatgaactcctgtgtattgcaatggtatgaatctgctcatgtggagactggctataaactgaaaagtgtattccaaattgcagaacacatcacacatttaatccaaataataaatggctgtttctaaagtttcccagtatatataaaatacatcaagtctgtcttgtgacagtttcatctgaacttaacttaaaaacaactgttaatgttctagttgtgcaaagcagtttgcctgtggataagatgacctgtgtaataatctttgttagtagtcttaaagctgctgccatagtcctccaagaagaaagcaccaagacaacatttcatatgactataatgcatgtactatataagctgatctggctttgaaagatgtgagttggcaagttcctcacatagagtcattgtattccacctgtccttcaatttagttttttctgagcttctttgcagcctttgatgtgtttttaagaaagctgaatgcacaagaggatctgtgacactgacatggctgtggtgtgcatactgtgtagttacatagcccttccaattctgggtccatttgcactagcaaattaaaatatgctttgattcatacttaaacctgaaagcaggaatgcctacattaattcctacattaaaaacagccatctacccttgattatctagaaagacttggtaatgatggtcagttccttttagatttcagaaaatcaaatgatgacctaaatttcccttaatttgcaaatacagtagtaattaaggtacatctctaaagtggagcacttacaccaggctctaagattcactttgaggtggaacttaaaaccagtgtactgtatgtatgcattggtaatagctacttttgcttcatagcttcataccaacaaaatatatttattagaatagtatgaaagtactggaggagctgaaagaaaaacacccaaggctgggcgtggtggcacacgcctgtaatcccagcactttgggaggccgaggcaggtggatcacctgaggttgggagttggagaccagcttgaccaacatggagaaaccccgtctctactaaaaatacaaaattggccgggcgtggtggcgcatgcctgtaatcccagctactcgggagggtgaggcaggagaattgcttgaccctgggaggtggaggttgtggtgagctaagatcgtgccattgcactccagccttggcaacaagagcgaaactccgtctcaaaaaaaaaaaataaaacaacacccagatagatacacatactccttcagacttacagacctaagctgcatttatggggtagtgatgaggtttagaacatatacatattttgttaaaattccccagatgattcttggtatgaacgactatattataaattttaagatgtacttagaaatccttaagacatctagccccgtctctaatagacaacacatttatattgcagatattacttttttttcagtttatgaccaggtatttatgaaggactattggcagggaaaatatgaatatgttaactttagcttatggcatcaatttactaaggaacaacaggctcaccaactgatgtcaaacataaaaacccccacatcagtctgatacgatatggtactactttgaatctgttactagtaccatcttgacagaggatacatgctcccaaaacgtttgttaccacacttaaaaatcactgccatcattaagcatcagtttcaaaattatagccattcatgatttactttttccagatgactatcattattctagtcctttgaatttgtaaggggaaaaaaaacaaaaacaaaaacttacgatgcacttttctccagcacatcagatttcaaattgaaaattaaagacatgctatggtaatgcacttgctagtactacacactttgtacaacaaaaaacagaggcaagaaacaacggaaagagaaaagccttcctttgttggcccttaaactgagtcaagatctgaaatgtagagatgatctctgacgatacctgtatgttcttattgtgtaaataaaattgctggtatgaaatgacactaaa

SEQ ID NO: 8964 - DNA, 2393 bp, Homo sapiens
  source 1..2393: mol_type = unassigned DNA
attgccgtggccggcgggcactggggccccgtgttttcagagtcatggaggcgctaattcctgtcataaacaagctccaggacgtcttcaacacggtgggcgccgacatcatccagctgcctcaaatcgtcgtagtgggaacgcagagcagcggaaagagctcagtgctagaaagcctggtggggagggacctgcttcccagaggtactggaattgtcacccggagacctctcattctgcaactggtccatgtttcacaagaagataaacggaaaacaacaggagaagaaaatggggtggaagcagaagaatggggtaaatttcttcacaccaaaaataagctttacacggattttgatgaaattcgacaagaaattgaaaatgaaacagaaagaatttcaggaaataataagggagtaagccctgaaccaattcatcttaagattttttcacccaacgttgtcaatttgacacttgtggatttgccaggaatgaccaaggtgcctgtaggtgatcaacctaaggatattgagcttcaaatcagagagctcattcttcggttcatcagtaatcctaattccattatcctcgctgtcactgctgctaatacagatatggcaacatcagaggcacttaaaatttcaagagaggtagatccagatggtcgcagaaccctagctgtaatcactaaacttgatctcatggatgcgggtactgatgccatggatgtattgatgggaagggttattccagtcaaacttggaataattggagtagttaacaggagccagctagatattaacaacaagaagagtgtaactgattcaatccgtgatgagtatgcttttcttcaaaagaaatatccatctctggccaatagaaatggaacaaagtatcttgctaggactctaaacaggttactgatgcatcacatcagagattgtttaccagagttgaaaacaagaataaatgttctagctgctcagtatcagtctcttctaaatagctacggtgaacccgtggatgataaaagtgctactttactccaacttattaccaaatttgccacagaatattgtaacactattgaaggaactgcaaaatatattgaaacttcggagctatgcggtggtgctagaatttgttatattttccatgagacttttgggcgaaccttagaatctgttgatccacttggtggccttaacactattgacattttgactgccattagaaatgctactggtcctcgtcctgctttatttgtgcctgaggtttcatttgagttactggtgaagcggcaaatcaaacgtctagaagagcccagcctccgctgtgtggaactggttcatgaggaaatgcaaaggatcattcagcactgtagcaattacagtacacaggaattgttacgatttcctaaacttcatgatgccatagttgaagtggtgacttgtcttcttcgtaaaaggttgcctgttacaaatgaaatggtccataacttagtggcaattgaactggcttatatcaacacaaaacatccagactttgctgatgcttgtgggctaatgaacaataatatagaggaacaaaggagaaacaggctagccagagaattaccttcagctgtatcacgagacaagtcttctaaagttccaagtgctttggcacctgcctcccaggagccctcccccgctgcttctgctgaggctgatggcaaggttgcatctggaggtggtggggttggagatggtgttcaagaaccaaccacaggcaactggagaggaatgctgaaaacttcaaaagctgaagagttattagcagaagaaaaatcaaaacccattccaattatgccagccagtccacaaaaaggtcatgccgtgaacctgctagatgtgccagttcctgttgcacgaaaactatctgctcgggaacagcgagattgtgaggttattgaacgactcattaaatcatattttctcattgtcagaaagaatattcaagacagtgtgccaaaggcagtaatgcattttttggttaatcatgtgaaagacactcttcagagtgagctagtaggccagctgtataaatcatccttattggatgatcttctgacagaatctgaggacatggcacagcgcaggaaagaagcagctgatatgctaaaggcattacaaggagccagtcaaattattgctgaaatccgggagactcatctttggtgaagagaactatgtaatactgagactttgttgactcaaaacttgctagttactgcctacctgagtagaatcttatttatgaactcctgtgtattgcaatggtatgaatctgctcatgtggagactggctataaactgaaaagtgtattccaaattgcagaacacatcacacat

SEQ ID NO: 8965 - DNA, 2487 bp, Homo sapiens
  source 1..2487: mol_type = unassigned DNA
ggaggcgaactgtgggccccggccccattcattgccgtggccggcgggcactggggccccgtgttttcagagtcatggaggcgctaattcctgtcataaacaagctccaggacgtcttcaacacggtgggcgccgacatcatccagctgcctcaaatcgtcgtagtgggaacgcagagcagcggaaagagctcagtgctagaaagcctggtggggagggacctgcttcccagaggtactggaattgtcacccggagacctctcattctgcaactggtccatgtttcacaagaagataaacggaaaacaacaggagaagaaaatggggtggaagcagaagaatggggtaaatttcttcacaccaaaaataagctttacacggattttgatgaaattcgacaagaaattgaaaatgaaacagaaagaatttcaggaaataataagggagtaagccctgaaccaattcatcttaagattttttcacccaacgttgtcaatttgacacttgtggatttgccaggaatgaccaaggtgcctgtaggtgatcaacctaaggatattgagcttcaaatcagagagctcattcttcggttcatcagtaatcctaattccattatcctcgctgtcactgctgctaatacagatatggcaacatcagaggcacttaaaatttcaagagaggtagatccagatggtcgcagaaccctagctgtaatcactaaacttgatctcatggatgcgggtactgatgccatggatgtattgatgggaagggttattccagtcaaacttggaataattggagtagttaacaggagccagctagatattaacaacaagaagagtgtaactgattcaatccgtgatgagtatgcttttcttcaaaagaaatatccatctctggccaatagaaatggaacaaagtatcttgctaggactctaaacaggttactgatgcatcacatcagagattgtttaccagagttgaaaacaagaataaatgttctagctgctcagtatcagtctcttctaaatagctacggtgaacccgtggatgataaaagtgctactttactccaacttattaccaaatttgccacagaatattgtaacactattgaaggaactgcaaaatatattgaaacttcggagctatgcggtggtgctagaatttgttatattttccatgagacttttgggcgaaccttagaatctgttgatccacttggtggccttaacactattgacattttgactgccattagaaatgctactggtcctcgtcctgctttatttgtgcctgaggtttcatttgagttactggtgaagcggcaaatcaaacgtctagaagagcccagcctccgctgtgtggaactggttcatgaggaaatgcaaaggatcattcagcactgtagcaattacagtacacaggaattgttacgatttcctaaacttcatgatgccatagttgaagtggtgacttgtcttcttcgtaaaaggttgcctgttacaaatgaaatggtccataacttagtggcaattgaactggcttatatcaacacaaaacatccagactttgctgatgcttgtgggctaatgaacaataatatagaggaacaaaggagaaacaggctagccagagaattaccttcagctgtatcacgagacaagtcttctaaagttccaagtgctttggcacctgcctcccaggagccctcccccgctgcttctgctgaggctgatggcaagttaattcaggacagcagaagagaaactaaaaatgttgcatctggaggtggtggggttggagatggtgttcaagaaccaaccacaggcaactggagaggaatgctgaaaacttcaaaagctgaagagttattagcagaagaaaaatcaaaacccattccaattatgccagccagtccacaaaaaggtcatgccgtgaacctgctagatgtgccagttcctgttgcacgaaaactatctgctcgggaacagcgagattgtgaggttattgaacgactcattaaatcatattttctcattgtcagaaagaatattcaagacagtgtgccaaaggcagtaatgcattttttggttaatcatgtgaaagacactcttcagagtgagctagtaggccagctgtataaatcatccttattggatgatcttctgacagaatctgaggacatggcacagcgcaggaaagaagcagctgatatgctaaaggcattacaaggagccagtcaaattattgctgaaatccgggagactcatctttggtgaagagaactatgtaatactgagactttgttgactcaaaacttgctagttactgcctacctgagtagaatcttatttatgaactcctgtgtattgcaatggtatgaatctgctcatgtggagactggctataaactgaaaagtgtattccaaattgcagaacacatcacacatttaatccaaataataaatggctgtttctaaa

SEQ ID NO: 8966 - DNA, 2699 bp, Homo sapiens
  source 1..2699: mol_type = unassigned DNA
gaaggaggcgaactgtgggccccggccccattcattgccgtggccggcgggcactggggccccgtgttttcagagtcatggaggcgctaattcctgtcataaacaagctccaggacgtcttcaacacggtgggcgccgacatcatccagctgcctcaaatcgtcgtagtgggaacgcagagcagcggaaagagctcagtgctagaaagcctggtggggagggacctgcttcccagaggtactggaattgtcacccggagacctctcattctgcaactggtccatgtttcacaagaagataaacggaaaacaacaggagaagaaaatgaccctgctacatggaaaaactcaagacacctttctaaaggggtggaagcagaagaatggggtaaatttcttcacaccaaaaataagctttacacggattttgatgaaattcgacaagaaattgaaaatgaaacagaaagaatttcaggaaataataagggagtaagccctgaaccaattcatcttaagattttttcacccaacgttgtcaatttgacacttgtggatttgccaggaatgaccaaggtgcctgtaggtgatcaacctaaggatattgagcttcaaatcagagagctcattcttcggttcatcagtaatcctaattccattatcctcgctgtcactgctgctaatacagatatggcaacatcagaggcacttaaaatttcaagagaggtagatccagatggtcgcagaaccctagctgtaatcactaaacttgatctcatggatgcgggtactgatgccatggatgtattgatgggaagggttattccagtcaaacttggaataattggagtagttaacaggagccagctagatattaacaacaagaagagtgtaactgattcaatccgtgatgagtatgcttttcttcaaaagaaatatccatctctggccaatagaaatggaacaaagtatcttgctaggactctaaacaggttactgatgcatcacatcagagattgtttaccagagttgaaaacaagaataaatgttctagctgctcagtatcagtctcttctaaatagctacggtgaacccgtggatgataaaagtgctactttactccaacttattaccaaatttgccacagaatattgtaacactattgaaggaactgcaaaatatattgaaacttcggagctatgcggtggtgctagaatttgttatattttccatgagacttttgggcgaaccttagaatctgttgatccacttggtggccttaacactattgacattttgactgccattagaaatgctactggtcctcgtcctgctttatttgtgcctgaggtttcatttgagttactggtgaagcggcaaatcaaacgtctagaagagcccagcctccgctgtgtggaactggttcatgaggaaatgcaaaggatcattcagcactgtagcaattacagtacacaggaattgttacgatttcctaaacttcatgatgccatagttgaagtggtgacttgtcttcttcgtaaaaggttgcctgttacaaatgaaatggtccataacttagtggcaattgaactggcttatatcaacacaaaacatccagactttgctgatgcttgtgggctaatgaacaataatatagaggaacaaaggagaaacaggctagccagagaattaccttcagctgtatcacgagacaagtcttctaaagttccaagtgctttggcacctgcctcccaggagccctcccccgctgcttctgctgaggctgatggcaagttaattcaggacagcagaagagaaactaaaaatgttgcatctggaggtggtggggttggagatggtgttcaagaaccaaccacaggcaactggagaggaatgctgaaaacttcaaaagctgaagagttattagcagaagaaaaatcaaaacccattccaattatgccagccagtccacaaaaaggtcatgccgtgaacctgctagatgtgccagttcctgttgcacgaaaactatctgctcgggaacagcgagattgtgaggttattgaacgactcattaaatcatattttctcattgtcagaaagaatattcaagacagtgtgccaaaggcagtaatgcattttttggttaatcatgtgaaagacactcttcagagtgagctagtaggccagctgtataaatcatccttattggatgatcttctgacagaatctgaggacatggcacagcgcaggaaagaagcagctgatatgctaaaggcattacaaggagccagtcaaattattgctgaaatccgggagactcatctttggtgaagagaactatgtaatactgagactttgttgactcaaaacttgctagttactgcctacctgagtagaatcttatttatgaactcctgtgtattgcaatggtatgaatctgctcatgtggagactggctataaactgaaaagtgtattccaaattgcagaacacatcacacatttaatccaaataataaatggctgtttctaaagtttcccagtatatataaaatacatcaagtctgtcttgtgacagtttcatctgaacttaacttaaaaacaactgttaatgttctagttgtgcaaagcagtttgcctgtggataagatgacctgtgtaataatctttgttagtagtcttaaagctgctgccatagtcctcc

SEQ ID NO: 8967 - DNA, 3633 bp, Homo sapiens
  source 1..3633: mol_type = unassigned DNA
gagaaccggatgaggcggcgaccgtgaggccgagccgggagcgggcgtcttgccgaggcccgggcgggcggggagcaacggctacagacgccgcggggccaggtcgttgagggtcggcggcgggcgaggagcgcagggcgctcgggccgggggccgccggcgccatgggcaaccgcgggatggaagagctgatcccgctggtcaacaaactgcaggacgccttcagctccatcggccagagctgccacctggacctgccgcagatcgctgtagtgggcggccagagcgccggcaagagctcggtgctggagaacttcgtgggccgggacttccttccccgcggttcaggaatcgtcacccggcggcctctcattctgcagctcatcttctcaaaaacagaacatgccgagtttttgcactgcaagtccaaaaagtttacagactttgatgaagtccggcaggagattgaagcagagaccgacagggtcacggggaccaacaaaggcatctccccagtgcccatcaaccttcgagtctactcgccacacgtgttgaacttgaccctcatcgacctcccgggtatcaccaaggtgcctgtgggcgaccagcctccagacatcgagtaccagatcaaggacatgatcctgcagttcatcagccgggagagcagcctcattctggctgtcacgcccgccaacatggacctggccaactccgacgccctcaagctggccaaggaagtcgatccccaaggcctacggaccatcggtgtcatcaccaagcttgacctgatggacgagggcaccgacgccagggacgtcttggagaacaagttgctcccgttgagaagaggctacattggcgtggtgaaccgcagccagaaggatattgagggcaagaaggacatccgtgcagcactggcagctgagaggaagttcttcctctcccacccggcctaccggcacatggccgaccgcatgggcacgccacatctgcagaagacgctgaatcagcaactgaccaaccacatccgggagtcgctgccggccctacgtagcaaactacagagccagctgctgtccctggagaaggaggtggaggagtacaagaactttcggcccgacgaccccacccgcaaaaccaaagccctgctgcagatggtccagcagtttggggtggattttgagaagaggatcgagggctcaggagatcaggtggacactctggagctctccgggggcgcccgaatcaatcgcatcttccacgagcggttcccatttgagctggtgaagatggagtttgacgagaaggacttacgacgggagatcagctatgccattaagaacatccatggagtcaggacggggctcttcacccccgacatggcctttgaagccattgtgaaaaaacagattgtaaaactcaaagagccgagtttgaagtgtgttgatctcgtggtctcagagctggccacggtcataaaaaagtgtgccgagaagctcagttcctacccccggttgcgagaggagacagagcgaatcgtcaccacttacatccgggaacgggaggggagaacgaaggaccagattcttctgctgatcgacattgagcagtcctacatcaacacgaaccatgaggacttcatcgggtttgccaatgcccagcagaggagcacgcagctgaacaagaagagagccatccccaatcagcctgaaaccctggtgatccgcaggggctggctgaccatcaacaacatcagcctgatgaaaggcggctccaaggagtactggtttgtgctgactgccgagtcactgtcctggtacaaggatgaggaggagaaagagaagaagtacatgctgcctctggacaacctcaagatccgtgatgtggagaagggcttcatgtccaacaagcacgtcttcgccatcttcaacacggagcagagaaacgtctacaaggacctgcggcagatcgagctggcctgtgactcccaggaagacgtggacagctggaaggcctcgttcctccgagctggcgtctaccccgagaaggaccaggcagaaaacgaggatggggcccaggagaacaccttctccatggacccccaactggagcggcaggtggagaccattcgcaacctggtggactcatacgtggccatcatcaacaagtccatccgcgacctcatgccaaagaccatcatgcacctcatgatcaacaatacgaaggccttcatccaccacgagctgctggcctacctatactcctcggcagaccagagcagcctcatggaggagtcggctgaccaggcacagcggcgggacgacatgctgcgcatgtaccatgccctcaaggaggcgctcaacatcatcggtgacatcagcaccagcactgtgtccacgcctgtacccccgcctgtcgatgacacctggctccagagcgccagcagccacagccccactccacagcgccgaccggtgtccagcatacacccccctggccggcccccagcagtgaggggccccactccagggccccccctgattcctgttcccgtgggggcagcagcctccttctcggcgcccccaatcccatcccggcctggaccccagagcgtgtttgccaacagtgacctcttcccagccccgcctcagatcccatctcggccagttcggatccccccagggattcccccaggagtgcccagcagaagaccccctgctgcgcccagccggcccaccattatccgcccagccgagccatccctgctcgactaggcctcgaggggggcgtgctctcgggggggcctcacgcacccgcggcgcaggagcttcagtggtctggggccctccgccgcccctatgctgggaccaggctcccagtgggcagccctggcctcttccttaacgctggccccggtccagggccggcccctgtgcctggctggacaccgcactgcgcaaaggggccctggagctccaggcagggggcgctggggtgttgcactttgggggatggagtctcagggtggcagaggggggaccagaacccttgacaccatcctgaatgaggggtccagcctgggggggactctaccaaggtcttcttgggctgggaaagcccatgtagggcaggccttctataagtgcgggcaccaagggcgcctacatccccaggccttgctggggtgcaggggtatatcaacttcccattagcaggagctccccagcggcaagcctggcccagtgggctcggtagtgcccagctggcaggcctgaggtgtacatagtccttcccggccatattaaccacacagcctgagcctggcccagcctcggctgccagaggtgcctttgctaggcccggagccgttggcccgggccggccttgccctattcctctcctcctcctcctcctgggtcccccagggtggctgggcttgggctatgtgggtggtggtggcggggggtcttgggggcctctcagctcccgcccatgcctccctgatgggtgggcccagggcggcctctctctgaggagacctcacccactcctcgctcagtttgaccactgtaagtgcctgcactctgtattctattaataaactaaaataaagggaagacgctgctggtg

SEQ ID NO: 8968 - DNA, 3654 bp, Homo sapiens
  source 1..3654: mol_type = unassigned DNA
gaggtcgctcgggtcgggtgtcgcctgagaaccggatgaggcggcgaccgtgaggccgagccgggagcgggcgtcttgccgaggcccgggcgggcggggagcaacggctacagacgccgcggggccaggtcgttgagggtcggcggcgggcgaggagcgcagggcgctcgggccgggggccgccggcgccatgggcaaccgcgggatggaagagctgatcccgctggtcaacaaactgcaggacgccttcagctccatcggccagagctgccacctggacctgccgcagatcgctgtagtgggcggccagagcgccggcaagagctcggtgctggagaacttcgtgggccgggacttccttccccgcggttcaggaatcgtcacccggcggcctctcattctgcagctcatcttctcaaaaacagaacatgccgagtttttgcactgcaagtccaaaaagtttacagactttgatgaagtccggcaggagattgaagcagagaccgacagggtcacggggaccaacaaaggcatctccccagtgcccatcaaccttcgagtctactcgccacacgtgttgaacttgaccctcatcgacctcccgggtatcaccaaggtgcctgtgggcgaccagcctccagacatcgagtaccagatcaaggacatgatcctgcagttcatcagccgggagagcagcctcattctggctgtcacgcccgccaacatggacctggccaactccgacgccctcaagctggccaaggaagtcgatccccaaggcctacggaccatcggtgtcatcaccaagcttgacctgatggacgagggcaccgacgccagggacgtcttggagaacaagttgctcccgttgagaagaggctacattggcgtggtgaaccgcagccagaaggatattgagggcaagaaggacatccgtgcagcactggcagctgagaggaagttcttcctctcccacccggcctaccggcacatggccgaccgcatgggcacgccacatctgcagaagacgctgaatcagcaactgaccaaccacatccgggagtcgctgccggccctacgtagcaaactacagagccagctgctgtccctggagaaggaggtggaggagtacaagaactttcggcccgacgaccccacccgcaaaaccaaagccctgctgcagatggtccagcagtttggggtggattttgagaagaggatcgagggctcaggagatcaggtggacactctggagctctccgggggcgcccgaatcaatcgcatcttccacgagcggttcccatttgagctggtgaagatggagtttgacgagaaggacttacgacgggagatcagctatgccattaagaacatccatggagtcaggaccgggcttttcaccccggacttggcattcgaggccattgtgaaaaagcaggtcgtcaagctgaaagagccctgtctgaaatgtgtcgacctggttatccaggagctaatcaatacagttaggcagtgtaccagtaagctcagttcctacccccggttgcgagaggagacagagcgaatcgtcaccacttacatccgggaacgggaggggagaacgaaggaccagattcttctgctgatcgacattgagcagtcctacatcaacacgaaccatgaggacttcatcgggtttgccaatgcccagcagaggagcacgcagctgaacaagaagagagccatccccaatcaggtgatccgcaggggctggctgaccatcaacaacatcagcctgatgaaaggcggctccaaggagtactggtttgtgctgactgccgagtcactgtcctggtacaaggatgaggaggagaaagagaagaagtacatgctgcctctggacaacctcaagatccgtgatgtggagaagggcttcatgtccaacaagcacgtcttcgccatcttcaacacggagcagagaaacgtctacaaggacctgcggcagatcgagctggcctgtgactcccaggaagacgtggacagctggaaggcctcgttcctccgagctggcgtctaccccgagaaggaccaggcagaaaacgaggatggggcccaggagaacaccttctccatggacccccaactggagcggcaggtggagaccattcgcaacctggtggactcatacgtggccatcatcaacaagtccatccgcgacctcatgccaaagaccatcatgcacctcatgatcaacaatacgaaggccttcatccaccacgagctgctggcctacctatactcctcggcagaccagagcagcctcatggaggagtcggctgaccaggcacagcggcgggacgacatgctgcgcatgtaccatgccctcaaggaggcgctcaacatcatcggtgacatcagcaccagcactgtgtccacgcctgtacccccgcctgtcgatgacacctggctccagagcgccagcagccacagccccactccacagcgccgaccggtgtccagcatacacccccctggccggcccccagcagtgaggggccccactccagggccccccctgattcctgttcccgtgggggcagcagcctccttctcggcgcccccaatcccatcccggcctggaccccagagcgtgtttgccaacagtgacctcttcccagccccgcctcagatcccatctcggccagttcggatccccccagggattcccccaggagtgcccagcagaagaccccctgctgcgcccagccggcccaccattatccgcccagccgagccatccctgctcgactaggcctcgaggggggcgtgctctcgggggggcctcacgcacccgcggcgcaggagcttcagtggtctggggccctccgccgcccctatgctgggaccaggctcccagtgggcagccctggcctcttccttaacgctggccccggtccagggccggcccctgtgcctggctggacaccgcactgcgcaaaggggccctggagctccaggcagggggcgctggggtgttgcactttgggggatggagtctcagggtggcagaggggggaccagaacccttgacaccatcctgaatgaggggtccagcctgggggggactctaccaaggtcttcttgggctgggaaagcccatgtagggcaggccttctataagtgcgggcaccaagggcgcctacatccccaggccttgctggggtgcaggggtatatcaacttcccattagcaggagctccccagcggcaagcctggcccagtgggctcggtagtgcccagctggcaggcctgaggtgtacatagtccttcccggccatattaaccacacagcctgagcctggcccagcctcggctgccagaggtgcctttgctaggcccggagccgttggcccgggccggccttgccctattcctctcctcctcctcctcctgggtcccccagggtggctgggcttgggctatgtgggtggtggtggcggggggtcttgggggcctctcagctcccgcccatgcctccctgatgggtgggcccagggcggcctctctctgaggagacctcacccactcctcgctcagtttgaccactgtaagtgcctgcactctgtattctattaataaactaaaataaagggaagacgctgctggtggctgctg

SEQ ID NO: 8969 - DNA, 3633 bp, Homo sapiens
  source 1..3633: mol_type = unassigned DNA
gagaaccggatgaggcggcgaccgtgaggccgagccgggagcgggcgtcttgccgaggcccgggcgggcggggagcaacggctacagacgccgcggggccaggtcgttgagggtcggcggcgggcgaggagcgcagggcgctcgggccgggggccgccggcgccatgggcaaccgcgggatggaagagctgatcccgctggtcaacaaactgcaggacgccttcagctccatcggccagagctgccacctggacctgccgcagatcgctgtagtgggcggccagagcgccggcaagagctcggtgctggagaacttcgtgggccgggacttccttccccgcggttcaggaatcgtcacccggcggcctctcattctgcagctcatcttctcaaaaacagaacatgccgagtttttgcactgcaagtccaaaaagtttacagactttgatgaagtccggcaggagattgaagcagagaccgacagggtcacggggaccaacaaaggcatctccccagtgcccatcaaccttcgagtctactcgccacacgtgttgaacttgaccctcatcgacctcccgggtatcaccaaggtgcctgtgggcgaccagcctccagacatcgagtaccagatcaaggacatgatcctgcagttcatcagccgggagagcagcctcattctggctgtcacgcccgccaacatggacctggccaactccgacgccctcaagctggccaaggaagtcgatccccaaggcctacggaccatcggtgtcatcaccaagcttgacctgatggacgagggcaccgacgccagggacgtcttggagaacaagttgctcccgttgagaagaggctacattggcgtggtgaaccgcagccagaaggatattgagggcaagaaggacatccgtgcagcactggcagctgagaggaagttcttcctctcccacccggcctaccggcacatggccgaccgcatgggcacgccacatctgcagaagacgctgaatcagcaactgaccaaccacatccgggagtcgctgccggccctacgtagcaaactacagagccagctgctgtccctggagaaggaggtggaggagtacaagaactttcggcccgacgaccccacccgcaaaaccaaagccctgctgcagatggtccagcagtttggggtggattttgagaagaggatcgagggctcaggagatcaggtggacactctggagctctccgggggcgcccgaatcaatcgcatcttccacgagcggttcccatttgagctggtgaagatggagtttgacgagaaggacttacgacgggagatcagctatgccattaagaacatccatggagtcaggaccgggcttttcaccccggacttggcattcgaggccattgtgaaaaagcaggtcgtcaagctgaaagagccctgtctgaaatgtgtcgacctggttatccaggagctaatcaatacagttaggcagtgtaccagtaagctcagttcctacccccggttgcgagaggagacagagcgaatcgtcaccacttacatccgggaacgggaggggagaacgaaggaccagattcttctgctgatcgacattgagcagtcctacatcaacacgaaccatgaggacttcatcgggtttgccaatgcccagcagaggagcacgcagctgaacaagaagagagccatccccaatcagggggagatcctggtgatccgcaggggctggctgaccatcaacaacatcagcctgatgaaaggcggctccaaggagtactggtttgtgctgactgccgagtcactgtcctggtacaaggatgaggaggagaaagagaagaagtacatgctgcctctggacaacctcaagatccgtgatgtggagaagggcttcatgtccaacaagcacgtcttcgccatcttcaacacggagcagagaaacgtctacaaggacctgcggcagatcgagctggcctgtgactcccaggaagacgtggacagctggaaggcctcgttcctccgagctggcgtctaccccgagaaggaccaggcagaaaacgaggatggggcccaggagaacaccttctccatggacccccaactggagcggcaggtggagaccattcgcaacctggtggactcatacgtggccatcatcaacaagtccatccgcgacctcatgccaaagaccatcatgcacctcatgatcaacaatacgaaggccttcatccaccacgagctgctggcctacctatactcctcggcagaccagagcagcctcatggaggagtcggctgaccaggcacagcggcgggacgacatgctgcgcatgtaccatgccctcaaggaggcgctcaacatcatcggtgacatcagcaccagcactgtgtccacgcctgtacccccgcctgtcgatgacacctggctccagagcgccagcagccacagccccactccacagcgccgaccggtgtccagcatacacccccctggccggcccccagcagtgaggggccccactccagggccccccctgattcctgttcccgtgggggcagcagcctccttctcggcgcccccaatcccatcccggcctggaccccagagcgtgtttgccaacagtgacctcttcccagccccgcctcagatcccatctcggccagttcggatccccccagggattcccccaggagtgcccagcagaagaccccctgctgcgcccagccggcccaccattatccgcccagccgagccatccctgctcgactaggcctcgaggggggcgtgctctcgggggggcctcacgcacccgcggcgcaggagcttcagtggtctggggccctccgccgcccctatgctgggaccaggctcccagtgggcagccctggcctcttccttaacgctggccccggtccagggccggcccctgtgcctggctggacaccgcactgcgcaaaggggccctggagctccaggcagggggcgctggggtgttgcactttgggggatggagtctcagggtggcagaggggggaccagaacccttgacaccatcctgaatgaggggtccagcctgggggggactctaccaaggtcttcttgggctgggaaagcccatgtagggcaggccttctataagtgcgggcaccaagggcgcctacatccccaggccttgctggggtgcaggggtatatcaacttcccattagcaggagctccccagcggcaagcctggcccagtgggctcggtagtgcccagctggcaggcctgaggtgtacatagtccttcccggccatattaaccacacagcctgagcctggcccagcctcggctgccagaggtgcctttgctaggcccggagccgttggcccgggccggccttgccctattcctctcctcctcctcctcctgggtcccccagggtggctgggcttgggctatgtgggtggtggtggcggggggtcttgggggcctctcagctcccgcccatgcctccctgatgggtgggcccagggcggcctctctctgaggagacctcacccactcctcgctcagtttgaccactgtaagtgcctgcactctgtattctattaataaactaaaataaagggaagacgctgctggtg

SEQ ID NO: 8970 - DNA, 3436 bp, Homo sapiens
  source 1..3436: mol_type = unassigned DNA
cacgtcactgtggcagcagcggatagctggaaaccacctgccagtgcccagcatgtagggcgtgcccctagagcgggagctgccacctgcttcctggggcccaggccccccagccaccttggagggagggacttccttccccgcggttcaggaatcgtcacccggcggcctctcattctgcagctcatcttctcaaaaacagaacatgccgagtttttgcactgcaagtccaaaaagtttacagactttgatgaagtccggcaggagattgaagcagagaccgacagggtcacggggaccaacaaaggcatctccccagtgcccatcaaccttcgagtctactcgccacacgtgttgaacttgaccctcatcgacctcccgggtatcaccaaggtgcctgtgggcgaccagcctccagacatcgagtaccagatcaaggacatgatcctgcagttcatcagccgggagagcagcctcattctggctgtcacgcccgccaacatggacctggccaactccgacgccctcaagctggccaaggaagtcgatccccaaggcctacggaccatcggtgtcatcaccaagcttgacctgatggacgagggcaccgacgccagggacgtcttggagaacaagttgctcccgttgagaagaggctacattggcgtggtgaaccgcagccagaaggatattgagggcaagaaggacatccgtgcagcactggcagctgagaggaagttcttcctctcccacccggcctaccggcacatggccgaccgcatgggcacgccacatctgcagaagacgctgaatcagcaactgaccaaccacatccgggagtcgctgccggccctacgtagcaaactacagagccagctgctgtccctggagaaggaggtggaggagtacaagaactttcggcccgacgaccccacccgcaaaaccaaagccctgctgcagatggtccagcagtttggggtggattttgagaagaggatcgagggctcaggagatcaggtggacactctggagctctccgggggcgcccgaatcaatcgcatcttccacgagcggttcccatttgagctggtgaagatggagtttgacgagaaggacttacgacgggagatcagctatgccattaagaacatccatggagtcaggacggggctcttcacccccgacatggcctttgaagccattgtgaaaaaacagattgtaaaactcaaagagccgagtttgaagtgtgttgatctcgtggtctcagagctggccacggtcataaaaaagtgtgccgagaagctcagttcctacccccggttgcgagaggagacagagcgaatcgtcaccacttacatccgggaacgggaggggagaacgaaggaccagattcttctgctgatcgacattgagcagtcctacatcaacacgaaccatgaggacttcatcgggtttgccaatgcccagcagaggagcacgcagctgaacaagaagagagccatccccaatcagggggagatcctggtgatccgcaggggctggctgaccatcaacaacatcagcctgatgaaaggcggctccaaggagtactggtttgtgctgactgccgagtcactgtcctggtacaaggatgaggaggagaaagagaagaagtacatgctgcctctggacaacctcaagatccgtgatgtggagaagggcttcatgtccaacaagcacgtcttcgccatcttcaacacggagcagagaaacgtctacaaggacctgcggcagatcgagctggcctgtgactcccaggaagacgtggacagctggaaggcctcgttcctccgagctggcgtctaccccgagaaggaccaggcagaaaacgaggatggggcccaggagaacaccttctccatggacccccaactggagcggcaggtggagaccattcgcaacctggtggactcatacgtggccatcatcaacaagtccatccgcgacctcatgccaaagaccatcatgcacctcatgatcaacaatacgaaggccttcatccaccacgagctgctggcctacctatactcctcggcagaccagagcagcctcatggaggagtcggctgaccaggcacagcggcgggacgacatgctgcgcatgtaccatgccctcaaggaggcgctcaacatcatcggtgacatcagcaccagcactgtgtccacgcctgtacccccgcctgtcgatgacacctggctccagagcgccagcagccacagccccactccacagcgccgaccggtgtccagcatacacccccctggccggcccccagcagtgaggggccccactccagggccccccctgattcctgttcccgtgggggcagcagcctccttctcggcgcccccaatcccatcccggcctggaccccagagcgtgtttgccaacagtgacctcttcccagccccgcctcagatcccatctcggccagttcggatccccccagggattcccccaggagtgcccagcagaagaccccctgctgcgcccagccggcccaccattatccgcccagccgagccatccctgctcgactaggcctcgaggggggcgtgctctcgggggggcctcacgcacccgcggcgcaggagcttcagtggtctggggccctccgccgcccctatgctgggaccaggctcccagtgggcagccctggcctcttccttaacgctggccccggtccagggccggcccctgtgcctggctggacaccgcactgcgcaaaggggccctggagctccaggcagggggcgctggggtgttgcactttgggggatggagtctcagggtggcagaggggggaccagaacccttgacaccatcctgaatgaggggtccagcctgggggggactctaccaaggtcttcttgggctgggaaagcccatgtagggcaggccttctataagtgcgggcaccaagggcgcctacatccccaggccttgctggggtgcaggggtatatcaacttcccattagcaggagctccccagcggcaagcctggcccagtgggctcggtagtgcccagctggcaggcctgaggtgtacatagtccttcccggccatattaaccacacagcctgagcctggcccagcctcggctgccagaggtgcctttgctaggcccggagccgttggcccgggccggccttgccctattcctctcctcctcctcctcctgggtcccccagggtggctgggcttgggctatgtgggtggtggtggcggggggtcttgggggcctctcagctcccgcccatgcctccctgatgggtgggcccagggcggcctctctctgaggagacctcacccactcctcgctcagtttgaccactgtaagtgcctgcactctgtattctattaataaactaaaataaagggaagacgctgctggtg

SEQ ID NO: 8971 - DNA, 3633 bp, Homo sapiens
  source 1..3633: mol_type = unassigned DNA
gagaaccggatgaggcggcgaccgtgaggccgagccgggagcgggcgtcttgccgaggcccgggcgggcggggagcaacggctacagacgccgcggggccaggtcgttgagggtcggcggcgggcgaggagcgcagggcgctcgggccgggggccgccggcgccatgggcaaccgcgggatggaagagctgatcccgctggtcaacaaactgcaggacgccttcagctccatcggccagagctgccacctggacctgccgcagatcgctgtagtgggcggccagagcgccggcaagagctcggtgctggagaacttcgtgggccgggacttccttccccgcggttcaggaatcgtcacccggcggcctctcattctgcagctcatcttctcaaaaacagaacatgccgagtttttgcactgcaagtccaaaaagtttacagactttgatgaagtccggcaggagattgaagcagagaccgacagggtcacggggaccaacaaaggcatctccccagtgcccatcaaccttcgagtctactcgccacacgtgttgaacttgaccctcatcgacctcccgggtatcaccaaggtgcctgtgggcgaccagcctccagacatcgagtaccagatcaaggacatgatcctgcagttcatcagccgggagagcagcctcattctggctgtcacgcccgccaacatggacctggccaactccgacgccctcaagctggccaaggaagtcgatccccaaggcctacggaccatcggtgtcatcaccaagcttgacctgatggacgagggcaccgacgccagggacgtcttggagaacaagttgctcccgttgagaagaggctacattggcgtggtgaaccgcagccagaaggatattgagggcaagaaggacatccgtgcagcactggcagctgagaggaagttcttcctctcccacccggcctaccggcacatggccgaccgcatgggcacgccacatctgcagaagacgctgaatcagcaactgaccaaccacatccgggagtcgctgccggccctacgtagcaaactacagagccagctgctgtccctggagaaggaggtggaggagtacaagaactttcggcccgacgaccccacccgcaaaaccaaagccctgctgcagatggtccagcagtttggggtggattttgagaagaggatcgagggctcaggagatcaggtggacactctggagctctccgggggcgcccgaatcaatcgcatcttccacgagcggttcccatttgagctggtgaagatggagtttgacgagaaggacttacgacgggagatcagctatgccattaagaacatccatggagtcaggacggggctcttcacccccgacatggcctttgaagccattgtgaaaaaacagattgtaaaactcaaagagccgagtttgaagtgtgttgatctcgtggtctcagagctggccacggtcataaaaaagtgtgccgagaagctcagttcctacccccggttgcgagaggagacagagcgaatcgtcaccacttacatccgggaacgggaggggagaacgaaggaccagattcttctgctgatcgacattgagcagtcctacatcaacacgaaccatgaggacttcatcgggtttgccaatgcccagcagaggagcacgcagctgaacaagaagagagccatccccaatcagggggagatcctggtgatccgcaggggctggctgaccatcaacaacatcagcctgatgaaaggcggctccaaggagtactggtttgtgctgactgccgagtcactgtcctggtacaaggatgaggaggagaaagagaagaagtacatgctgcctctggacaacctcaagatccgtgatgtggagaagggcttcatgtccaacaagcacgtcttcgccatcttcaacacggagcagagaaacgtctacaaggacctgcggcagatcgagctggcctgtgactcccaggaagacgtggacagctggaaggcctcgttcctccgagctggcgtctaccccgagaaggaccaggcagaaaacgaggatggggcccaggagaacaccttctccatggacccccaactggagcggcaggtggagaccattcgcaacctggtggactcatacgtggccatcatcaacaagtccatccgcgacctcatgccaaagaccatcatgcacctcatgatcaacaatacgaaggccttcatccaccacgagctgctggcctacctatactcctcggcagaccagagcagcctcatggaggagtcggctgaccaggcacagcggcgggacgacatgctgcgcatgtaccatgccctcaaggaggcgctcaacatcatcggtgacatcagcaccagcactgtgtccacgcctgtacccccgcctgtcgatgacacctggctccagagcgccagcagccacagccccactccacagcgccgaccggtgtccagcatacacccccctggccggcccccagcagtgaggggccccactccagggccccccctgattcctgttcccgtgggggcagcagcctccttctcggcgcccccaatcccatcccggcctggaccccagagcgtgtttgccaacagtgacctcttcccagccccgcctcagatcccatctcggccagttcggatccccccagggattcccccaggagtgcccagcagaagaccccctgctgcgcccagccggcccaccattatccgcccagccgagccatccctgctcgactaggcctcgaggggggcgtgctctcgggggggcctcacgcacccgcggcgcaggagcttcagtggtctggggccctccgccgcccctatgctgggaccaggctcccagtgggcagccctggcctcttccttaacgctggccccggtccagggccggcccctgtgcctggctggacaccgcactgcgcaaaggggccctggagctccaggcagggggcgctggggtgttgcactttgggggatggagtctcagggtggcagaggggggaccagaacccttgacaccatcctgaatgaggggtccagcctgggggggactctaccaaggtcttcttgggctgggaaagcccatgtagggcaggccttctataagtgcgggcaccaagggcgcctacatccccaggccttgctggggtgcaggggtatatcaacttcccattagcaggagctccccagcggcaagcctggcccagtgggctcggtagtgcccagctggcaggcctgaggtgtacatagtccttcccggccatattaaccacacagcctgagcctggcccagcctcggctgccagaggtgcctttgctaggcccggagccgttggcccgggccggccttgccctattcctctcctcctcctcctcctgggtcccccagggtggctgggcttgggctatgtgggtggtggtggcggggggtcttgggggcctctcagctcccgcccatgcctccctgatgggtgggcccagggcggcctctctctgaggagacctcacccactcctcgctcagtttgaccactgtaagtgcctgcactctgtattctattaataaactaaaataaagggaagacgctgctggtg

SEQ ID NO: 8972 - DNA, 3654 bp, Homo sapiens
  source 1..3654: mol_type = unassigned DNA
gaggtcgctcgggtcgggtgtcgcctgagaaccggatgaggcggcgaccgtgaggccgagccgggagcgggcgtcttgccgaggcccgggcgggcggggagcaacggctacagacgccgcggggccaggtcgttgagggtcggcggcgggcgaggagcgcagggcgctcgggccgggggccgccggcgccatgggcaaccgcgggatggaagagctgatcccgctggtcaacaaactgcaggacgccttcagctccatcggccagagctgccacctggacctgccgcagatcgctgtagtgggcggccagagcgccggcaagagctcggtgctggagaacttcgtgggccgggacttccttccccgcggttcaggaatcgtcacccggcggcctctcattctgcagctcatcttctcaaaaacagaacatgccgagtttttgcactgcaagtccaaaaagtttacagactttgatgaagtccggcaggagattgaagcagagaccgacagggtcacggggaccaacaaaggcatctccccagtgcccatcaaccttcgagtctactcgccacacgtgttgaacttgaccctcatcgacctcccgggtatcaccaaggtgcctgtgggcgaccagcctccagacatcgagtaccagatcaaggacatgatcctgcagttcatcagccgggagagcagcctcattctggctgtcacgcccgccaacatggacctggccaactccgacgccctcaagctggccaaggaagtcgatccccaaggcctacggaccatcggtgtcatcaccaagcttgacctgatggacgagggcaccgacgccagggacgtcttggagaacaagttgctcccgttgagaagaggctacattggcgtggtgaaccgcagccagaaggatattgagggcaagaaggacatccgtgcagcactggcagctgagaggaagttcttcctctcccacccggcctaccggcacatggccgaccgcatgggcacgccacatctgcagaagacgctgaatcagcaactgaccaaccacatccgggagtcgctgccggccctacgtagcaaactacagagccagctgctgtccctggagaaggaggtggaggagtacaagaactttcggcccgacgaccccacccgcaaaaccaaagccctgctgcagatggtccagcagtttggggtggattttgagaagaggatcgagggctcaggagatcaggtggacactctggagctctccgggggcgcccgaatcaatcgcatcttccacgagcggttcccatttgagctggtgaagatggagtttgacgagaaggacttacgacgggagatcagctatgccattaagaacatccatggagtcaggacggggctcttcacccccgacatggcctttgaagccattgtgaaaaaacagattgtaaaactcaaagagccgagtttgaagtgtgttgatctcgtggtctcagagctggccacggtcataaaaaagtgtgccgagaagctcagttcctacccccggttgcgagaggagacagagcgaatcgtcaccacttacatccgggaacgggaggggagaacgaaggaccagattcttctgctgatcgacattgagcagtcctacatcaacacgaaccatgaggacttcatcgggtttgccaatgcccagcagaggagcacgcagctgaacaagaagagagccatccccaatcaggtgatccgcaggggctggctgaccatcaacaacatcagcctgatgaaaggcggctccaaggagtactggtttgtgctgactgccgagtcactgtcctggtacaaggatgaggaggagaaagagaagaagtacatgctgcctctggacaacctcaagatccgtgatgtggagaagggcttcatgtccaacaagcacgtcttcgccatcttcaacacggagcagagaaacgtctacaaggacctgcggcagatcgagctggcctgtgactcccaggaagacgtggacagctggaaggcctcgttcctccgagctggcgtctaccccgagaaggaccaggcagaaaacgaggatggggcccaggagaacaccttctccatggacccccaactggagcggcaggtggagaccattcgcaacctggtggactcatacgtggccatcatcaacaagtccatccgcgacctcatgccaaagaccatcatgcacctcatgatcaacaatacgaaggccttcatccaccacgagctgctggcctacctatactcctcggcagaccagagcagcctcatggaggagtcggctgaccaggcacagcggcgggacgacatgctgcgcatgtaccatgccctcaaggaggcgctcaacatcatcggtgacatcagcaccagcactgtgtccacgcctgtacccccgcctgtcgatgacacctggctccagagcgccagcagccacagccccactccacagcgccgaccggtgtccagcatacacccccctggccggcccccagcagtgaggggccccactccagggccccccctgattcctgttcccgtgggggcagcagcctccttctcggcgcccccaatcccatcccggcctggaccccagagcgtgtttgccaacagtgacctcttcccagccccgcctcagatcccatctcggccagttcggatccccccagggattcccccaggagtgcccagcagaagaccccctgctgcgcccagccggcccaccattatccgcccagccgagccatccctgctcgactaggcctcgaggggggcgtgctctcgggggggcctcacgcacccgcggcgcaggagcttcagtggtctggggccctccgccgcccctatgctgggaccaggctcccagtgggcagccctggcctcttccttaacgctggccccggtccagggccggcccctgtgcctggctggacaccgcactgcgcaaaggggccctggagctccaggcagggggcgctggggtgttgcactttgggggatggagtctcagggtggcagaggggggaccagaacccttgacaccatcctgaatgaggggtccagcctgggggggactctaccaaggtcttcttgggctgggaaagcccatgtagggcaggccttctataagtgcgggcaccaagggcgcctacatccccaggccttgctggggtgcaggggtatatcaacttcccattagcaggagctccccagcggcaagcctggcccagtgggctcggtagtgcccagctggcaggcctgaggtgtacatagtccttcccggccatattaaccacacagcctgagcctggcccagcctcggctgccagaggtgcctttgctaggcccggagccgttggcccgggccggccttgccctattcctctcctcctcctcctcctgggtcccccagggtggctgggcttgggctatgtgggtggtggtggcggggggtcttgggggcctctcagctcccgcccatgcctccctgatgggtgggcccagggcggcctctctctgaggagacctcacccactcctcgctcagtttgaccactgtaagtgcctgcactctgtattctattaataaactaaaataaagggaagacgctgctggtggctgctg

SEQ ID NO: 8973 - DNA, 5650 bp, Homo sapiens
  source 1..5650: mol_type = unassigned DNA
tgcctgctcttccctgatttacccacaaccctaactttgcatattcaaagggggagatcctggtaagtacatgcttagtgtggtagcaaacattagagaatctagtggtgatggagaccccgcccacccctaatattccctgttccccatcccctccaaataacaaaaatactaaaaatcgagctaacctggaaaccccatgccgcagccggcgctggactgcacgttgccctgggtataagtcgactcacacaggcactaactggaccgccacccttgaaggcgcacttctgcagccagttcctggcaggttttcctggtttcctgtaggtcagggatggcaaatacttacacaccgcccctgcctcccctcacatccctggctgtggaagatctcgcttaagccagaccagaattcattcttggcactgcccctcctccttctatctcctatgcagatgtcactcatggatcagagcatatttttccacatggcagaaatcttgccctcttgtgcccatggcagacatggctagttgatctagcactctttgccttgtgccgctcctctagcacacgcccatggcagacattgctaagcaatcctagcattctttccaaataagcttgccagcactcctgttctatagcagatgtggctaagtgattaaggtattgtttttctccctatatgataccctcttctctatgcatggcaggcatgactagtcaatcaggagcctctttcctagatgctgcctcttgtcctccagataaattgatgaggctcttctgttccacttaccctttctcctatccttggcctgtgacaggcaacactaattgatcctagcaccgtttcctgccacgcccagaattctcaccacagtgcttcaggtatcttgtaccagtcgattgacatggctcccgagatgaatcatatttgctgtccatccctgctgtgggtaacacctccttcctttgtgcagaaccctcagctggggcccagtgtggggcgtgagatgggcgtgaggcccagtccagcccagcccagcgggaagcagcctgctactcatagctgagaactgaacccagctcaaggagctcacctctaggcagccggcctcagcccggctcttacacttggacagcacagcctgggcctccagtcctagcaggggctcccttttgctggacattctcccactgccagccaccaaggcgctggtcatccctgccactgccctctggcggggctcttctggcaatcccagggtctttcttgtagctgagccgatcctatgccagggcctcgctgctcccagggcctgggtgtgcagatagggccatgggtggggcagtgacgggaggaattagttggcctcgggcttgtggttttcaggttcctcatgtgttccccccagtccctttgaatttgccaggccaagaccaggaacctgcttctcccttgtaccccaagaggtttaggggttcctcttttcctaccagaggccacatagcccagccccgtcatgagcgtggccgtggcctctgggtctcccatctgtggttcccatctctacccgggagactcaggccaggaccctcacccaggaaagagactggagcagcctgccagaggatccctgctttgccgccccctgcctgccctgccacccataccgccccatgtgcctgcctgcctgtcactgtgcaccctagcccgcaacggcctgccgcctcttctgtctctcccacccctacttccttctaagcccagtcccattgggatgtgtcccttggatgcaaacctgactttctgctgaggcctggctgctccctttctctggctcacaagtggtggatggctaacgggcctttgtttgccacccacagcttgcagctccctagggtgggattttgtctctgaacccgtgtggagaagggcacctcagggcttctgccagacgtcctgccccaaggcttggtgtgccatccccagcatggccccgatcagtgccctggccctgtggccatgcaccccaaagtgtagcgtgggccctgtgctccagctctgaccaacactaaccccggctggaggcaggagagccaggccaccgaggggtgtgcgggcacatccctctccttagaaaccgggccaggcctaggagtatggaggcctcacatttctctgggggagcaccgacagcctgtctccctgttttccctcacctggttgtcattcagtcatggaaccagggtctactaagcactcgttctgtgcccagctctgggctgagacaaggcagtgcccccaccccgctccccccgggtgaatggaggcattcccagactgccagacctttggtgctaacaccaggacgtcctggacagaccaggaagagctcgtcactgcgttcccagaggggatgctgtgacctcacaggggctgctggcctcagccccctcacccaccaccaggcagcccgtgaatggccagatgccaggggtcactgcctgctccaaacaactgtgagagtcctgtctgctcatcccagggagggataagtctgtacccttggccttaacaaggggcgcccggtggcatctcatgctgtccccagcctgggcagtgacttctgcatggtccaggggtccctgggtactctttagccacctccgtcttcatggccacctggggcttagcactcacatccagccaccaaggagccgctggagctgtgggctggtggccctggttcagaatgtcaggcccggggtgggtcggggtagtccggatgaagcccctccagaggaccgcccccgactaggacagcatctgggccccagagggattcctggaggccccatctctggcgctcctgccgtgccgtgccctgccatgccctgcactgggggatgcaggccagcccttcgcagctgtccatggccatgctcagcccaccctttgtagcttggccaagtctgtcagtgcctgggtcccaggccgccctgtgcgtgcctccgtgtgcttcctgcagctcccagggccctcgtcctgagtggggtggggggctctgcccacacatgcctccagcggccagggagcatgggagcacagcccccaggctgcctgccgttagttgtcaggtgagtccctgcgcaggcctgggttctgacccccacgcagatgacagctacagccacacaatccccatccatggggtctcccagcctgaaaccctgatgtgtcagtcaaaaggatgaccaccaggcttgcagccagcttgggacatgagccgcgctccttcaatgtccttggggagggcccctgggctcacacctttgaccctagccctctgtgtggatgctacccttggaaccttatctcacgcaaacaagtgcagttcctcagatgtcacatttcatgtgccacagccccacacacaagccccagggactcctcccatgggcccctttccatcaggcctctgtgagtctataccccatcagcccctggcccagtgagtctgtctgtccgcccacctgcccaggtggcgcctcatgttggtttcctgctggaaatgcttgggacagggtggaactgggtttcctgggctttggggctggaggtgtctctattgcggtccctggcttcccactgagctgtgggcaaggctgctgcgctgggggatggctggggcacggagcgaggttccctgctaagctgcgcgctttcccccaggtgatccgcaggggctggctgaccatcaacaacatcagcctgatgaaaggcggctccaaggagtactggtttgtgctgactgccgagtcactgtcctggtacaaggatgaggaggagaaagagaagaagtacatgctgcctctggacaacctcaagatccgtgatgtggagaagggcttcatgtccaacaagcacgtcttcgccatcttcaacacggagcagagaaacgtctacaaggacctgcggcagatcgagctggcctgtgactcccaggaagacgtggacagctggaaggcctcgttcctccgagctggcgtctaccccgagaaggaccaggcagaaaacgaggatggggcccaggagaacaccttctccatggacccccaactggagcggcaggtggagaccattcgcaacctggtggactcatacgtggccatcatcaacaagtccatccgcgacctcatgccaaagaccatcatgcacctcatgatcaacaatacgaaggccttcatccaccacgagctgctggcctacctatactcctcggcagaccagagcagcctcatggaggagtcggctgaccaggcacagcggcgggacgacatgctgcgcatgtaccatgccctcaaggaggcgctcaacatcatcggtgacatcagcaccagcactgtgtccacgcctgtacccccgcctgtcgatgacacctggctccagagcgccagcagccacagccccactccacagcgccgaccggtgtccagcatacacccccctggccggcccccagcagtgaggggccccactccagggcccccctgattcctgttcccgtgggggcagcagcctccttctcggcgcccccaatcccatcccggcctggaccccagagcgtgtttgccaacagtgacctcttcccagccccgcctcagatcccatctcggccagttcggatccccccagggattcccccaggagtgcccagcagaagaccccctgctgcgcccagccggcccaccattatccgcccagccgagccatccctgctcgactaggcctcgaggggggcgtgctctcgggggggcctcacgcacccgcggcgcaggagcttcagtggtctggggccctccgccgcccctatgctgggaccaggctcccagtgggcagccctggcctcttccttaacgctggccccggtccagggccggcccctgtgcctggctggacaccgcactgcgcaaaggggccctggagctccaggcagggggcgctggggtgttgcactttgggggatggagtctcagggtggcagaggggggaccagaacccttgacaccatcctgaatgaggggtccagcctgggggggactctaccaaggtcttcttgggctgggaaagcccatgtagggcaggccttctataagtgcgggcaccaagggcgcctacatccccaggccttgctggggtgcaggggtatatcaacttcccattagcaggagctccccagcggcaagcctggcccagtgggctcggtagtgcccagctggcaggcctgaggtgtacatagtccttcccggccatattaaccacacagcctgagcctggcccagcctcggctgccagaggtgcctttgctaggcccggagccgttggcccgggccggccttgccctattcctctcctcctcctcctcctgggtcccccagggtggctgggcttgggctatgtgggtggtggtggcggggggtcttgggggcctctcagctcccgcccatgcctccctgatgggtgggcccagggcggcctctctctgaggagacctcacccactcctcgctcagtttgaccactgtaagtgcctgcactctgtattctattaataaactaaaataaagggaagacgctg

SEQ ID NO: 8974 - DNA, 14955 bp, Homo sapiens
  source 1..14955: mol_type = unassigned DNA
cttctacatcgcgaatatccctcgccggcctggcgcccggcgccatctgctggacccgttccggctggggcgcacagacctgggcgcggggtcgggcgattgggttctccctgccttttcaatgtcctgcggggcggtggctcactgtctctcgccccagcccttccagctgggtcctgacaccaggccccccgcacccttcggctcgccagatgtggctactttcctttagtcccggagccttcaagccctgggtccctgaggggtagacctgggcggggtggggccgcgaagcagggatccagggcgcctgcgcggaggaggcgggctccgaggggccgcacaccggccactcgcccctccctgcccggggttgccatggggacgcgtgcagacgccggcccgagagggctgcgaggggcaacttcttagagtggcccatcggtcggtctagggaggggagggtcagcgtggcaaggtgtgtgtcgggggcagagggaaggagggaaggagtgctggggagaaggggcagtagtgtcggggtaggaagggacagttgttggggagaagaggcagttgtggagggagagggagcaaggaatatttgtgtgggggagggggaggagaaggggcagttgtgacagctgggggggaagagccattctgaggggaaatttgcctgctggtaaccagtttaaggataccagctgctggtataaatactgctggataaatactgctggatttatactgcaggataaatactgctggcccctgcggtatttcctagtactagagtgagccccgacttagcagagcagttcctcctggggcctgcggtgtgggatcgcgtggtgaaccccacggtgcatgcgcctcaggctctagtttgaggcaggaaagcgcagcttgatgcttctctggagactgatggaggaagcctccttgctgtagttggttttattgatttgctggcctaacagaacgtttttccttggagcaaagtacaaatccttcaagtttgaaattcataacctgagatcaatgcctgtggcagcctgtggggatgaggaaggagagccacaggtgccgttaggctgcagcctaatgaaaagagagtgcccagcgcctcagactttgcgcctgggattctgagcacctgtccgagatccccgcttcctgccatcctacctttctgagagaggcaccactgtgaccttcctcgtgccccaattgctttttcctcatgacacaatttgaaatttatgattggatgacttttgtccttctttcttccaatctgttctcagggcattttgagtcaaataaatgatcctgactgatcttaaccattagcacagagttcctcagccaactctgctaagagacctcagtacacacaaaacagtgttcctgcccctcaggacttcaaagcgatagacccaggttttgcctgcacgatgtccagcaaagctgagaagaagcagcgattgagtggccgaggaagctcccaggcaagctggtcagggcgggccactcgggctgctgtggccacacaggagcaggggaatgccccggctgtcagtgagccagagctgcaggctgagctccccaaggaggagcctgagccacggttggagggacctcaagcacagagtgaagaatcagtggagcccgaggcagatgtgaagcccctcttcctttcccgagctgcgctgacaggactggcggatgcagtgtggacacaggagcatgatgccattctggaacactttgcccaggaccctacagaatccatcctcaccatcttcattgacccttgttttgggctgaagctagagctgggcatgcctgtacagacccagaaccagcttgtctacttcattcgccaagcaccagttcccatcacctgggagaacttcgaggcaactgtgcagtttgggacggtgcggggcccctatatcccggccctgcttcggctgctcggtggagtctttgcccctcagatctttgcaaacacaggctggcctgagagcattagaaatcattttgcttctcatctgcacaagttcttggcctgcctgacagacactcggtacaaactggaggggcacacggtcctctacatccctgcagaggccatgaacatgaagcctgagatggtgataaaggacaaagagctggtgcaacggctagagacctccatgatccactggacccggcagataaaggagatgctcagtgcccaggagactgtggagacaggagaaaatttaggtcctctggaggagattgagttctggcgcaaccgatgcatggacctgtctggcatcagtaagcagctggtgaagaagggagtgaagcacgttgaatccatcctgcaccttgccaagtcgtcctacttggcgccctttatgaaactggcacagcagatccaggatggctctcgtcaagcacagtcaaacctgacctttttgtcaatcctgaaggaaccttaccaggagttggctttcatgaagcccaaggacatctctagcaagctccctaagctgatcagtctcatccgcatcatctgggtcaactctccccactacaacactcgggagagactgacctcgctcttccgaaaggtatgtgactgtcagtatcacttcgcccgctgggaagatggcaagcagggtccccttccttgcttctttggtgcccaggggccacagataacacggaacttgctggagattgaggacatctttcataaaaatctgcacacgctgcgagccgttcgcgggggtatcctggatgtcaagaacacctgttggcatgaagactacaataagttccgtgccggaatcaaggacctggaggtgatgacccagaacctgatcacctcagccttcgagttggtgcgggacgtgccgcacggcgtgcttctgctggacaccttccacaggcttgcctcccgcgaggctatcaagcggacttatgacaagaaggcggtggatctctacatgctgttcaatagcgagctggccctggtgaaccgtgaacggaacaagaaatggccagacctggagccctacgtggcccagtattccggaaaggcgcgctgggtgcacatcctccggcgtcgcatcgacagagtcatgacctgccttgctggtgctcatttcctgccccgtattgggactggaaaggagagtgtgcacacctatcagcagatggtccaggccattgatgagctggttcgaaaaaccttccaagagtggacatcaagtctggacaaggattgcattcggcggttggataccccattgctgcgaatcagccaggagaaggcgggcatgctggatgtcaactttgacaagtcccttctgattctctttgcggaaattgactactgggagcggctgctgtttgagacgccccattacgtggtgaacgtagctgagcgagccgaggacctgcgcattctgcgtgaaaatctgctactcgttgctagagactacaataggattattgccatgctgtccccagatgagcaggccctattcaaagagcgtattcggctcctggataagaagatccacccgggactcaagaaactgcactgggccttgaagggggccagtgccttcttcatcacggagtgccgtatacatgccagcaaggtgcagatgattgtgaatgagttcaaggcatccactctgaccattggctggcgagcccaagagatgtcagagaagctgctggtacgcattagtggcaaacgggtatacagggacctggaatttgaagaggaccaaagagagcatcgggcagctgtacagcagaaattgatgaacctgcaccaggatgtggtgaccatcatgaccaactcctatgaggtcttcaagaatgatggtcctgagattcagcagcagtggatgctgtacatgattcggctggaccgcatgatggaggatgccctgcgcctgaatgtgaagtggtcactgctagaactatccaaggctatcaacggggatggaaagaccagcccaaacccactcttccaagtccttgtcattttgaagaatgatctgcaaggaagtgtggcacaggtggaattctcacccactctgcagactttggcaggtgtggtcaatgacattggcaaccacctcttttccaccatctctgtcttctgccacctccctgacattctcaccaagcgcaagttacatcgtgaacccatccaaacagttgtggagcaagatgaggacatcaagaagatccagacccaaatcagcagcggcatgactaacaacgcaagcctgctgcagaactacctcaagacctgggacatgtaccgggagatctgggagatcaacaaggactccttcattcatcgctaccagcgcctcaaccctcctgtctcttcttttgttgccgacattgcccgctacacggaagttgctaataacgtgcagaaggaggagacagtcaccaacatccagtttgtgctgctggactgttcgcacctcaagttctccctggtgcagcactgcaatgaatggcagaacaagttcgcgactctgctcagggagatggctgctgggcgcctcctggagctgcacacctacctgaaggagaacgcagagaaaatcagccgccctccgcagacactggaggaactgggggtcagcttgcagctcgtggatgccctgaagcacgacttggccaacgtggagactcagatccctcccatacacgagcaatttgccattcttgaaaagtacgaggtgccagtcgaggacagtgtcctggagatgctggacagtctcaacggggagtgggttgtcttccaacaaactctgctggacagtaagcaaatgctgaagaaacacaaggagaaattcaagacaggcctgatccactcggcagatgacttcaagaagaaagcacatacacttctggaagatttcgaattcaaaggccatttcaccagcaacgtgggatacatgtctgccttagaccagattacacaagtgcgggccatgctgatggccatgcgggaagaggaaaatagtctccgagccaacctgggcatcttcaagatcgagcagccaccctccaaggaccttcagaacctggagaaggagctcgatgccctccagcaaatctgggagatcgcacgagactgggaggagaactggaatgagtggaagactggccggttcctgatcctgcagacggaaaccatggagaccacggcccacgggctgtttcgtcgcctcacaaaattagccaaagagtataaggaccgaaactgggaaattattgaaaccactcgctcaaaaatagagcagttcaagaggaccatgcctctcatctcagacctgcggaaccctgcccttagagagaggcactgggaccaggtccgggatgagatccagcgggagtttgatcaggaatctgaaagcttcaccttggagcagattgtggagcttgggatggatcagcatgtggagaaaattggggagatctctgcttcagcaactaaagagctggctatagaagtggctttacaaaacattgccaagacctgggatgtgactcagctcgacatagtaccctacaaggataagggccatcatcggctcagaggtacagaagaagtattccaggcactggaagataaccaggtagctctgtctaccatgaaggcatcacgctttgtcaaggcctttgagaaggatgtggaccactgggaacgctgcctctccctcattttggaggttattgagatgattctcacagtgcagcgtcagtggatgtacttagagaatatcttcctaggagaagacatccgcaagcagctgcccaatgaatcgaccttatttgaccaggtcaacagcaactggaaagccatcatggacaggatgaacaaggacaacaatgctctccggagcacccatcacccaggcctcctggacacattgatagaaatgaatacaatcctggaagatattcagaaatctctggatatgtatttagagaccaagcgacatattttcccccgcttctacttcttgtccaatgatgacctgctggagattctgggccagtcccgaaacccagaggctgtgcagccacacctcaaaaaatgctttgacaacatcaagttgctgagaatccagaaggttggagggcccagcagcaaatgggaagctgtggggatgttctcgggcgacggcgagtacattgacttcctccactcagtatttttagaaggccctgtggagtcctggcttggcgatgtggaacagaccatgagggtgaccctgcgggaccttctccggaactgccacctggccctcaggaagttcctcaacaagagggacaaatgggtgaaggagtgggctggccaggtggtgatcactgccagtcagatccagtggacggctgatgtcaccaagtgcctgctgacagcgaaggagcgggcagacaagaaaatcctcaaggtcatgaagaagaaccaggtgtcaatcctgaataagtattcagaagccatcagggggaacttgaccaagatcatgcggcttaaaattgtggctctggtgacgatagaaattcatgcccgggatgtgttggagaagctttacaagagtggcctcatggatgtcaattcctttgactggctcagccaacttcggttctactgggagaaggatcttgatgactgtgtcatccgccagaccaacacgcaatttcagtataattatgagtacttgggtaactcgggccggctcgtcatcacccccctgacggacaggtgttacatgacactgaccacggcattgcacctgcaccgagggggctcccccaaaggccctgcaggcacaggcaagaccgagaccgtcaaggacctgggcaaggccctgggcatatatgtcattgtggtcaactgctctgagggcctggactacaagtccatgggccgaatgtactcaggtctggcccagactggagcttggggctgctttgatgagtttaaccgcatcaacatcgaggtgctgtcagtggtggcccaccagatcctgtgcatcctgtctgccctggctgccggcctcacccatttccattttgatggctttgaaataaatctggtgtggtcctgtgggatcttcattaccatgaatcctggctatgctggccgcacagagcttcccgaaaatcttaaatccatgttccgcccaattgccatggtggtgcctgactccaccctcattgcagaaatcattctctttggagagggctttggcaactgcaagattctggccaagaaggtgtacacactctactcactggctgtgcagcagctgtccagacaggaccactatgactttggcctgcgtgccctcacctcccttctgcgctatgctggcaagaagcgccgcctacagccggatctgactgatgaagaggttctgctgctctcaatgagagatatgaacatcgccaagctcacttcagttgatgcacccctgttcaatgccatcgtgcaagatctgtttcccaacattgagctgcctgtcattgactatggcaagctgcgggagaccgttgagcaggagattcgagacatgggcctgcaaagcacgccgttcaccctcaccaaggttttccagttgtatgaaaccaagaactcccgccactccaccatgatcgtgggctgcacgggcagcggcaagactgcctcatggcgcattctacaggcctccctgtcctctctgtgccgcgccggagaccctaacttcaacattgttagagagttccctttgaaccccaaggcattgtccctaggggaactgtatggggaatatgacctcagcaccaatgaatggacagatggcatcttgtccagtgtcatgcggacggcatgtgcagatgagaaacccgacgagaagtggatcctgttcgatggccccgtggacacactgtggatcgagaacatgaactccgtcatggacgataacaaggtgttgaccctcatcaacggcgagcgcatcgcgatgcccgagcaggtgtctctcctgtttgaagtggaggacctggcaatggcctctccggccactgtatcccgctgcgggatggtctacactgactacgctgacctgggctggaagccctatgttcagtcatggctggagaagaggccaaaggctgaggtggagccccttcaacgcatgttcgaaaagctcatcaacaagatgctggcctttaagaaggacaactgcaaggagctggtgcccctgcccgagtacagcggtatcacctccctctgcaagctgtactctgccctggccacgccagagaatggggtgaacccagctgacggcgagaactatgtcaccatggtagagatgacatttgtgttcagcatgatctggtctgtgtgtgcctctgtggatgaggagggccggaagaggatcgacagctacctccgagagatcgagggctcctttcccaataaggacacggtatatgagtattttgtggaccccaaaatacggagttggacatcatttgaggacaagctccctaagagttggcgctaccctccaaacgcccccttctataagatcatggtgcccaccgtcgacactgttcgctacaactacctggtgagcagcttggtggccaaccagaatcccattctgctggtgggtcccgtggggactgggaagacctccatcgcccagagcgttctgcagtccctgccctccagccagtggtcggtgctcgttgtcaacatgtccgcacagaccacatccaataacgtgcagagcatcattgagagcagggttgagaagcgaaccaagggtgtctacgtgccattcgggggcaaaagcatgatcacctttatggatgacctaaatatgcccgctaaggacatgtttgggtcccagccacccctggagctgatccgcctctggattgactatggcttctggtatgaccgtacgaagcagaccatcaagtacattcgagaaatgttcctgatggctgccatgggcccccctgggggtggacggactgtcatctccccaaggctacggagtcgcttcaacattatcaacatgaccttccccacaaagtcccagatcatccgcatattcggcaccatgatcaatcagaagcttcaggactttgaggaagaggtgaagcccattgggaacgtggtgacagaggccaccctggacatgtacaacaccgtggtacagcgcttcctgcccacgcccaccaagatgcattacctcttcaaccttcgagacatctccaaggtgttccagggcatgcttagagccaacaaggacttccatgataccaagtccagcatcacacggctctggatccatgaatgtttcagagtcttctctgaccggctggttgatgcggcagacacagaagccttcatgggcatcataagcgacaagctcggctccttctttgacctcacatttcatcatctctgtcccagcaagcgtcctcctatctttggggatttcctgaaggagcccaaggtgtatgaagacctcacggatctgacagtgctgaagacagtcatggagacagctctaaatgagtataacctgtcaccctctgtcgtgcccatgcagctagtgctcttccgagaggctattgaacacatcacacggatcgtgcgggtcattggacagcctcggggcaacatgctcctggtgggtatcgggggcagcggacgccagagtctggcccgcctggcttcatccatctgcgactacaccaccttccagatcgaggtcaccaaacattatcggaagcaggagttccgagatgatatcaagcgtctgtatcgccaggctggggtggagctcaagaccacgtccttcatttttgtggacacccaaatagctgatgagtccttcctagaggacatcaacaacatcctcagctcaggcgaggtgcccaatctctacaagcctgatgaatttgaagagatccagtcgcatatcatagaccaggcccgggtggagcaggtgcctgagtcatcggacagcctcttcgcctacctcattgaacgcgtgcagaacaacctgcacatcgtgctctgcctcagccccatgggggatcccttcaggaactggatccgccagtacccagccttggtgaactgcacaaccatcaactggttctcagagtggccccaagaggccctgctcgaggtggctgagaagtgcctcataggagtagacctgggaactcaggagaatatccacaggaaggtggcccagatctttgtcactatgcactggtcagtagctcagtattcccagaagatgctgttggaactgcggagacacaactatgtcacacccaccaaatacctggaactcctgtctggatataagaagttgctgggagaaaaacggcaggagctgctggcccaagccaataaactgcggacaggcttgttcaagatcgacgaaactagggaaaaggtgcaagtgatgtcgttggagctggaggatgccaagaagaaggtggctgagttccagaagcagtgtgaggagtacctggtcatcattgtgcagcagaagcgggaggcagatgagcagcagaaggccgtaacagccaacagtgaaaagattgcagttgaggaaatcaagtgtcaggcactggctgacaatgcccagaaagatctagaagaggcactgcccgccctggaagaggccatgcgggccctggagtctctgaacaagaaggatataggagagatcaagtcttatggacggcccccagcccaagtggagatagtgatgcaggcagttatgattcttcgaggcaacgagcccacatgggcagaggccaagaggcagctaggggaacagaacttcatcaagtcactgatcaactttgataaagacaatatctcagataaggttctgaagaagattggggcctactgcgcccagcctgacttccagcctgatatcatcggccgcgtctccctggctgccaagtccctctgcatgtgggtgcgggccatggagctgtatgggcggctatatcgggtggtggagcccaagcgaatccgaatgaacgctgccttggctcagcttcgggagaagcaagccgcgctcgctgaggcccaggagaagctgcgggaggtagctgagaaactggagatgctaaagaaacagtatgatgagaagctggcacagaaggaggagcttcgcaagaagtctgaagagatggagctgaagctggagcgagctgggatgctcgtgtcggggttggctggcgagaaggccagatgggaggagacagtccagggcctggaggaggacctgggctacctggtgggggactgtctcctggcagctgccttcctgtcctacatgggacccttcctgaccaactaccgggatgagattgtcaaccaaatctggatcgggaagatctgggagcttcaggttccttgctccccttctttcgccatcgataacttcctgtgcaatcctaccaaagtccgggactggaacatccaagggttgccctcagacgccttctccactgagaatggcatcatcgtcacccgaggcaacaggtgggcactgatgatcgaccctcaggcccaggccctgaaatggattaagaacatggaaggaggccagggcctgaagatcatcgacctgcagatgagcgattacctgcgaatcctagaacacgccattcactttggatacccggtgctacttcagaacgtgcaggaatatctggaccccacactgaaccccatgctcaacaaatctgtagcccgaatcggtggtcggctgttgatgcgcattggcgataaggaggtggaatataataccaatttccgtttctacatcaccaccaagctctccaacccccactacagcccagagacctcagccaagaccaccatcgtcaactttgctgttaaagaacagggcctggaggcccagctgctgggcattgtggtgcggaaggagcggcctgagctggaggagcagaaggactcactggtcatcaacatcgcggctggtaaaaggaagctcaaggagctggaggatgagatcctgcggctgctgaatgaggccaccggctccctgctggatgatgtgcagctggtgaacacgctgcatacctccaagatcacagccacagaggtgactgagcagctggagaccagtgagaccacagagatcaacactgacttggcgcgggaggcttaccgcccatgcgcccagcgggcatcaatcctgttcttcgtgctcaatgatatgggctgcatcgaccccatgtaccagttctcactggatgcctacatcagcctctttattctcagcattgacaaaagccaccgcagcaataagctggaggaccgcattgactacctgaatgactaccacacctacgctgtctacaggtacacctgccgtacccttttcgaacgccacaaactactattcagttttcatatgtgtgccaaaatcttggagacttctggcaagctcaacatggatgaatacaacttctttctacgtgggggtgtggtcttggatcgggagggccaaatggacaatccatgtagtagctggcttgcagatgcctactgggataacatcacagagctagacaaactgaccaacttccacggactcatgaactcctttgagcagtaccctcgtgactggcacctgtggtataccaatgctgccccggagaaggcgatgctgccaggtgagtgggaaaatgcctgcaatgaaatgcaacggatgctgatcgttcgctccctgcgccaggaccgcgtggccttctgcgtgacctccttcatcatcaccaaccttggctcccgcttcatcgagccgcctgtgctgaatatgaagtcggtgctggaggattcaaccccacgatccccactcgtgttcatcctgtcccctggtgtggaccccaccagtgccctgctgcagctggcagagcacatgggcatggcccagcgcttccacgccctgtccctgggccagggccaggcccccatcgctgctcggctcctccgagagggtgtgactcagggacactgggtgttcctggcaaactgccacctgtcactgtcttggatgcctaatctggacaagctggtggagcagctgcaggtggaggatcctcatccatccttccgcctctggctcagctccatcccccacccagacttccctatctcaatcttgcaggtcagcatcaagatgaccacagagccaccaaagggcctaaaggccaacatgacacgtctttaccaactgatgtcagaaccacagttttcccgctgctccaaacctgccaaatataagaagctgctgttttcactctgtttcttccactctgtgttacttgaacgcaaaaagttcctgcagcttggctggaacatcatctatggcttcaatgactccgactttgaggtgtcagaaaacttgctgagcctctatctcgatgagtacgaggagacaccttgggacgcacttaagtacctcattgccggcatcaactatggtggacatgtcacagatgactgggaccggcgcctgctgaccacctacatcaatgattatttctgtgaccagtctctatcaactcccttccaccggttgtcagcactggagacttatttcatccccaaggatggcagcctcgcttcttacaaggaatacatcagcttattgcctggcatggacccccctgaggcctttggccagcaccccaatgctgatgtggcctctcagatcactgaggcacaaaccctctttgatactttgctttccttgcaacctcagattacacccaccagggctggaggccagacccgggaagagaaggtccttgagttggccgctgatgtgaagcagaagatccctgaaatgatcgactatgaggggactcaaaaactgctagctctcgacccctcccccctcaatgtggtccttctgcaggagatccagagatacaacacactgatgcagaccatcctgttctcactgacagacctagagaaaggcatccagggtctcatcgtcatgtctacaagcctggaagagattttcaattgcatctttgatgcccatgttcctccgctctggggaaaggcatacccctcacaaaagccattggctgcctggacccgggacttggccatgcgtgtggagcagtttgagctgtgggccagccgggcccggcctcctgtgatcttctggttgtctggtttcacctttcccactggcttcctcactgctgtgctgcagtcttcagctcgccaaaacaacgtttcagtggacagcctctcctgggagtttatcgtttccactgtggatgacagcaacctagtgtatccccccaaggatggtgtctgggtccggggcctgtacctggaaggtgctggctgggaccggaagaactcctgcttggtggaggcagagcccatgcagcttgtctgcctcatgcccacgatccacttccggcctgcagagagccgcaagaagagcgccaagggcatgtactcctgcccctgctattactatcccaaccgggcaggcagctcagaccgagcctcctttgtcatcggcattgacctgcggtctggggccatgacacctgatcattggatcaagaggggcactgctctactcatgagcctggacagctgagacctcctcctcttctccgcttgagagagagggtcagggactccaggagctaagacagatgttgcacctaggactgaggccggacctcactcagactttgaccttggccgaatttgtgtgatgtggccctggagatacctagttgtgttagccataaaagtgaaagagttgtattggagctcagtgctgtaaaacacccgcgacaacaagc

SEQ ID NO: 8975 - DNA, 2240 bp, Homo sapiens
  source 1..2240: mol_type = unassigned DNA
caagcaaccggtaaacgccgccgtttgaggagcaccggagccgcgaccgtggattgaacgcttccccagagacccagaagcagaaggagcggacccaggccggcaccatggagattgtgtacgtgtacgtcaagaagcgcagcgagttcgggaagcagtgcaatttctcggaccgccaggccgagctgaacatcgacatcatgcccaaccctgagctggccgagcagttcgtggagcggaacccagtggacacgggcatccagtgctcgatcagcatgtcggaacacgaggccaactcagagcggtttgagatggagacccggggagttaaccatgtcgaggggggctggcccaaggacgtgaaccccctggagctggagcagaccatccgtttccggaagaaagtggagaaagatgagaactacgttaacgccatcatgcagctcggctctatcatggagcactgcatcaagcagaacaatgccattgacatctatgaagagtatttcaatgacgaggaggccatggaagtgatggaggaggacccttcagctaaaaccatcaatgtgttcagggacccccaggaaatcaagagggctgccacacacctctcctggcaccccgatggcaacaggaagttggcagtggcatactcctgcttggattttcagcgggcacctgtgggcatgagcagcgattcatacatctgggacctggaaaaccccaacaagcctgaacttgctctgaagccatcgtctccactcgtgacgttggagttcaaccccaaagattcccacgtactcctgggtggctgctacaatggacagatagcctgctgggacacccgaaagggcagcctggtggcggagctatccaccattgagtccagccaccgagaccctgtgtatggcaccatctggctgcagtcgaagacgggcaccgagtgcttctcagcttccacggatgggcaggtcatgtggtgggacatccgaaagatgagcgagcccactgaagttgtgatcttggacatcaccaagaaggaacagttggaaaatgccttgggggccatctccctggagttcgaatctactttgcccaccaagttcatggtggggaccgagcagggcatcgtcatctcctgcaaccgcaaggccaagacgtcagctgaaaagattgtgtgcaccttcccgggccatcatggccccatctacgccctccagagaaaccccttctacccgaagaacttcctgacggttggcgactggacagcccgcatttggtctgaagacagccgggaatcgtccatcatgtggaccaagtaccacatggcttacctcactgatgctgcctggagccccgtgaggccgaccgttttctttaccaccaggatggacggaaccctggatatctgggacttcatgttcgagcagtgcgatcccaccctcagcttgaaggacaatgggtgtctcatcgcctgcggctcccagctggggacaaccaccctgctggaggtctcgcctgggctctctaccctccagaggaatgagaagaacgtagcctcttccatgtttgagcgtgagacccggcgagagaagatcctggaggccaggcaccgggagatgcggctgaaggagaagggtaaggcggagggcagggatgaggagcagaccgatgaggagctggccgtagacctggaggcgctggtcagcaaggccgaggaggagttcttcgacatcatcttcgcagagctgaagaagaaggaggcagacgccataaagctgacgccagtgcctcagcaaccaagtccagaagaagaccaggtggtggaggagggagaggaagcagcgggggaagaaggggatgaagaagtggaagaagacttagcctagaagtcagccttcgactgcggcgctatccctgtgtgccttcctttcccacctcttgaccctcaaccagacttgcatggccatggcagggcctcgggaagaccttcaggagtggggaagggtttctcctccatgatcgaccctcctcgtccacctacaaatcaggaacagaaagtctgtccactttgaaaatacctttccaggcagctccctgaccatttggacacattgccacgacaggagcctccaagtatgtgggaggggacgggcgggacgagcttggctgttctgctgcacctgaatgctttctgttatcctaattcttgtaaaattaaatgaatcgtaacaatgcca

SEQ ID NO: 8976 - DNA, 3100 bp, Homo sapiens
  source 1..3100: mol_type = unassigned DNA
gagaaggacaatgggctggatgtgttcaagttgagtgaccgcgacttcctgcgcagcatggagaacgccatccgctttggcaagccatgtctcctggagaacgtgggcgaggagctagacccagccctggagccagtgctgctcaagcagacgtacaagcagcagggaaacacggtgctgaagctgggggacacggtgatcccctaccatgaggacttcaggatgtacatcaccaccaagctgcccaacccacactacacgcccgagatctccaccaaactcaccctcatcaacttcaccctgtcgcccagtggcctagaggaccagctactgggccaggtagtggcagaggagcgacccgacctggaggaggccaagaaccagctgattatcagtaatgccaagatgcgccaggagctgaaggacattgaggaccagatcctgtaccggctcagctcctccgagggcaaccctgtagatgacatggaactcatcaaggtgctggaagcctccaagatgaaggctgctgagatccaggccaaagtcaggattgcagagcagacggagaaggacatcgacctgacgcgcatggagtacatacccgtggccatccgcacccagatcctcttcttctgtgtgtccgacctggccaacgtggaccccatgtaccagtactcccttgagtggtttctcaacatcttcctctcgggcatcgccaactcagagagagcagacaacctgaagaagcgcatctccaacatcaaccgctacctgacctacagcctctacagcaacgtctgccgcagcctctttgagaagcacaagctgatgtttgccttcctgctgtgtgttcgcatcatgatgaacgagggcaaaatcaaccagagtgagtggcgatacctcctgtctgggggctccatctcgatcatgactgagaatccggcaccggactggctgtcagaccgggcttggcgagacatcctagcactctcgaacctgccaaccttttcctccttctcttccgacttcgtgaagcacctctcagaattccgggtcatcttcgacagccttgagccccaccgggagcctttgcctggcatctgggaccagtacctagaccagttccagaagctgctagtcctccgctgcctgcgtggggacaaggttaccaacgccatgcaggactttgtggccaccaacctggagccacgcttcattgaaccccagacagccaatctgtcagtggtgttcaaagactccaactccaccacacccctcatctttgtgctgtcacccggcacagaccctgctgccgacctctacaagtttgccgaagaaatgaagttctccaaaaagctctctgccatctccctgggccaggggcagggccctcgggcagaagccatgatgcgcagctccatagagaggggcaaatgggtcttcttccagaactgccacctggcaccaagctggatgccagccctagaacgcctcatcgagcacatcaaccccgacaaggtacacagggacttccgcctctggctcaccagcctgcccagcaacaagttcccagtgtccatcctgcagaacggctccaagatgaccattgagccgccacgcggtgtcagggccaacctgctgaagtcctatagtagccttggtgaagacttcctcaactcctgccacaaggtgatggagttcaagtctctgctgctgtctctgtgcttgttccatgggaacgccctggagcgccataagtttgggcccctgggcttcaacatcccctatgagttcacggatggagatctgcgcatctgcatcagccagctcaagatgttcctggacgaatatgatgacatcccctacaaggtcctcaagtacacggcaggggagatcaattacgggggccgtgtcactgatgactgggaccggcgctgcatcatgaacatcttggaggacttctacaaccctgacgtgctctcccctgagcacagctacagcgcctcgggcatctaccaccagatcccgcctacctacgacctccacggctacctctcctacatcaagagcctcccactcaatgatatgcctgagatctttggcctgcatgacaatgccaacatcacctttgcccagaacgagacgttcgccctcctgggcaccatcatccagctgcaacccaaatcatcttctgcaggcagccagggccgggaggagatagtggaggacgtcacccaaaacattctgctcaaggtgcctgagcctatcaacttgcaatgggtgatggccaagtacccagtgctgtatgaggaatcaatgaacacagtactagtacaagaggtcattaggtacaatcggctgctgcaggtgatcacacagacactgcaagacctactcaaggcactcaaggggctggtagtgatgtcctctcagctggagctgatggctgccagcctgtacaacaatactgtgcctgagctctggagtgccaaggcctacccatcgctcaagcctctgtcatcatgggtcatggacctgctgcaacgcctggactttctgcaggcctggatccaagatggcatcccagctgtcttctggatcagtggattcttcttcccccaggctttcaacaggcactctgcagaattttgcccgcaaatttgtcatctccattgacaccatctcctttgatttcaaggtgatgtttgaggcaccatcagagttaacacaaagaccccaagtagggtgctatatccatggattattcctggaaggtgcccgctgggatccagaggccttccagctggctgagtctcagcccaaggagctgtacacagagatggccgttatctggctcttgccaacacccaaccgcaaggcccaggaccaggacttttacctgtgccccatctacaagacactgactcgtgctggaacactatcaaccacaggacactctaccaactatgtcattgctgtggagatccccacccatcagccccagcgacactggataaagcgtggtgtggccctcatctgtgccctggactactagactcagacagaagggctggggccattaaagctgaattttctaagc

SEQ ID NO: 8977 - DNA, 13104 bp, Homo sapiens
  source 1..13104: mol_type = unassigned DNA
ggggggtacccaacctatacgcagacccattgagcagccagactgccctaaacagggctatggagtccttgtcccttctaagagctgtggacaccttgcctccagttcccctcacagtcctttcttccttctgcagtgatcactgagtacctgtgtgaatgccaacaagaaaaataaaaccacagtttggattcaggaaaggttgcaccaccatcaggtcttgaagggagcttcggctggggcatctccctgagaagcagcatggagcagcctaacagtaaaggctatagcctgggaaggacccctcagggcccagagtgcagcagtgctcctgcagtccaagtggggacccacaggggcctagagtataacccggggaagattcttccaggatcagactatgggttgggaaatcctccagcccttgaccccaagctcccacatttacccctgcccccggccccacccacactctcagacttggggcagccacggaagtcacccctgacaggcactgataagaagtacccgctgatgaagcagcgtgggttctactccgacatcctcagccctggaaccttagatcaacttggggaggtatgtcgtggcccccgaatgagccagaacctcctgcggcaggctgaccttgacaagttcaccccaagagtcggaagctttgaggttcctgaagacttccaggagcgcatggagcagcagtgcatcgggtccaccacccggctgctcgcccagactgacttcccactgcaggcctacgagcccaagatgcaggtgcctttccaggtgctgccaggccagcatcctcgcaagattgagatcgagaggaggaaacagcagtacctgagcctggacattgagcagttgctgttcagccagggcatcgactccaacaagctcatgcccaggcacctggaccaccagcacccccaaaccatcgaacagggccatgacccaatcttccccatctacctcccactgaaggtatttgacaatgaggactttgactgccggactcccagagagtggatcaacatgggcttggagccagggtctctggacaggaaacctgtcccgggaaaagccctcttgcccactgatgacttcctggggcatgaggaccccaagagtcagaagctgaagtacaaatggtgcgaggtcggcgtcctggactacgacgaggagaagaagctatacctggtacacaagacagacgagaaaggcctggtgcgagatgagatggggaggcccatcctgaatgcaggggtcaccactgaaggaaggccaccccttcaggtctgtcagtactgggtgccacggatccagcttctcttctgcgctgaggacccttgcatgttcgcacaacgtgtggtccaggccaacgccctgcgcaagaacacggaagcactgctgctctacaacttgtatgtggactgcatgccctctgacggccagcatgtcatcagtgaacagagcctgagcaagatcaagcagtgggccctgagcacgcctcggatgcgcaaaggcccctcggttctagagcacctcagcagtcttgccagagaagtgagcctggactatgagcgcagcatgaacaagatcaactttgaccacgttgtctcttccaagcccgagaccttctcctacgtcaccctccccaagaaggaggaggagcaggtgcctgagcgagggctggtgagtgtccccaagtaccacttctgggagcagaaggaggacttcactttcgtgtccctgctcacacggccagaggtcatcacggccctcagcaaggtgagggccgagtgcaacaaggtgaccgccatgtccctgttccactcgagcctctccaagtacagccacctggaggaatttgagcagatccagtcacagaccttctcccaggtgcagatgttcctcaaggacagctggatcagctcgctaaaggtggccatgcgcagcagcctgcgcgacatgagcaagggctggtacaacctctacgagaccaactgggaggtgtacctcatgtccaagctgcgcaagctgatggagctggtgaagtacatgctgcaggacacactgcgcttcctggtgcaggactcacttgccagcttctcacagttcatcagcgacacctgttgcagcgtgctcaactgcaccgatgacatggtctggggtgacgacttaattaacagcccctacaggccccggaagaatcccctgttcatcatggacctggtgctggacagctctggggtgcactatagcaccccactggagcagtttgaggcatctctgctgaacctcttcgacaagggcatcctggccacccatgccgtgccccagctggagaagctggtgatggaggacatcttcatcagcggtgaccccctgctggagtccgtgggccttcatgagccactggtggaagagctacgggccaccattgccagtgccgtgtccaaggccatgatcccactgcaggcctacgccaaggagtaccgaaagtacctggagctgaacaacaatgacattgcctcctttctcaaaacctaccagacgcagggcctgttggcccaggaggtgcgggaggtagtgctcacccacctgcgggagaaggagatcctggacagctcgctgcccagcagcatcatcattgggcctttctacatcaacaccgacaatgtcaagcagagcctgtccaagaaacgcaaggccctggccacttccgtgctggacatccttgccaagaacctgcataaggaggtggatagcatctgcgaggagttccgcagcatcagccgcaagatctatgagaagcccaacagcattgaggagctggctgagctgcgagagtggatgaagggcatcccggagaggctggtgggcctggaggagcggattgtgaaggtcatggatgactaccaggtcatggatgaattcctctacaacctcagctcagatgacttcaatgacaaatggattgccagcaactggccttctaagatccttgggcagatagagctggtgcagcagcagcatgtggaggatgaggagaagttccgcaaaatccagatcatggatcagaacaacttccaagagaagctggaagggctgcagctggtagtagctggcttctccatccatgtggagatttcacgtgcacacgagatcgccaacgaggtgcggcgtgtcaagaagcagctgaaggactgccagcagctggccatgctctacaacaaccgcgagcgcatcttcagcttgcccatcaccaattatgacaagctctccaggatggtgaaggagttccaaccctacctggacctttggaccacagcgtctgactggctgcgctggtcggagagctggatgaatgaccccctctctgccatcgatgctgagcagctggagaagaacgtggttgaagccttcaagaccatgcacaagtgcgtgaagcagtttaaggacatgccagcctgccaggaagtggccttggacatccgggcccgcatcgaggagttcaaaccatacatcccactgatccaggggctgcgcaaccctggcatgcggatccggcactgggagacactgtccaaccagatcaacatcaatgtcaggcccaaggccaacctgacctttgctcgctgcctggagatgaacctgcaggaccatatcgagagcatcagcaaggtggctgaggtggctggcaaggagtacgccatcgagcaggcactggacaagatggagaaggagtggtcgaccatcctgttcaatgtactgccctacaaggcgacagacacctacatcctgaagagcccggacgaggcctcacagctgctggacgaccacatcgtcatgacccagaatatgtcattttcaccctacaagaagccctttgagcagcgcatcaactcctgggagaacaaactgaagctgacccaggaggttctggaggagtggctgaactgtcagcggtcctggctctacctggagcccatctttagctctgaggacatcaaccagcagctgcctgtggagagcaagcgctaccagaccatggagcggatctggaagaagatcatgaagaatgcctacgagaaccgggaggtgatcaatgtgtgttccgacctgagaatgctggacagcctgcgggactgcaacaagattctggacctggtgcagaagggcctcagcgagtatctggagaccaagaggagcgccttccccagattctacttcctgtcagatgatgaactactagagatcttgtcgcagacaaaggaccccacggccgtgcagccacacctgcgcaagtgcttcgagaacatcgctcggctgctattccaggaggacctggagatcacgcacatgtactcagccgagggggaggaggtacagttgtgcttctccatctacccctccagcaacgtggaggactggctgcgggaggtggagcgcagcatgaaggccagtgtgcacgacatcattgagaaggccatcagggcctaccccacgatgcccaggacccagtgggttctgaactggcctggccaggtgaccatcgctgggtgccagacctactggaccatggaggtggcagaggctctggaggccggcaacctcagaagccaactgttcccccagctctgccagcagctcagtgatctggtggcccttgtgcgggggaagctgtcccgcatgcagcgggcagtgctgtcagcgctaatcgtcattgaggtccatgccaaggacgtggtgagcaagctaatccaggagaacgtggtcagcgtgaatgacttccagtggatctcacagctgaggtactactggacaaataatgacctgtatatccgtgctgtgaatgctgagttcatctatggctatgagtacctgggcaacagtgggaggctggtgatcacgcccctcaccgacaggtgctacctgacactgaccggagctctgcacctcaagtttgggggtgccccagctggcccagctggcacaggcaaaactgagaccaccaaagacctgggtaaggccttggccatacagaccgttgtgttcaactgctctgaccagctcgacttcatggccatgggcaagttcttcaagggcctggccagtgctggggcctgggcctgcttcgacgagttcaatcgcatcgacatcgaggtgctgtctgtggtggcgcagcagatcaccaccatccagaaggcgcagcagcagcgggtggaacgcttcatgtttgagggtgtggagatcccactggtgccatcctgcgcagtgtttatcaccatgaacccgggctacgctggccgcacggagctgcctgacaatctgaaggcgctcttccgacccgtggccatgatggttccagattacgccatgatcactgagatctccctctattcctttggctttaatgaggccagtgtgctggctaagaagatcacaaccaccttcaagctgtcttctgagcagctcagctcccaggatcactatgacttcgggatgagagccgtgaaaactgtgatctcggctgctgggaacctcaagcgagaaaaccccagcatgaatgaggagctgatctgcctccgggccatccgtgatgtgaacgtgcccaagttcctgcaggaggacctcaagctcttctctggcatcgtgtccgacctgtttcccaccatcaaggaggaggacacggactacggcatcctggatgaggccatccgcgaggcctgcaggaacagcaacctcaaggatgtggagggcttcctgacaaagtgcatccagctctacgagaccacggtggtacgacacggcctcatgctcgtcgggcccacaggctccggcaagagtacttgttacagagtcctggcagctgccatgacgtcactgaaagggcagccatccatcagtggtggcatgtacgaggctgtcaactactacgtgctcaaccccaagtccatcacgatgggccagctgtacggggagtttgacctcctcacccatgagtggacagacgggatattctcctcgttcatccgggcgggggccatcacctccgacaccaacaagaagtggtacatgttcgatgggccggtggatgccatctggattgagaacatgaacacggtgctggatgacaacaagaagctgtgcctcagctctggggagatcatcaagctcacagaggcaatgaccatgatgttcgaggtgcaagacctggcggtggcttcaccagctacagtctcccgctgtggcatggtgtacctggagcccagcatcctggggctcatgcccttcatcgagtgctggctgaggaagctgcctcccttgctgaagccctatgaggagcatttcaaggccctctttgtcagcttcctggaggaatccatctccttcgttcggtcctcagtgaaggaggtgatcgcctcaaccaactgcaacctgaccatgagcctcctcaagctgctggactgcttcttcaagccctttctgcctagagagggcctcaagaaaataccctctgaaaagctgagtcgcatcgtagagttgatcgagccctggttcatcttctccctgatctggagcgtgggtgccactggggacagcagtggccgcaccagtttcagccactggctaaggctcaagatggagaacgaacagctgactctgcttttcccagaagaggggctggtgttcgattacaggctggaggacgcgggcatcagtggcaccaacgacagtgaggatgaagaggaggaatacaagcaggttgcctgggtgaagtggatggactcctcagctccattcaccatggtaccagacaccaactactgcaacatcattgtgcccaccatggacaccgtgcagatgtcccatttactggacatgctgctcaccaacaagaagcccgtgctgtgcattgggccaacaggcacggggaagacgctcaccatctctgacaagctcctcaagaacctggcactggattacatcagccacttcctcaccttctcagcccgcacttcagccaaccagacccaggacttcattgacagcaagctggacaagaggcggaagggtgtgtttggaccacctctggggcgcaactttatcttcttcatcgatgacctgaacatgccggccctggagacctacggtgcacagccacccatcgagctgttgcgccagtggatggaccacggcggctggtacgaccgcaagatcattggtgccttcaagaacctagtggacatcaactttgtctgtgccatgggccccccgggtggaggcaggaacaccgtcaccccgcggctgatgcgtcacttcaactacctgtctttcgctgagatggacgaggtcagcaagaaacgcatcttctccaccatcctgggcaactggttggatggactccttggagaaaaaagctaccgggagcgtgtgcctggggccccccacattgcccacttcacggagccccttgtggaagccaccatcatggtgtatgcaaccatcacctcccagctgctgcccactccagccaagtcccactacaccttcaacctgagggacctctccaaggtcttccaaggcatgctcatggctgacccggccaaggtcgaggaccaagtgcagctgctgcgactgtggtatcacgagaactgccgcgtgttccgggaccgactggtgaatgaggaggaccgcagctggttcgaccagctcctcaagcgctgcatggagcagtgggaggtgaccttcaacaaggtctgccccttccagcccattctttacggggacttcatgtcaccaggctccgatgtcaagtcctacgagctcatcaccagtgagagtaagatgatgcaggtgatagaggagtacatagaggactacaaccagatcaacacggccaagctgaagctggtcctcttcatggacgccatgagccacatctgtcgcatcagccgcaccctacgccaggcgctgggcaatgcactcctgctgggcgtgggtggcagcggccgcagctccctcacaaggctcgcctcgcacatggccgagtacgagtgcttccagattgaactatccaagaactacggcatgtccgagtggcgagatgatgtgaagaaggtcctgctcaaggcgggcctacagaacctacccatcaccttcctcttctcagacacccagatcaagaacgaatccttcctggaagatatcaacaacgtcctaaactctggtgacattcccaatctgtatactgcggacgagcaggaccagatcgtcagcaccatgcggccctatatccaggagcagggcctacagcccaccaaggccaacctcatggctgcttacacagggcgtgtgcgcagcaacatccacatggtgctgtgcatgagccccatcggagaggtcttccgagctcgtctgaggcagtttccctccctggtcaactgctgtaccatcgactggtttaacgagtggccggcagaagccctgaagtctgtggccaccgtgttcctcaatgagatcccagaactggaatcctcccaggaagaaatccaaggactgatccaggtctgtgtgtacatccaccagtcggtgtccaagaagtgcatcgagtacctggcagagctgacccgccacaactatgtgacccccaagagctacttggagctgcttcatattttctccatcctcatcgggcagaagaaactggagctgaaaactgccaagaaccgcatgaagagcggcctcgacaagctgctgcgcacttctgaggatgtagccaagatgcaggaggacctggagagtatgcaccccctgctggaggaggctgccaaggacaccatgctcaccatggagcagatcaaggtggatacggccatcgccgaggagacccggaattcagtgcagacagaggagatcaaagccaatgagaaggccaagaaggcacaagctattgctgacgatgcccagaaggacctggacgaggcgttgccagccctggatgcggctctggccagcctgcgcaacctcaacaagaacgatgtgaccgaggtacgtgccatgcagcggccacccccgggtgtgaaactggtcatagaagctgtgtgcattatgaaaggcatcaagcccaagaaggtgcctggagaaaagccaggcaccaaggtggatgactactgggagcctggcaaggggctgctgcaggacccgggccacttccttgagagcctcttcaagtttgacaaggacaacattggggatgtggtgatcaaagccatccagccgtacatcgataatgaagagttccagccagccaccattgccaaggtgtccaaggcttgcacctccatctgccagtgggtgcgcgccatgcacaagtaccactttgtggccaaggccgtggagcccaagcggcaagccctgctggaggcccaggatgacctgggggtgacacagaggatcctggatgaggcaaaacagcgccttcgtgaggtggaggacggcatcgccacaatgcaggctaagtaccgggaatgcattaccaagaaggaggagctggagctgaagtgtgagcagtgtgagcagcggctgggccgagctggcaagctcatcaacgggctgtcggatgagaaggtgcgctggcaggagacggtggagaacctgcagtacatgctcaacaacatctccggcgatgtcctggtggccgctggctttgtggcctacctgggccccttcacgggccagtaccgcacggtgctctacgacagctgggtcaagcagctcaggagccacaatgtcccacacacctccgagcccacgctaatcgggacgctggggaaccctgtgaagatccgatcgtggcagatcgctggcctccccaacgacacactgtcagtggagaacggggtcatcaaccagttttcccagcgctggacccacttcattgaccctcagagccaggccaacaaatggatcaagaacatggagaaggacaatgggctggatgtgttcaagttgagtgaccgcgacttcctgcgcagcatggagaacgccatccgctttggcaagccatgtctcctggagaacgtgggcgaggagctagacccagccctggagccagtgctgctcaagcagacgtacaagcagcagggaaacacggtgctgaagctgggggacacggtgatcccctaccatgaggacttcaggatgtacatcaccaccaagctgcccaacccacactacacgcccgagatctccaccaaactcaccctcatcaacttcaccctgtcgcccagtggcctagaggaccagctactgggccaggtagtggcagaggagcgacccgacctggaggaggccaagaaccagctgattatcagtaatgccaagatgcgccaggagctgaaggacattgaggaccagatcctgtaccggctcagctcctccgagggcaaccctgtagatgacatggaactcatcaaggtgctggaagcctccaagatgaaggctgctgagatccaggccaaagtcaggattgcagagcagacggagaaggacatcgacctgacgcgcatggagtacatacccgtggccatccgcacccagatcctcttcttctgtgtgtccgacctggccaacgtggaccccatgtaccagtactcccttgagtggtttctcaacatcttcctctcgggcatcgccaactcagagagagcagacaacctgaagaagcgcatctccaacatcaaccgctacctgacctacagcctctacagcaacgtctgccgcagcctctttgagaagcacaagctgatgtttgccttcctgctgtgtgttcgcatcatgatgaacgagggcaaaatcaaccagagtgagtggcgatacctcctgtctgggggctccatctcgatcatgactgagaatccggcaccggactggctgtcagaccgggcttggcgagacatcctagcactctcgaacctgccaaccttttcctccttctcttccgacttcgtgaagcacctctcagaattccgggtcatcttcgacagccttgagccccaccgggagcctttgcctggcatctgggaccagtacctagaccagttccagaagctgctagtcctccgctgcctgcgtggggacaaggttaccaacgccatgcaggactttgtggccaccaacctggagccacgcttcattgaaccccagacagccaatctgtcagtggtgttcaaagactccaactccaccacacccctcatctttgtgctgtcacccggcacagaccctgctgccgacctctacaagtttgccgaagaaatgaagttctccaaaaagctctctgccatctccctgggccaggggcagggccctcgggcagaagccatgatgcgcagctccatagagaggggcaaatgggtcttcttccagaactgccacctggcaccaagctggatgccagccctagaacgcctcatcgagcacatcaaccccgacaaggtacacagggacttccgcctctggctcaccagcctgcccagcaacaagttcccagtgtccatcctgcagaacggctccaagatgaccattgagccgccacgcggtgtcagggccaacctgctgaagtcctatagtagccttggtgaagacttcctcaactcctgccacaaggtgatggagttcaagtctctgctgctgtctctgtgcttgttccatgggaacgccctggagcgccataagtttgggcccctgggcttcaacatcccctatgagttcacggatggagatctgcgcatctgcatcagccagctcaagatgttcctggacgaatatgatgacatcccctacaaggtcctcaagtacacggcaggggagatcaattacgggggccgtgtcactgatgactgggaccggcgctgcatcatgaacatcttggaggacttctacaaccctgacgtgctctcccctgagcacagctacagcgcctcgggcatctaccaccagatcccgcctacctacgacctccacggctacctctcctacatcaagagcctcccactcaatgatatgcctgagatctttggcctgcatgacaatgccaacatcacctttgcccagaacgagacgttcgccctcctgggcaccatcatccagctgcaacccaaatcatcttctgcaggcagccagggccgggaggagatagtggaggacgtcacccaaaacattctgctcaaggtgcctgagcctatcaacttgcaatgggtgatggccaagtacccagtgctgtatgaggaatcaatgaacacagtactagtacaagaggtcattaggtacaatcggctgctgcaggtgatcacacagacactgcaagacctactcaaggcactcaaggggctggtagtgatgtcctctcagctggagctgatggctgccagcctgtacaacaatactgtgcctgagctctggagtgccaaggcctacccatcgctcaagcctctgtcatcatgggtcatggacctgctgcaacgcctggactttctgcaggcctggatccaagatggcatcccagctgtcttctggatcagtggattcttcttcccccaggctttcttaacaggcactctgcagaattttgcccgcaaatttgtcatctccattgacaccatctcctttgatttcaaggtgatgtttgaggcaccatcagagttaacacaaagaccccaagtagggtgctatatccatggattattcctggaaggtgcccgctgggatccagaggccttccagctggctgagtctcagcccaaggagctgtacacagagatggccgttatctggctcttgccaacacccaaccgcaaggcccaggaccaggacttttacctgtgccccatctacaagacactgactcgtgctggaacactatcaaccacaggacactctaccaactatgtcattgctgtggagatccccacccatcagccccagcgacactggataaagcgtggtgtggccctcatctgtgccctggactactagactcagacagaagggctggggccattaaagctgaattttctaagc

SEQ ID NO: 8978 - DNA, 14166 bp, Homo sapiens
  source 1..14166: mol_type = unassigned DNA
ctcggcgctcttcatctaccgcactatggtgccggaggaggtggaggtggagattgatgagatacctgtcctgtctgaagagggagaagaggaagaagagacttattctcaaaaagtggagtccgtggataaagtgcgagctaagcgtgtgtcactgagaaccgaatctctaggccaacctctaaacagagaggatgaagaaatggacaaagagatttcagaaaaactcccttccaaaagaactgcgaagcacatcatggaaaagatgcatctccacatgctctgtacccctcttcccgaggagttcctggaccaaaacgtggtgtttttcctcagaaataccaaagaggcaatctctgaagctaccgacatgaaggaagctatggaaattatgccagaaacactggagtatggaattataaacgctaatgtgctccattttctgaagaatattatatgtcaggtttttttgccagcattgtccttcaatcagcacaggacgagtacaaccgtgggagtcacatctggagaagtctctaattcctctgagcatgaatcagacctgccgcccatgcctggggaggcagtagaatatcacagtattcaattaatacgggatgaatttttaatgaacgtgcagaaatttgcaagtaatattcaaagaaccatgcagcaacttgaaggtgagatcaagttagaaatgccaatcatcagtgtggagggagaggtgtctgacctggcagctgacccggaaaccgttgacatcttggagcagtgtgtgataaactggctgaatcagatatccacagcggttgaggcccaactgaagaagacacctcagggtaaaggccctctggctgaaattgaattctggagggaaagaaatgcaaccttaagtgcgctgcatgaacaaacaaagcttccaatagtcagaaaagtcttggatgtgatcaaggaatccgactccatgcttgtggctaatctgcagccagtgttcaccgagttattcaagttccacacggaggcctcagacaatgtgcgctttctctccaccgtggagcgttatttcaagaacataacgcacgggtctggcttccacgtggtcctggacaccatccccgccatgatgagtgccctgcggatggtgtggatcatctcccgacactacaacaaagacgagaggatgattccgctcatggagcgcatcgcctgggaaatcgctgagagagtctgccgagtggtcaacctgcggactttgttcaaagaaaatcgagcgagtgcccaaagcaaaaccttggaagccaggaacaccctcaggctgtggaaaaaggcctattttgacacccgggccaagatagaggcttcggggagggaagatcggtgggagtttgaccggaagcggctgttcgagaggacggattatatggccaccatctgccaggacctctccgacgttctgcagattttggaggaattttataacatatttggtccagaactaaaggcagtgacgggggaccccaagcgcattgatgatgtcctatgcagagtggacggcctagtcacccccatggaaaacctgacctttgaccccttcagcatcaagtcctcccagttctggaaatatgtgatggatgaattcaagattgaagttctgattgacatcattaataaaatctttgtccagaaccttgaaaatccaccactgtataagaatcaccctccagtagcaggtgcaatatactgggaacgatctctgttctttcggattaagcataccatcctccgatttcaagaggtacaagagatactggacagtgatcgaggacaggaggtcaaacaaaaatatttggaagtaggtaggacaatgaaggagtatgaagacagaaagtatgagcagtggatggaggtgacggagcaggtgctgccagctctcatgaagaagagccttttgaccaagtcttccatcgccacagaggagccttcgactttagaaaggggagctgtttttgcaatcaacttttcaccggctctcagagagattattaatgaaacaaagtacttagagcagctggggttcactgtccctgaattagcaagaaatgttgctctccaggaagacaaattccttaggtacacagctgggatacagcgcatgttggatcattatcacatgctcataggaacgttaaacgatgcggagtctgtgcttctcaaagatcattcccaggaactgctccgagtgtttaggtcgggatataagaggttgaactggaactcactaggtatcggtgactatataactggttgcaaacaggccattgggaaatttgagtctctcgtccaccagattcataagaatgcagatgacatttcttccaggctgacattaatagaggccataaatctctttaaatatccagccgctaaaagtgaggaagaactcccaggcgtgaaggaattttttgaacacattgagcgagaaagggccagcgacgtggaccacatggtccggtggtatcttgccattggaccactgctgaccaaagttgagggcctggtcgtccacaccaacacaggcaaggcccccaagctggcctcctactacaaatactgggaaaagaaaatttatgaggtcctgacaaagctcatcctgaagaacttgcagtcttttaattctttgatccttggaaatgtccctctgttccacactgaaaccattctgacggcacctgagatcatccttcatcccaacacaaatgagatcgacaagatgtgcttccattgtgtccggaattgcgtggagatcaccaagcattttgttcgttggatgaatggcagctgcatagaatgcccacctcagaagggggaggaagaggaagttgttataataaacttttacaatgatatctctctgaaccctcagataattgaacaagctgttatgatcccccaaaatgtccacaggattctgatcaatcttatgaagtatctacaaaaatggaagcggtatcgacctctctggaaattggacaaagctattgtgatggagaaatttgctgccaagaaacctccttgtgtagcatatgatgaaaagttgcagttctattccaagatagcttatgaggttatgcgccaccctctaattaaggatgagcattgcatcagacttcagctcaggcatctggcaaacacagtgcaggaaaatgccaagtcctgggtgatttcgcttggaaaacttctcaatgagtcagcaaaagaggagctctataatctccatgaagagatggagcacctggccaaaaaccttaggaagatccccaatacccttgaagatctcaagtttgtccttgcaacaattgcagaaattagaagtaaatctctagtcatggaactcagatatagggacgtccaggagcgataccgtaccatggcaatgtataacctctttcctcctgatgcagagaaagaactggttgataagattgagagcatatggtccaatctgtttaatgattcagtgaatgtggagcatgctcttggggacataaagagaactttcacagagcttactcgaggcgaaataatgaactacagagttcagatagaggagtttgcaaagcgtttttacagtgaaggccctggttctgttggtgatgatcttgataaaggagtagagcttttaggtgtttatgaaagagagctggcaagacatgaaaagagccgtcaggaactggctaacgctgagaaacttttcgatcttcctattacaatgtacccagagctgctgaaagtgcagaaggaaatgagtgggctgaggatgatttacgagctctatgaaggactaaaggttgcaaaagaagaatggtctcagaccctttggatcaacctgaatgtgcagattctccaggaaggaattgaaggttttctcagggctctcagaaagctacctcggccagtccgtggcttatcagtgacctactacttggaagcaaaaatgaaggcattcaaagactcgattcctttacttcttgacttgaaaaacgaggcactaagagacaggcattggaaagaacttatggaaaaaacgtctgtcttttttgaaatgaccgaaacgttcaccttggaaaatatgtttgctatggaactgcacaaacacacagatgttctcaatgagattgtcacagcagcaatcaaggaggttgccattgagaaggctgtgaaggaaatcctagacacgtgggaaaatatgaaattcactgtagtcaagtattgcaaaggcacacaggagcgaggctacatcctgggttctgttgacgaaattattcagtctcttgatgacaacactttcaacctgcagagcatctcaggaagcagatttgtggggccttttctgcaaactgttcacaaatgggaaaaaacgctttctctaataggggaagtcattgagatttggatgttggttcagagaaaatggatgtatcttgaaagtatttttattggtggagatataagatcacaacttccggaagaggcaaaaaagtttgacaacatcgataaagtatttaaaaggatcatgggtgagaccttaaaagaccccgtgatcaagaggtgctgtgaagccccaaaccgcctcagtgacctacagaacgtcagcgagggcctggagaaatgccagaaaagcctcaacgactacttagattcgaagagaaatgctttcccaaggttcttcttcatttctgacgatgagttgcttagcattctggggagcagcgacccactctgcgtccaggagcacatgatcaagatgtacgacaacatagcatcactgaggtttaatgacggcgatagtggagaaaaactggtgtccgcgatgatttcagcagaaggagaagtcatggagtttcggaagatcttgcgggctgaagggcgcgtggaggactggatgacggcagttttgaatgagatgagaagaactaatagactaattaccaaagaggctatttttagatactgtgaagacagaagcagagtcgactggatgctcctgtaccagggcatggtggtgctggccgctagccaggtgtggtggacctgggaggtggaagacgtcttccacaaagcgcaaaaaggggagaagcaggccatgaagaactatggcaggaaaatgcaccggcagatcgatgagttggtaacgcgcatcaccatgccgctaagcaaaaacgacaggaaaaaatacaacactgttctcatcattgatgtgcatgccagagacatagttgattctttcataagaggcagtatcctggaggcccgagagtttgactgggaaagtcagttgcggttttattgggaccgggagccggatgagctgaacatccgccagtgcacgggaacctttggctacggctacgagtacatgggcctgaacggcaggctggtcatcacgcccctcaccgatcggatttacctgacgctcacccaggcgctgtccatgtatctaggtggggcccccgccggcccagcaggaaccggcaaaaccgagaccaccaaggacctggcgaaagccttgggcttgctctgtgttgtcaccaactgtggcgaaggcatggattacagggccgtggggaagattttctctggcctggcacagtgcggggcttggggctgctttgatgagtttaatcgaatcgatgcttctgtgctctccgtgatctcctcccagatccagacgatccgaaatgctctgatccatcagttaaccacgttccagtttgaagggcaggagatttccctggactcccgcatgggcatcttcatcaccatgaaccccggctacgcaggccgcacggagctgcccgagtcggtgaaggcgctgttcaggcctgtggtcgtgatcgtgcccgacctgcagcagatctgtgagatcatgctcttctctgagggcttcctggaggccaagactctggcgaaaaagatgacggttctgtataagctggcccgggagcagctgtccaagcagtatcactatgattttggactcagagccctgaaatcggtgctggtcatggctggtgagctgaagagaggctcctctgaccttagggaggacgtggtgctgatgagggccttgcgagacatgaacttgcccaaatttgtgtttgaagatgttcctcttttccttggtttgatttcggatctgtttcctgggctggactgccctcgcgtccgctaccctgacttcaacgatgcggtagagcaggtcctggaggagaacggctacgcggtcctacccatccaggtggataaagtggttcaaatgttcgagaccatgttaacccgccacacgacgatggtggtggggcccaccagagggggcaagtccgtcgtcattaacactctgtgtcaggcccagaccaagcttgggctgacgacaaagttgtacatcctgaaccccaaagccgtgagtgtcatagaactctacggcatcctggacccaaccacccgagactggacagatggggtgttgtcaaacatcttcagggaaatcaacaagccaacagacaagaaggagcgaaagtatattttatttgatggtgatgtggatgctctatgggtggaaaacatgaattctgtgatggatgacaacaggttgttgacattggccaacggggaacgcatccggctccaagcacactgtgccctgctctttgaggttggagatttacagtatgcctcccctgcaactgtctctcgatgtggaatggtttatgtggatcctaaaaacttgaaatatcgaccatactggaaaaaatgggttaatcaaataccaaacaaggtggagcaatacaatttgaatagtctctttgagaagtatgtgccctatctcatggatgtgatagtggaaggaattgtggatggaagacaagcagaaaagctgaagacaatagttcctcagacagacctcaatatggtaacccagttagccaagatgttggatgcgttgctagaaggagaaatagaagaccttgacctgctggagtgctacttcctggaggctttgtactgctctctgggagcctccctgcttgaggatggaaggatgaaatttgacgaatatatcaaacgccttgcttctttgtctactgttgacacagaaggagtttgggccaaccctggggaactgccaggtcaacttccaaccttgtatgactttcattttgataacaaacggaatcaatgggtcccatggagtaaattagttccagagtatattcatgcccccgagaggaaattcatcaacatcctggttcacacagtggataccactcggactacctggatattggaacaaatggttaaaattaagcaacctgttatttttgttggtgaatctggcacttctaagacagccactacccagaatttcctcaaaaatctgagtgaagaaactaacattgtgttaatggtcaacttctcctcccgcaccacgtccatggatatccaaagaaatttagaagcaaatgtggaaaagcgaaccaaagatacttacggcccacccatgggaaaacgcctgctggtgttcatggatgacatgaatatgccaagggtggatgaatatggcacgcagcagcccattgccttgctgaagctgctgttggaaaaaggctacttatatgaccgtgggaaggagctgaactgtaaaagcattcgagaccttggctttattgctgcaatgggaaaggctggaggaggccgcaatgaagttgacccaagatttatttcgctattcagtgtcttcaatgtgccatttccttcagaggagtctctgcatttaatttattcctccatcctgaaaggccacacctcgacgtttcatgagagcattgtggctgtgagtggcaagctgacattctgcacgctagcactttacaaaaatattgtgcaagacctacctcccactccgtcaaagttccattacatcttcaaccttcgagatctctcacgggtttttaatggtcttgtcctcactaacccggagcgattccagacggtggcccagatggtgagagtctggaggaatgagtgtctgagagtcttccacgaccggctgatcagtgaaacagacaagcagctggtacaacagcacataggcagcttggttgtggaacattttaaagatgacgtggaggtggtgatgagggatcccatattgtttggagacttccagatggctctgcacgaaggagaaccacgcatttatgaagacatccaggactacgaggcggccaaggctctgttccaggaaattcttgaagagtataatgaaagcaacaccaaaatgaacttggttctcttcgacgatgctctggagcatttaacccgggtgcaccgtatcatccgcatggaccgcggccacgccctgctggtcggggtagggggctcagggaagcagtctctttcgaggctggctgccttcacagccagctgtgaggtgtttgagatcctgctgagccgaggctactcggagaacagtttccgggaagacctgaagagcctctatttgaaacttgggattgagaacaaagcgatgatctttctgttcacggatgcccatgtggctgaggagggcttcctggagctcatcaacaacatgctgacctcaggaattgtacctgcgcttttttctgaagaggagaaagagtctatcctgagtcagattggacaggaagctctgaagcaaggcatggggccggccaaggagtctgtgtggcagtacttcgtgaacaaaagtgcaaataacctgcacattgtcctgggcatgtcgccagtgggggacaccctgaggacctggtgcagaaacttcccaggtatggtaaataacactggtattgactggttcatgccctggcctccccaagccctccatgcggtcgcaaagtcctttctagggtataatccaatgatcccggcagaaaatatagaaaatgtggtgaagcatgttgtcttggttcaccaatccgtggaccactacagccaacagtttctacagaaattgaggcgcagcaactatgtcactcccaagaactaccttgattttattaacacctattcaaaattgctggatgagaaaactcagtgtaatatagctcagtgcaagcgtctggatgggggactggacaagctgaaggaggccaccatccagctggacgagctgaaccagaagctggccgagcagaagatcgtgctggcggagaagtccgccgcctgcgaggccttgctggaggagatcgccgtcaacaccgctgtagccgaggagaagaagaaactggcagaggaaaaggccatggagatagaggagcagaacaaagtcattgccatggagaaggccgaggccgagacgaccctggcagaggtcatgcccatcctggaggccgccaagctggaactgcagaagctggacaagtcggacgtgactgagattaggtcgtttgctaagcccccgaagcaggtgcagacggtctgcgaatgcatcctcatcatgaaagggtacaaagagctgaactggaaaacagccaagggcgtgatgtccgacccgaatttcctgcggtctctgatggagattgattttgattcgattacccagagccaagtgaaaaacatcaaaggcctcttgaagactcttaataccacaactgaagaaatggaagctgtcagcaaagccgggctggggatgctgaaatttgttgaagctgtaatgggctactgtgatgttttcagagaaatcaagcccaaaagagagaaggtggccaggctggagcggaatttttacctcactaaacgggaactggaaaggatccagaatgagttggcagcaattcagaaagagctggaaacattgggtgccaaatatgaggccgccatactggaaaagcagaagctgcaggaagaagccgagatcatggagaggcggctgattgccgcagacaaactcatctcgggtctggggtcagaaaacatcaggtggctgaacgacctggatgagctgatgcaccggcgcgtgaagctgctgggggactgcctgctctgcgcggctttcctcagctacgagggagccttcacctgggagttccgtgacgagatggtcaatcggatttggcaaaatgacatcctggagcgggagatccccctgagccagcctttccggctggaaagcctgctcacggatgatgttgagatcagcagatggggatcccagggccttccccccgatgagctctccgttcagaatggcatcctcaccacccgggccagccgcttccctctgtgtatcgacccccagcagcaggccctcaactggatcaagagaaaagaggagaagaacaatctgcgggtcgcttcctttaatgaccctgacttcctcaagcagctagagatgtccataaagtacgggacccctttcctgttccgcgatgttgatgaatacatcgatcctgtgattgacaacgtcttagaaaaaaatataaaagtctcccaaggacggcagtttattatcctgggagacaaggaagtggactatgattcaaatttcagactgtacctgaacaccaagctggccaatcccagatattccccatccgtgtttgggaaagctatggtgatcaattacactgtcacgctgaagggcctggaggaccagctgctgagcgtgctggtggcttacgagaggcgggagctggaggagcagcgggagcacctcatccaggagaccagcgagaacaagaacctgctcaaggacctggaagattccctccttcgggagctggccacgtccacggggaacatgctggacaatgtggacctggtgcacaccctggaggagaccaaatccaaggcaacagaggtctcagagaaactcaagctggcggagaagacagccttggacatcgacaggctgcgggatggctaccggccagcagccaggaggggggccatcctgttcttcgtcctgtctgagatggccctggtgaactccatgtaccagtactccctgattgccttcttagaggtcttcaggctgtcactgaagaagtcgctgcctgattccatcctcatgaaacgcctgaggaacatcatggacacgctgaccttcagcatctataaccacggctgcacagggctgtttgagaggcacaagctactcttttcttttaatatgaccatcaagatagaacaagcagaagggagagtccctcaagaagaactagatttctttttaaaaggaaacatttccctggagaaaagcaaaagaaaaaagccctgcgcttggttgtctgaccaaggatgggaagatatcattcttttatcagaaatgttttcagacaactttgggcaacttcctgatgatgttgagaataatcagactgtctggcaggagtggtatgacctggattcactggagcagtttcccgtccccttgggttacgataacaacatcacccctttccagaagttgcttattttgcgctgtttccgtgtggatcgggtctatcgggccgtgactgactatgtgactgtaacaatgggagagaagtatgtgcagcccccaatgatcagctttgaagctatttttgagcagagcactccacattcgcccattgtgtttatcctgagtcctggctccgaccctgccactgatcttatgaaattagcagagcgaagtggttttggaggaaatcgcctcaaattccttgcaatgggtcaaggtcaagaaaaggtggccctgcagctgctggagacggcggtggctcgggggcagtggctgatgctgcagaactgccacctcctggtcaagtggctgaaagatctggagaagtccctggagaggatcaccaagccccacccagacttccgcctgtggctcaccacggaccccaccaagggcttccccattgggattctgcagaagtccctaaaggttgtcaccgagccacccaatgggctgaaactcaacatgagggcaacttacttcaagatctctcacgaaatgctggaccagtgcccgcaccctgccttcaagccgctggtctacgtgctggcgttctttcatgctgtggtgcaggagagaaggaagtttgggaagattggctggaacgtgtactatgacttcaatgagtctgacttccaggtctgcatggaaattctgaacacgtacttaacgaaagccttccagcaacgggacccaaggatcccgtggggcagcctcaagtacctaattggagaggtcatgtatggaggacgggccatcgacagctttgatcgccgcatcctgaccatctacatggatgagtacctgggggacttcatttttgatactttccagccattccacttcttccggaacaaggaagtggactacaaaatccctgttggtgatgaaaaggagaaatttgttgaagccatcgaggccctcccgcttgccaacacgccagaagtgtttggtctccaccccaacgctgagattggctattacacgcaggcggctcgagacatgtgggctcacctgctggagctgcagcctcagacaggggaatccagcagtggtatcagccgcgatgattatattggccaagtggccaaagaaatagaaaacaagatgcccaaagtctttgacttggaccaggtgaggaagcgcctcggaacaggactctcccccacttcggtggtgctcctgcaggaactggaacgcttcaacaagcttgtggtccggatgacgaagtctctggctgaacttcaaagggccttggctggagaagttggaatgagcaatgagttagatgatgtggccaggtctctttttatcgggcatatccctaatatctggagaaggcttgctcctgacaccttaaagtcccttggaaactggatggtctacttcctgcggcggttcagccagtacatgttgtgggtgaccgagagcgagcccagcgtgatgtggctctcggggctgcacatccctgagtcctacctcacggcgctggtgcaggccacctgccggaagaacggctggccactggaccgctccaccttgttcacacaagtgaccaagttccaggatgcagatgaagtgaatgagcgggcgggacaaggatgctttgtctcaggactgtacctggaaggtgctgactgggatatagaaaaaggatgtcttatcaagagcaaacccaaggtgctggttgtggacctgccgatcctgaagatcatccccattgaagcccatcgcctcaagctgcagaatactttccggacccccgtctacaccacctccatgagaaggaacgccatgggagtcggcttggtttttgaagctgatctctttaccacgaggcacatttctcactgggtgctgcaaggagtatgcctcaccctgaattctgattaacctttgggtgaagaaaactgcttaatgaattcggagcctggggttgtcagagtgatcgggtctgctgtcatttcttggggcctctcaagaggcaggagggggactgacactgatttttcatttgaaatcagccacttaaatctctttccatacaaattaacctgaatggttttgtttttaatactactttttaaaaggaatttatataatcaaaaagtaaatattggagagtattttaagatgtgtggagttttcttttccttctcagagaaaacacttgattaggcaaaagtgcctggcatacatagcattggcacaagtgagaatcctaatgtaatttccaaaggtgtgttttcgatgatccaggtctgtttcagcagatgctcctttttggcaagaagggctgatgatgtcgggcacagagcagaagtgaccagtcacctggagccacttctcccccttccagaactctctggccctagcttctttggctctgacctgctacggcgactgtgaagttgttgagcttagtgtttagttcctgcatgagcttctacccccagcctgcctgggtctgtgtggggtcaggtaaggacacagaacctccaggaccagtggtcactgggcaccccttccctctgtgcaccatgaggctggcctggagccctggctggccacctggaggtgaggggtggcttcactccatgagggaggagaggggctag

SEQ ID NO: 8979 - DNA, 14188 bp, Homo sapiens
  source 1..14188: mol_type = unassigned DNA
ccggcctcgcgttccctcggacggttgcccaatggcagcccaggtggcagcccgggaggcgcgagacttcagagaagccccgacccttcgcctaacctcgggggccggcctggaggcagtgggcgctgtggagctcgaggaggaggaggagaacgaggaggaggcggcggccaggagagcgcggagtttcgcccaagacgcgcgggtgcgcttcctcggcggccgcctggcgatgatgctggggttcacggaggagaaatggagccagtatttggaaagcgaggacaaccggcaggttcttggggagtttctggaaagcaccagcccggcttgccttgtgtttagcttcgccgcctcggggcgccttgcggcttcccaggagattccaagagatgcaaaccataaacttgtttttatttccaagaagattactgaaagcattggagtaaatgacttttctcaagtggttttatttggagagttacctgcgttgtctcttggacatgtatctgctttccttgatgagattttagtgccagttctttctaataagaacaaccataagtcctggtcctgttttacttcacaagatatggaatatcacatagaagtcatgaaaaagaagatgtatatttttaggggcaaaatgtctagaagaactcttctaccaattcccactgttgcaggaaagatggatctggatcagaattgttcagagaacaagccaccgtcaaacgaaaggataatacttcatgcaattgaatctgtggttattgaatggtcacatcaaatccaagaaattatagaaagagattcagtgcagcgtttgttgaatggtcttcacttgtctcctcaagcagaactagatttctggatgatgaggagagaaaatctgtcatgcatttatgatcaacttcaggcacctgttgtcctcaaaatggttaagatcctgacaactaaacaaagcagctattttcctactctgaaggacatttttctggctgtggaaaatgctcttctcgaagcccaagatgtggaactttacctgagacctctgaggagacacatccagtgtctccaggagacggaattcccacagacacgcatattaatcgctccattatttcataccatctgtctgatctggagtcattccaagttttataacaccccagctcgggttatagttttattgcaagagttttgtaatctcttcattaaccaggcaacagcttacctttcacctgaggaccttttgaggggagaaatagaagagtcactggaaaaggtgcaggtggctgttaacatcttaaagactttcaaaaactcctttttcaactatagaaaaaaattggcaagctactttatgggaagaaagctgagaccatgggatttccagtctcatctggtgttttgcagatttgacaagtttcttgatcgtttaataaaaatagaggatatatttgccaccactttggaatttgaaaagctggaaagactggaatttggtggtaccaaaggagcaattttaaatggacaagtccacgagatgagtgaagaacttatggaactctgtaaactttttaaacagagcacttatgacccatctgattgcactaacatggagtttgaaagtgattatgtggcatttaagtccaaaactctggaatttgacagaaggcttgggacaattatttgtgaagctttctttaactgcaatggcttagaagctgcatttaagcttttgaccatatttggaaattttctagagaagccagttgtcatggaaattttcagcctacattacagcacactagtgcatatgtttaatacagagctggatgtgtgtaagcaactgtataatgaacacatgaaacagattgaatgtggtcatgtagttcttaacaagaacatgccatttacctcaggaaatatgaaatgggcccagcaggttctccaacgacttcaaatgttttggtcaaacttcgcatctctccgttatctatttttgggcaatcctgatcacgctttagtttatcaaaagtatgttgaaatgaccactttgcttgatcaatttgaaagtcgtatctataatgaatggaaaagtaatgtggatgaaatctgtgaattcaatttgaatcaacccttggttaaattcagtgccataaatggtcttctctgtgtcaattttgacccaaagctagtggctgtattgagagaagtgaaatatcttttgatgttgaagaaacaagacataccagattcagctttagccatcttcaagaaaaggaacactattttaaagtacattggaaatcttgaccttcttgtgcaagggtataataaactcaaacagacgctcctggaagttgaataccctctgattgaagatgagctgagggctattgacgagcagctgacagcagccacaacgtggctgacatggcaggatgactgctggggctacatcgagagggtgagggcagccacgtccgagttggagcacagagttgagcgcacacagaaaaacgtgaaggtgatccagcagaccatgaggggctgggccaggtgcgtgctacctcccaggagagagcacagacgagaggcagccttcaccttggaggacaagggtgatttgtttacaaaaaaatacaagttaatccaaggagatggctgcaagatccacaacttggtcgaggaaaataggaagctcttcaaagccaatccctctctggatacctggaaaatttatgtagaattcattgacgacattgtggtggaaggcttttttcaggctataatgcacgacttagacttctttctgaagaatacagagaaacaattgaaaccggcaccgttttttcaagcacaaatgatcttgttgcctcctgagattgtgtttaaaccttccctagacagagaggctggggatggcttctatgatcttgtagaagaaatgttatgcaatagttttagaatgtctgcccagatgaaccgaatagcaacacacctggaaattaaaaattatcagaatgatatggataacatgttaggcctggcagaggtcaggcaggagatcatgaacagagtggtgaatgtcatcaacaaagtcttagatttcagaaacaccctggagacccacacttacctctgggtggatgatcgagctgagtttatgaagcattttctcttgtatggccatgctgtgtcttccgatgaaatggatgctcatgcaaatgaagaaattcccgaacaaccaccaactcttgagcaattcaaagaacagattgacatttatgaagctttgtatgttcaaatgagcaaatttgaggactttagagtgtttgatagttggttcaaggtggacatgaagcctttcaaagtgagcttgttaaccataattaagaaatggagctggatgtttcaggagcatcttttgagatttgtcattgacagtctgaatgagctacaagaatttataaaggagacagattccggacttcagagagaattaaatgaaggtgatcatgatggtttagttgacatcatggtgcatcttctggctgtaagaagccgacagagagctactgatgaactctttgaacctctaaaagaaacgatcaccctcttggaaagctatggccagaagatgcctgagcaggtctatattcagctagaggaattacctgaaagatgggaaactaccaaaaagatcgcagcaactgtcagacatgaagtctcacctctccataatgcggaagtcactcttataaggaaaaaatgtattttgtttgacgcaaagcaggcagagttcagagagagattcagacactatgcccctcttggatttaatgcagaaaatccatacacagcgcttgataaggcaaatgaagagcttgaggccttagaagaagaaatgttgcagatgcaagaatctactcgtctttttgaagtggctcttccagagtacaaacaaatgaaacagtgtcgcaaagaaataaaattgctcaagggactgtgggatgtcattatttatgttcgaagaagcattgataattggactaaaacccagtggagacagattcatgtggaacagatggatgtagaactcagaaggtttgccaaggcgagttccataactgaaatttggtcactcaacaaggaagtccgcgtctgggatgcttacacgggcctggaaggcacagttaaggacatgacagcctccctgagggccatcacagagttacagagccctgccctcagggacaggcattggcaccagctgatgaaagctattggggtcaagtttttaataaatgaagccacaactttggcagatttgttagcactgcggttacacagagtggaagatgatgtccgaaggattgtggacaaggcggtgaaagagctggggactgagaaggttattactgaaatcagtcagacctgggcaaccatgaagttttcttacgaagttcactatcgaacaggcattccattactaaagtctgatgaacaactttttgaaactctagagcacaaccaagttcagttgcagactcttcttcaaagcaagtatgtagaatatttcattgagcaagtgttaagctggcaaaataaattaaacatagcagacttggtcatcttcacttggatggaagtccagcgaacttggtctcacctggaaagcatttttgtctgttcagaagatattcgaatccagcttgtgaaagatgctagaagatttgatggggtggatgctgaatttaaggagttaatgttcaagacagccaaagtagaaaatgtgttagaagcaacgtgcagacctaatctctatgaaaaacttaaagatttacagtccaggctttctctttgtgaaaaagctctcgctgaatacctggaaaccaagcgcatagcctttcctcgcttctatttcgtctcttctgctgatttacttgacattctctcaaaaggagctcagcctaaacaggtaacatgtcaccttgccaaacttttcgacagcattgcagatctgcagtttgaagacaatcaggatgtttctgcacacagggcagttggaatgtacagcaaagaaaaggagtatgtcccattccaagccgagtgtgaatgtgtgggccatgtggaaacatggcttctgcaacttgaacagactatgcaagaaacggtgcgtcattctataacagaagccatagtggcctacgaggaaaaacctagggaactgtggatttttgatttcccagctcaggttgcactaaccagctcacaaatatggtggaccacagatgtaggaatagccttcagtagactggaagaaggctacgaaacagccctgaaggatttccataaaaaacagatttctcagctgaatacactgattacacttttgctgggagaacttccacctggagacagacagaagatcatgacaatttgtaccatagatgtccatgccagagacgtggtggcaaaacttatttctcagaagcaagttgttgtcagtccccaagcttttacatggctgtctcaacttcgtcaccgatgggaggatacccagaaacactgctttgttaatatttgtgatgcccagttccagtacttctatgaatacttaggaaacagccctcgactagtgatcactcctctaactgacaggtgttatattaccttaactcaatcacttcatctaaccatgagtggggctcctgctggcccagctggtaccgggaaaacagagaccaccaaagacctaggacgtgcccttggcatgatggtctatgtattcaactgttcagagcaaatggactacaaatccataggcaatatctataagggattggtgcagacaggagcttggggctgctttgatgagttcaaccgaatctctgtggaagttctgtcagtggtggcagtacaagtgaaaatgattcatgatgccatcagaaacaggaagaagagatttgtatttcttggggaagctatcacactgaagccatcagttggaatatttattactatgaacccgggttatgctggtcgaaccgaattaccggaaaatctcaaagctcttttcagaccctgtgccatggtggcccctgacattgagctaatctgtgaaatcttgttagttgctgaaggttttgtggatgcgcgtgcattagcccgaaagttcattacgttgtacacgctttgcaaggagcttctctccaagcaggatcattacgactggggacttcgtgctattaagtctgtcttggttgtggctggatctctgaaacgaggagataaaaatagacccgaagatcaggtactcatgagagcattaagggatttcaatatgcccaaaatagtgactgacgacatcccagtgtttctgggcctggtcggtgacctgtttccagccctggatgtgccccggaggaggaagctgcactttgaacagatggtcaggcagtctaccctggagctccgcctgcagcctgaagagagcttcatcctcaaagttgtccagcttgaggaactgttggctgtgcggcactcggtctttgtagttggaaatgcaggcacaggaaagagtaagattttgagaacactgaaccgaacatatgttaacatgaaacagaagccggtttggaatgacttaaaccctaaagctgtgacaacagatgaactctttggtttcatacatcatgctacccgagaatggaaagatggcaagattgtttactcttattttataggtctcttctcatccattctacgagaacaagcaaatcttaagcatgatggaccaaaatggatagtcctggatggcgatattgaccccatgtggattgaatcactgaatactgtaatggatgataacaaggtgctgaccctcgccagcaatgagcgcattgcactcactcccttcatgaggcttctgtttgagatacatcacttaaggagcgcaaccccggccactgtttccagagctggtattctgtatgtgaacccacaagatctgggctggaatccgtatgtggccagttggatagacagaaggcggcatcaatcagaaaaggccaatttgactattctttttgataaatatgtccctgcatgcttggataaactgagaacaagctttaaaaccatcacttcaattcctgagagtagcctggtgcagactctatgtgttcttttggagtgcttgctgactcctgaaaatgtaccttctgacagcccaaaagaagtttatgaagtctattttgtatttgcttgtatctgggcttttggaggcaccctgctacaagatcagatttctgattatcaagctgacttcagtcggtggtggcagaaagagatgaaagcagtgaaatttccgtcgcagggaacaatctttgattattatgtggaccacaaaactaagaaattattgccctgggctgacaaaattgcccagtttactatggatccagatgtgcctctgcagacagttctcgttcacacaacagagacagctcgtcttagatatttcatggagttgttgcttgagaaaggaaaacctctaatgctagtaggaaatgcaggagtgggaaaaacagtctttgtaggtgacacattggcaagtctctctgaggattacatagtatcccgtgtgcctttcaactactacacgacatccacagctctgcaaaaaattcttgagaaacccctagagaaaaaagctggtcataactatggtcctggaggaaataaaaaattgatttattttatcgacgacatgaacatgcctgaagtggacttatatggcaccgttcagcctcacaccctgatccggcagcatattgattatggacattggtatgatagacagaaggtgatgcttaaagaaatccataactgccagtatgtcgcctgcatgaatccgatggtgggcagcttcaccatcaatcccaggctacagagacatttcacagtgtttgcattcaattttccatctttggatgcactaaacaccatctatggccaaatctttagcttccatttccaacagcaagcatttgctccatcaattctcaggagtggccccactttgatccaggcaacaatagcattccatcagacaatgatgtgtaactttttacccacggctattaaattccactacatctttaatctgagagatttatcaaacgtcttccaggggattttatttgcttctcctgagtgtttaaaaggtccacttgatttaatacatctgtggcttcatgaatctgcccgtgtttatggagacaaactgatagacaaaaaagattgtgatttgtttcagagaagaatgctggaaactgcttataaatattttgaaggtatagatagtcacatgctgcttcaacagcccctcatttattgccactttgctgatagagggaaggacccacattacatgccagtgaaggactgggaagtgctgaagacgattcttacagaaacgttagacaactacaatgaactaaatgctgccatgcacctagttttgtttgaagatgccatgcaacatgtgtgtcgcatcagccggatcttacgaacccctcagggctgtgctctcttggttggagttgggggcagtggcaagcagagcttgtccaggctggcagcttaccttcgtggccttgaggtctttcagatcactctgaccgagggctatggaatccaggaacttcgggtagatcttgccaatttgtacatccgaactggagccaagaacatgcccactgtgttcctgctgacagatgcccaggttctagatgagagcttcctcgtgctgattaatgacttgctggcatcaggagaaatcccagatctgttcagcgatgaagatgtggacaagataatttctggaattcataatgaagttcatgctctgggcatggtagactccagggaaaactgttggaaattctttatggccagggtgcgactacagctcaaaatcattttgtgtttctctccagttggtcgcacgctgagagttagagctcggaagttcccagccatagttaactgcacggctattgactggtttcatgcgtggccgcaggaggctctggtctccgtcagcaggaggttcattgaggaaaccaagggaattgagccagtgcacaaagactctattagccttttcatggcacatgttcacaccactgtaaatgaaatgagtaccagatattaccagaatgagagaagacacaactataccaccccaaagagttttctagaacaaatatcactgtttaagaacctgttgaagaagaagcaaaatgaggtatccgagaaaaaagaacgcctggtgaacggcatccaaaagctaaaaaccacagcctctcaggtgggagatctaaaagccagacttgcctctcaagaagccgagctgcaactgagaaatcatgatgccgaagctctgatcacaaagatcggccttcagacggagaaagtgagccgggaaaagaccatcgctgatgctgaggagcgaaaggtgacagccattcagactgaagtgttccagaaacagagagaatgtgaagctgacttactcaaggctgagcctgcactggtggctgctacagctgcactcaatacactcaacagggtcaacctcagtgagctgaaagcctttcccaaccctcccatcgcagttaccaatgttactgcagccgtgatggtccttctggctcctcggggaagagtgcccaaagaccgaagttggaaagcagctaaagtcttcatgggaaaggttgatgattttttgcaagcattaattaactatgacaaagagcacattccagagaactgtctaaaagtggtgaatgaacactatttgaaagacccagagtttaatccaaacctgattcgaaccaaatcttttgcagcagctggcctgtgtgcctgggtcatcaacatcattaaattctatgaggtctactgtgatgtggagccaaaacgccaagcattagcccaagcaaacttagaactggctgcagctactgaaaaactagaggctatcaggaaaaagcttgtggatctggatcgaaatctgagcagactcacggcttcatttgaaaaagcaacagctgagaaagtccggtgtcaagaagaggtgaaccaaaccaacaaaaccatcaaattagctaacagacttgtcaaggaacttgaggcaaagaagattcgctggggtcaatccattaagtcctttgaagctcaagagaagacactctgtggagatgttcttctcacggcggcatttgtgtcttacgtcggacccttcacaaggcagtatcgccaggagctggtgcactgcaagtgggttccctttcttcaacagaaggtttccattccactaaccgaaggcctggacttgatatccatgttgacggatgatgctacaattgccgcctggaataacgaaggactgcccagtgacagaatgtccaccgaaaatgccgctatcctaacacactgtgagcgctggcctctggtgatagatccccagcaacagggaattaagtggatcaagaataagtatggaatggacctgaaagtcacacatttgggccagaaagggtttttgaatgccattgaaactgctttggcctttggtgatgtcatcttaattgaaaatctcgaggaaacgatagatccagtcctggatccactacttggcaggaacacaattaaaaaaggaaagtatatcaggattggagataaagaatgtgaatttaacaagaactttcgccttatccttcacacaaaattggcaaatcctcactataagccggaattacaagctcagacaactctcctcaatttcacagtcacagaagatggtctagaagcccagctgctggcagaggttgtcagtattgaaaggccagatttggagaaacttaagttggtattgacaaagcaccaaaatgattttaaaattgagctcaagtatctggaagacgatctccttttgcgcctttctgcggcagagggaagctttctggatgacaccaaactggtagagagattggaggcaacaaagaccaccgtggcagagatagagcacaaggtgattgaagccaaagaaaatgaaagaaaaatcaacgaggcccgagaatgttacagaccagtggcagcaagagcatctcttctttattttgttattaatgacctccaaaaaatcaaccccctctaccaattctctttgaaggcttttaacgtgctgttccacagagcgatcgagcaggctgacaaggtggaagacatgcagggacgcatctctatcctgatggagagcatcacccatgctgtcttcctctacaccagccaggcgctgtttgagaaggacaagctcaccttcctgtcccagatggcttttcagattttgttgagaaagaaagagatagaccctcttgaattggatttcctgcttcgattcacagttgaacacactcatctgagtcccgttgacttcctaacttctcagtcatggagtgctatcaaggcaattgccgtcatggaagaatttcgaggcatagaccgagatgtggaaggatctgccaagcagtggaggaagtgggtagaatccgagtgtccagaaaaagaaaaattacctcaagaatggaagaagaaaagtttaatacagaagctgattcttctgagagcaatgcgccctgacagaatgacgtatgctctcagaaattttgtagaggaaaaactgggtgcgaagtatgtggagaggaccagattggacttagttaaagcattcgaagaaagcagcccagccacccccatattcttcatcctgtctccgggggtagatgcccttaaagacctggagattcttggcaaaagacttggctttacaattgactctggaaaattccacaatgtgtctttaggacaaggtcaggagacggtggcagaagtggccctggagaaagcttccaaaggaggacactgggtcatcctccaaaatgttcatttggtagccaagtggctaggaaccttggagaagctccttgaaagattcagccaaggaagccacagagattacagggttttcatgagtgctgagtctgcacctacaccagatgagcatatcatccctcaaggactcctggaaaattccattaagatcactaatgaacccccaacagggatgctggccaatttgcatgccgccctgtacaactttgatcaggatacacttgaaatatgctccaaggagcaggagtttaaaagcatccttttttctctctgctacttccacgcctgtgttgctgggagactgaggtttggcccccagggctggagccgaagctatccttttaatcctggagacctcaccatttgtgccagtgtcctctacaactacttagaggcaaactctaaagtcccatgggaagatctccgttatctctttggtgagatcatgtatggaggccacatcacagatgactgggatcgcaaactgtgtcgggtgtatttagaagaattcatgaatccatctctgactgaagatgaactgatgctggcaccaggttttgctgccccaccctacctagattatgcaggctaccaccagtacatagaggagatgcttcctccagaaagcccggcactgtatggcctccacccaaatgctgaaatagaattcctgacagtgacatccaacactctcttcagaactttgctggagatgcagcccaggaatgcactcagtggtgatgaactggggcagtctacagaagaaaaggttaagaatgtcttggatgacattttggagaaacttccagaagagttcaacatggcagagataatgcaaaaaaattcaaatagaagcccatatgttcttgtttgcttccaagaatgtgagaggatgaatattctcattcgggaaatacgtatatcacttgaacaactggaccttagtttgaagggggaattggcattatctcctgctgtggaagcccagcagtttgcattgagttatgacacggtaccagacacttggagcaaactggcttatccttctacttatggcctagcccagtggttcaatgacctcctcctgcgatgccgagaactcgatacttggacacaagaccttacccttccggctgtcgtgtggctctccggcttcttcaaccctcagtccttcttaactgcaatcatgcagacgatggctcgaaaaaatgagtggcccctggataaaacgcgcttgactgctgatgttaccaaaaaaacaaaggaagattatggacacccgccaagggaaggtgcatacctccacggactcttcatggagggcgcccgctgggacacccaagcaggaaccattgttgaagcccgtctcaaggagctggcatgccctatgccggtcatctttgcaaaagccacccccgtggacagacaagaaaccaaacagacctacgagtgccctgtgtatagaaccaaactgagaggccccagctacatctggaccttcaggctgaagagcgaagagaagactgcaaaatgggttctggctggagtggctctgcttctagaagcgtaaggtaacactggcattcctctagcctctgctggagtgcagtgaggattttctagcatgttgctgcactgttcccatgcacattattctaactttttagtaactcacacgtgcattcttttttcaacgctatccttagagtgaaagtcagaaaaaaatactagaaactaactcagggctgagcgtggtggcacacgactgtaatcccagttactcaggaggtaggagaatcacttgaacctaggaggcaaaggttgcagtgagccgaggttgcaccactgcactccctcctgggcaacagaacaagactccatctcaaaaaaaaaaaagtacatcataaaagtacatcatatgtgaacatgcaaaagcaatgcagccggaaagaacggagattttaatttttaacaaacaacaaattaaattattagcccttaaactctttcaaaatataaaagcagcaggccccaggtgagtcctgaaggaagaggctagcactctgtaaggcctccagtgtccagtgtctacaatgttgatggtccccttttgttcagtcaagttttaataaaaataaaactgttctacagttaa

SEQ ID NO: 8980 - DNA, 2048 bp, Homo sapiens
  source 1..2048: mol_type = unassigned DNA
cttctccagctactcgtttgagagccggtggcgttccggaggtttctccctcgttatccccctgcctttcacctgaggagaggctctgactgtctctctctctctctggcgtctgcgcagcggggaagtagtgagaaacaatcagagtacagagtattttaatctttaggggatcaagatgtcagatgcaaacaaagctgccattgcagcagaaaaggaagctctgaacttgaagttaccccccattgtccatctcccagaaaacataggcgttgatacaccaacacaaagtaagctgctaaaatacagaagatccaaggagcagcagcagaaaattaatcagttagtaattgatggagccaaaagaaatttagacagaacactgggtaaaagaacacctctattaccaccacctgattatcctcaaactatgaccagtgaaatgaaaaaaaaaggattcaactatatttatatgaagcaatgtgtagaaagtagtcctttagtacctattcagcaggaatggctggatcacatgttaaggctgatacctgagtctttaaaggaagggaaagaaagagaagaacttcttgaaagtctcataaatgaggtgtcaagtgactttgaaaacagcatgaagagatatttggtgcagagcgttcttgtgaaaccaccagttaaatcgcttgaagatgaaggaggtcctttacctgaatctcctgtaggcctagattattctaatccttggcattctagctatgtgcaggcaagaaatcaaatattctctaatttgcacattattcatccaactatgaaaatgttactggaccttggttatacaacatttgctgatacagttttgttggacttcacaggaattagagctaaaggtccaattgactgtgaatcactgaaaactgatctatcaatacaaactagaaacgcagaagagaagataatgaatacatggtatccaaaggttataaatctctttaccaagaaggaggcactagaaggtgttaaacctgaaaaattggatgcattttatagctgtgtttccacacttatgtcaaatcagctaaaggatctattaaggagaactgtagaaggatttgtaaaactctttgacccaaaagatcaacaaaggctgccaatatttaagatagaattgacatttgatgacgacaaaatggaattttatcctacctttcaagatttggaagataatgtcttgagtttggtggaacgaatagccgaagctctgcagaatgtccaaacaatcccctcttggctatcaggaacttcaacaccagtaaatcttgacacagaacttcctgaacacgtgttacactgggctgttgatacactgaaggcagcagtacatcggaacttagaaggtgcaagaaagcattatgagacatatgttgaaaaatataattggctccttgatgggactgcagttgagaatatagagacttttcagacagaagatcatacttttgatgaatatacagaggagctggattgctgggtggtatgggaagtgtatttttaactttttaagaaactgttaagccaggcatagtagcttgcacctgtagtctcagctactcaggaggctgaggtgaaaggattactggagcctaggagttcgagtctgcagtgagttatgatcatgccactgcactccaacttgagtgacagagcaaaactctttgtctcaaaaaacagaagaaacttaaatttctttcaaagttgttataccatttacaatctcaccagcagtgtatgagatttccagttcttccacatccttttcaacctttgggcttatcagtcttttactttttactattgttttattttttcccactgcactttcacatctagattatcagtctttttaatttcatgtgtatattggtatcccactgtggttttaatttgcatttccctgatgactaatgatgtttagcatcttttaacatgtcatgttccatctgtgtatctttttactaataaaaataaagtgtcttttgtttgtacatttt

SEQ ID NO: 8981 - DNA, 2255 bp, Homo sapiens
  source 1..2255: mol_type = unassigned DNA
tttaactttagtaacaaatccaagattttggaaaagcgcctacgatatttaaatgaccacttcacatacaacttatattgtaatatatgccgatcactatttgagaaggacaagctgttattttcctttttattatgtgccaatcttcttctggcaaggaaagagattgaataccaggaactgatgtttcttttaactggaggagtaagtcttaaaagtgctgagaaaaatcctgatccaacttggctacaggacaaaagctgggaggaaatctgtcgggcaagtgaatttcctgccttcagaggactcaggcaacatttttgtgaacatatatatgaatggcgagaaatctatgacagtaaagagccacataatgctaaatttccagcaccaatggataagaacctaaatgaactacagaaaataataattcttcggtgtttaagacctgataagataaccccagctataacaaactatgtaactgacaaactagggaaaaagtttgtagagcctccaccatttgatttgacaaagagttacttggattcaaattgcaccattcccttaatttttgttctatctccaggagcagatcctatggccagcctgctgaaatttgcaaatgataaatctatgtctggaaataagtttcaagctatttcactgggacagggacaaggaccgattgcagcaaaaatgattaaagcagcaattgaagaaggaacttgggtgtgcctacagaattgccatcttgcagtgtcctggatgcccatgttggaaaaaatatgtgaagattttacctctgaaacctgtaactcatcctttaggctttggctgacaagctatccatcttcaaaattcccagtaacaattctacagaatggagtaaaaatgactaatgaacctcccacgggtcttcggctgaatctccttcaatcatatctcactgatccagtttctgatcctgagtttttcaagggatgccgtggaaaggaactgttatttatcaatgaatatgatacaattccatttgaagctatatcttacctgactggggagtgtaattatggaggaagagtgacagacgattgggacagacgtcttctattaaccatgctggctgacttttataatctgtacatagttgaaaaccctcattataagttttctcccagtggaaactattttgcacctcctaaaggcacttatgaggactacattgaattcattaagaaacttccatttactcaacaccctgagatatttggattacatgaaaacgttgacatctccaaggatcttcaacaaacaaaaaccctctttgagtccttgctcctcacccagggaggctccaaacagacaggagcctcaggaagtactgatcagattctgttagaaattaccaaagatatcctcaacaagctccctagtgatttcgacattgaaatggcactacggaagtatcctgtgagatatgaagaaagcatgaatactgtgttagtacaagaaatggaaagatttaacaatttaattataactatacgtaacactctacgggaccttgaaaaagctattaagggtgtggttgtgatggattctgcattggaggcactctccggtagcttacttgttggaaaggttccagaaatatgggccaaacgttcatacccaagccttaagcccctgggaagttacatcacagatttcctagcccggttgaactttttacaggactggtataattcaggaaaaccttgtgtgttttggctgtcaggtttctttttcactcaggcctttttaactggagctatgcagaattatgccagaaaatataccacccctattgatttgctaggatatgaatttgaggttatcccatctgatacatctgacacatcaccagaagatggtgtttatatccacggactgtatctcgatggcgcacgctgggaccgagaaagtggattgcttgctgaacaatatcccaaacttctgtttgacctgatgcccatcatatggataaaaccaactcaaaaatctcggattataaagtcggatgcctatgtctgtcccctctacaagacaagtgaacgtaaaggaactctttccactacgggacattctactaactttgtcattgcaatgttgttaaaaacagaccaacctactcggcactggatcaagcgcggggttgctttgctttgtcagttggatgactaaattggacaaatttataaaacatccaaaagttt

SEQ ID NO: 8982 - DNA, 9542 bp, Homo sapiens
  source 1..9542: mol_type = unassigned DNA
gcccttctccagctactcgtttgagagccggtggcgttccggaggtttctccctcgttatccccctgcctttcacctgaggagaggctctgactgtctctctctctctctggcgtctgcgcagcggggaagtagtgagaaacaatcagagtacagagtattttaatctttaggggatcaagatgtcagatgcaaacaaagctgccattgcagcagaaaaggaagctctgaacttgaagttaccccccattgtccatctcccagaaaacataggcgttgatacaccaacacaaagtaagctgctaaaatacagaagatccaaggagcagcagcagaaaattaatcagttagtaattgatggagccaaaagaaatttagacagaacactgggtaaaagaacacctctattaccaccacctgattatcctcaaactatgaccagtgaaatgaaaaaaaaaggattcaactatatttatatgaagcaatgtgtagaaagtagtcctttagtacctattcagcaggaatggctggatcacatgttaaggctgatacctgagtctttaaaggaagggaaagaaagagaagaacttcttgaaagtctcataaatgaggtgtcaagtgactttgaaaacagcatgaagagatatttggtgcagagcgttcttgtgaaaccaccagttaaatcgcttgaagatgaaggaggtcctttacctgaatctcctgtaggcctagattattctaatccttggcattctagctatgtgcaggcaagaaatcaaatattctctaatttgcacattattcatccaactatgaaaatgttactggaccttggttatacaacatttgctgatacagttttgttggacttcacaggaattagagctaaaggtccaattgactgtgaatcactgaaaactgatctatcaatacaaactagaaacgcagaagagaagataatgaatacatggtatccaaaggttataaatctctttaccaagaaggaggcactagaaggtgttaaacctgaaaaattggatgcattttatagctgtgtttccacacttatgtcaaatcagctaaaggatctattaaggagaactgtagaaggatttgtaaaactctttgacccaaaagatcaacaaaggctgccaatatttaagatagaattgacatttgatgacgacaaaatggaattttatcctacctttcaagatttggaagataatgtcttgagtttggtggaacgaatagccgaagctctgcagaatgtccaaacaatcccctcttggctatcaggaacttcaacaccagtaaatcttgacacagaacttcctgaacacgtgttacactgggctgttgatacactgaaggcagcagtacatcggaacttagaaggtgcaagaaagcattatgagacatatgttgaaaaatataattggctccttgatgggactgcagttgagaatatagagacttttcagacagaagatcatacttttgatgaatatacagagtttatagaaaaatttctcagtcttgcctcagaaataatgcttttgcctcagtggattcattacactatggtgcgtttggattgtgaagatttgaagacaggcctgacaaataaagcaaaagcctttgcaaacatattattaaatgacatagcttcaaaatatagaaaagaaaatgaatgtatttgcagtgaatttgaagcaattaaagaacatgcattaaaagtccctgaaacaacagaagagatgatggatctgatatcttatgtagaaaaagcccggactgtaggaatcgaagagttgattttaaggatccaggaatctaaacgccaaatgagttactttttagatgttttcctatttcctcaagaagacttagctttaaatgcaactgtcctcatgtggcctaggaaaattaatcccatctttgatgaaaatgatgagctaattgagaatgctaaacataaaaaagaaaatgaactaatggccaagagagagaaacttattttggaaatagaaaaagaatcacgccgcatggaggagtttacagaatttgcagagctggagcgcatgcaacagtatgtgacagatgtaagacaactacaaaaacgtattcaggaatctgaagaagcagtgcagtttattaataaagaagaggaacttttcaagtgggaattgacaaaatatcctgaactggataaattaaaagttaacattgagccctatcagaagttttttaattttgttttgaagtggcagcgatcagaaaaacggtggatggatggagggtttttggacctcaatggggaaagcatggaggctgatgtggaagagttttcccgagaaatttttaagacactaaaatttttccaaacgaagctaaagaaagaattacaagaaaaaagaaaggcagcaagaaaacggtctttggaagaagagaaaattgaagaagaaccaaaagacaatgctactattactatgtgcagaatgagagctcgtcactggaaacagatatcagaaattgtaggctatgacttgactccagactctggaactacactgagaaaagttttaaaattaaaccttaccccatacttggaacaatttgaagtgataagtgcaggtgcaagcaaggaattttcattagagaaagccatgaatacaatgataggaacttgggaagatattgcttttcatataagtctgtatcgtgacactggagtctgtattctttcttcggtggatgagattcaggccatccttgatgatcaaattataaaaactcagacaatgagaggctcacctttcatcaaaccatttgaacatgagatcaaggcctgggaggaccgcttgattcgaatacaagaaacaattgatgaatggttaaaagtacaagctcaatggctgtacttagagcccatcttttgttctgaggatatcatgcaacagatgccagaagaagggcgtcaatttcagacagtagacagacactggagagatatcatgaagttttgtgctaaagatccaaaggttcttgctgccacttctttaacaggtttattggaaaaactacagaactgcaatgaacttttggagaaaattatgaaaggtcttaacgcatatcttgaaaagaaacgtcttttcttccctcgttttttcttcttatctaatgatgaaatgttagagattttatcagagaccaaagatccacttagagttcagccacatttaaaaaaatgctttgagggcattgctaaattagagttccttcccaatttggacattaaagccatgtatagctctgagggcgagcgagtggagctgattgcactcatttccacgtctgcagcgcggggtgctgtggaaaagtggctcattcaagtggaagacctaatgctccggagtgttcacgatgtgatcgctgcagccaggctggcttatccagaatctgcaagaagagactgggttcgagagtggcctggccaagttgtactttgtatttctcaaatgttctggacatctgagacacaggaagtgataagtggcgggacggagggattaaagaagtattataaggaacttcagaaccaactgaatgagattgtagagctggtaagaggaaagttgtctaagcagaccaggaccactctgggggctttggttactattgatgtccatgctagagatgtggtcatggacatgattaaaatgggtgtctcacatgatacagatttcctgtggcttgctcagctccgatattattgggaaaatgagaatgcccgagttcgtatcattaattgcaatgtaaaatatgcttatgaatatcttggtaactcacctcgacttgtcattacgcctctaactgacaggtgttacagaacattgataggtgctttctatttaaaccttggaggtgctccagaggggccagcaggcacaggaaaaaccgaaaccaccaaggacttggctaaagctcttgctgtacagtgtgtggtgttcaactgttctgatgggctagattatctagcaatgggaaagttttttaaaggactggcttcttctggtgcttgggcttgctttgatgaattcaatcgaattgagttggaagtgttgtcagtggtagctcaacagatcctttgcattcagagagctattcaacagaagttggttgtgtttgtttttgaagggacagaacttaagctcaatccgaattgttttgtagctattaccatgaatcctggctatgcaggacgctctgaattgccggacaatcttaaggttctttttagaacagtggctatgatggttccaaactatgcgcttatagcagaaatctccctctactcttacggatttttgaatgcaagacctctgtctgtgaaaatagtaatgacctataggctttgctcagagcagctctcatcgcaatttcattacgactatggaatgcgagcagtaaaagccgttttagtggctgctggcaatctaaaactaaaatacccaaatgaaaatgaagatatacttcttcttcgatcaattaaagatgtaaatgaaccaaagtttttatcacatgatatacctttatttaatggaataactagtgacttatttcctggtattaaacttcctgaagctgactatcacgaatttttggaatgtgctcatgaagcctgcaatgtacataatcttcagcctgttaaattttttcttgaaaaaataattcaaacatatgaaatgatgattgttagacatggttttatgttagtaggagagccttttgctgctaagacaaaagttctgcatgtgctggcggatacgctaactttaatgaatgaacatggctatggagaggaagaaaaggtcatttatagaactgtaaaccccaaatctattactatgggccaactttttggacagtttgacccagtgtctcatgagtggactgatggtattgtggctaacacttttagagaatttgccttatcagaaacacctgaccggaaatgggttgtatttgatggtcctattgacactttgtggatagagagcatgaacacagtattggatgataataaaaagctttgccttatgagtggagaaatcattcagatgtccccccaaatgagcctcatctttgaaacaatggacctttcccaggcatcccctgccactgtaagtcgttgtggtatgatttatttggagccttcacagttaggatgggaaccacttgtgtcttcttggttgaattcactgaaaggacctctgtgtgaaccagaatatcaagctcttctgagaggactttttgcctggttaataccaccctctttaaaccagcgggttgaattattccagctaaactatttgtatacaaccatagtgtctaaaattttaaaaattctaattactttccgtatttcaaattattttaaatatgtgcctctaaaaactcaatgtacatttattaaattttttctccaccaacaggcttgctttatattctctttgatttggtcgattggaggaagttgtgatacagatggccgtcgtgtttttgatactttcatacgattaatcatactgggaaaagatgatgaaaacccagtgccagattctgtgggtaaatgggaatgcccatttgatgaaaaaggcctggtctatgactacatgtatgagttgaaaaacaaaggtcgctgggtccattggaatgaattaattaaaaatactaatttaggagataaacaaatcaagattcaagatatcatagtccctacgatggacacaattagatatacgtttctaatggatttgagtattacctatgcaaagccactcctttttgtgggtccaacgggtacaggaaaatctgtgtatgtgaaggataagctaatgaatcacttggaaaaggaccagtactttcctttttatattaacttatctgcacggaccagcgccaatcaggttcagaacattatcatggctagattggataaaagacgcaaaggagtctttggaccacctatgggaaagaagtgtataatttttatagatgatatgaatatgcctgcattggagaagtatggagctcaaccacctattgaattattacgacagttttttgactgtggacattggtacgaccttaaggacacaagtaaaatcacgctggtggacatagagctgattgctgcaatgggccctccaggtggtggaagaaatccagttactccccgttgtattcgacatttcaacatctgcagtattaattcttttagtgatgaaactatggtccgaatcttctcatctattgtagcattctaccttagaactcatgaatttcctccagagtactttgtaattgggaaccagatagtcaatgggactatggagatatataaacaatctgtggaaaatcttttacccactcccacaaaatcccattatactttcaacttgcgtgatttttcacgcgtcatccggggctgtttactcattgaaagagacgccgtggcgaacaaacacactatgatccgtctgtttgtgcatgaggttctccgagtgttttatgatcgcctcattaatgatgatgatcgaagatggctgttccagttaactaaaactgttataaaggaccattttaaagaatcatttcacagtatcttttcacatttgaggaaacaaaatgcaccagtaactgaagaagacttaagaaatctcatgtttggtgattatatgaatcctgaccttgaaggagatgatagagtttatattgaaattccaaatattcatcattttagtgatgttgtggaccagtgcttagatgagtataatcaaacacacaaaacaagaatgaatcttgtcatttttaggtatgttttggaacatttatcaagaatatgtcgagttctaaagcaatctggtggaaatgctttgcttgttggtcttggaggaagtggtcgtcaatctttaactcgtctggctacatccatggcaaaaatgcatattttccaaccagaaatttctaagagctatggtatgaatgaatggagagaggatatgaagagctttattgctgtcccggtgaccaacaggatagtggataacaaatccaagattttggaaaagcgcctacgatatttaaatgaccacttcacatacaacttatattgtaatatatgccgatcactatttgagaaggacaagctgttattttcctttttattatgtgccaatcttcttctggcaaggaaagagattgaataccaggaactgatgtttcttttaactggaggagtaagtcttaaaagtgctgagaaaaatcctgatccaacttggctacaggacaaaagctgggaggaaatctgtcgggcaagtgaatttcctgccttcagaggactcaggcaacatttttgtgaacatatatatgaatggcgagaaatctatgacagtaaagagccacataatgctaaatttccagcaccaatggataagaacctaaatgaactacagaaaataataattcttcggtgtttaagacctgataagataaccccagctataacaaactatgtaactgacaaactagggaaaaagtttgtagagcctccaccatttgatttgacaaagagttacttggattcaaattgcaccattcccttaatttttgttctatctccaggagcagatcctatggccagcctgctgaaatttgcaaatgataaatctatgtctggaaataagtttcaagctatttcactgggacagggacaaggaccgattgcagcaaaaatgattaaagcagcaattgaagaaggaacttgggtgtgcctacagaattgccatcttgcagtgtcctggatgcccatgttggaaaaaatatgtgaagattttacctctgaaacctgtaactcatcctttaggctttggctgacaagctatccatcttcaaaattcccagtaacaattctacagaatggagtaaaaatgactaatgaacctcccacgggtcttcggctgaatctccttcaatcatatctcactgatccagtttctgatcctgagtttttcaagggatgccgtggaaaggaactggcctgggagaagttactgtttggagtttgtttttttcatgcccttgtgcaagagagaaagaaatttggtcctcttggttggaatattccatatggatttaatgaatctgacttgcgcatcagtatccgacaactgcagttatttatcaatgaatatgatacaattccatttgaagctatatcttacctgactggggagtgtaattatggaggaagagtgacagacgattgggacagacgtcttctattaaccatgctggctgacttttataatctgtacatagttgaaaaccctcattataagttttctcccagtggaaactattttgcacctcctaaaggcacttatgaggactacattgaattcattaagaaacttccatttactcaacaccctgagatatttggattacatgaaaacgttgacatctccaaggatcttcaacaaacaaaaaccctctttgagtccttgctcctcacccagggaggctccaaacagacaggagcctcaggaagtactgatcagattctgttagaaattaccaaagatatcctcaacaagctccctagtgatttcgacattgaaatggcactacggaagtatcctgtgagatatgaagaaagcatgaatactgtgttagtacaagaaatggaaagatttaacaatttaattataactatacgtaacactctacgggaccttgaaaaagctattaagggtgtggttgtgatggattctgcattggaggcactctccggtagcttacttgttggaaaggttccagaaatatgggccaaacgttcatacccaagccttaagcccctgggaagttacatcacagatttcctagcccggttgaactttttacaggactggtataattcaggaaaaccttgtgtgttttggctgtcaggtttctttttcactcaggcctttttaactggagctatgcagaattatgccagaaaatataccacccctattgatttgctaggatatgaatttgaggttatcccatctgatacatctgacacatcaccagaagatggtgtttatatccacggactgtatctcgatggcgcacgctgggaccgagaaagtggattgcttgctgaacaatatcccaaacttctgtttgacctgatgcccatcatatggataaaaccaactcaaaaatctcggattataaagtcggatgcctatgtctgtcccctctacaagacaagtgaacgtaaaggaactctttccactacgggacattctactaactttgtcattgcaatgttgttaaaaacagaccaacctactcggcactggatcaagcgcggggttgctttgctttgtcagttggatgactaaattggacaaatttataaaacatccaaaagtttaaaaaaaaaaaaacctgtcctacttaaaatatatacattataaaaccaag

SEQ ID NO: 8983 - DNA, 2613 bp, Homo sapiens
  source 1..2613: mol_type = unassigned DNA
gcccttctccagctactcgtttgagagccggtggcgttccggaggtttctccctcgttatccccctgcctttcacctgaggagaggctctgactgtctctctctctctctggcgtctgcgcagcggggaagtagtgagaaacaatcagagtacagagtattttaatctttaggggatcaagatgtcagatgcaaacaaagctgccattgcagcagaaaaggaagctctgaacttgaagttaccccccattgtccatctcccagaaaacataggcgttgatacaccaacacaaagtaagctgctaaaatacagaagatccaaggagcagcagcagaaaattaatcagttagtaattgatggagccaaaagaaatttagacagaacactgggtaaaagaacacctctattaccaccacctgattatcctcaaactatgaccagtgaaatgaaaaaaaaaggattcaactatatttatatgaagcaatgtgtagaaagtagtcctttagtacctattcagcaggaatggctggatcacatgttaaggctgatacctgagtctttaaaggaagggaaagaaagagaagaacttcttgaaagtctcataaatgaggtgtcaagtgactttgaaaacagcatgaagagatatttggtgcagagcgttcttgtgaaaccaccagttaaatcgcttgaagatgaaggaggtcctttacctgaatctcctgtaggcctagattattctaatccttggcattctagctatgtgcaggcaagaaatcaaatattctctaatttgcacattattcatccaactatgaaaatgttactggaccttggttatacaacatttgctgatacagttttgttggacttcacaggaattagagctaaaggtccaattgactgtgaatcactgaaaactgatctatcaatacaaactagaaacgcagaagagaagataatgaatacatggtatccaaaggttataaatctctttaccaagaaggaggcactagaaggtgttaaacctgaaaaattggatgcattttatagctgtgtttccacacttatgtcaaatcagctaaaggatctattaaggagaactgtagaaggatttgtaaaactctttgacccaaaagatcaacaaaggctgccaatatttaagatagaattgacatttgatgacgacaaaatggaattttatcctacctttcaagatttggaagataatgtcttgagtttggtggaacgaatagccgaagctctgcagaatgtccaaacaatcccctcttggctatcaggaacttcaacaccagtaaatcttgacacagaacttcctgaacacgtgttacactgggctgttgatacactgaaggcagcagtacatcggaacttagaaggtgcaagaaagcattatgagacatatgttgaaaaatataattggctccttgatgggactgcagttgagaatatagagacttttcagacagaagatcatacttttgatgaatatacagagtttatagaaaaatttctcagtcttgcctcagaaataatgcttttgcctcagtggattcattacactatggtgcgtttggattgtgaagatttgaagacaggcctgacaaataaagcaaaagcctttgcaaacatattattaaatgacatagcttcaaaatatagaaaagaaaatgaatgtatttgcagtgaatttgaagcaattaaagaacatgcattaaaagtccctgaaacaacagaagagatgatggatctgatatcttatgtagaaaaagcccggactgtaggaatcgaagagttgattttaaggatccaggaatctaaacgccaaatgagttactttttagatgttttcctatttcctcaagaagacttagctttaaatgcaactgtcctcatgtggcctaggaaaattaatcccatctttgatgaaaatgatgagctaattgagaatgctaaacataaaaaagaaaatgaactaatggccaagagagagaaacttattttggaaatagaaaaagaatcacgccgcatggaggagtttacagaatttgcagagctggagcgcatgcaacagtatgtgacagatgtaagacaactacaaaaacgtattcaggaatctgaagaagcagtgcagtttattaataaagaagaggaacttttcaagtgggaattgacaaaatatcctgaactggataaattaaaagttaacattgagccctatcagaagttttttaattttgttttgaagtggcagcgatcagaaaaacggtggatggatggagggtttttggacctcaatggggaaagcatggaggctgatgtggaagagttttcccgagaaatttttaagacactaaaatttttccaaacgaagctaaagaaagaattacaagaaaaaagaaaggcagcaagaaaacggtctttggaagaagagaaaattgaagaagaaccaaaagacaatgctactattactatgtgcagtacagtcatggaacagataaaagcttttaaggtataaatatatataataacattttaatattatagctatcttctcaacttttctgttacctaatatataaattataaagccta

SEQ ID NO: 8984 - DNA, 929 bp, Homo sapiens
  source 1..929: mol_type = unassigned DNA
ccagttcctttatagttttgttcagaaaaacatatggagacgtttatacccattgatttgacaactgaaaatcaagagatggacaaggaggaaaccaagacaaaaccaagacttttaagatatgaagagaaaaaatatgaagatgtgaaaccattagagactcaaccagctgaaatagcagaaaaggaaacattggaatataaaacagttagaacattctctgaatctttgaagtcagagaaaacagaagattaccttagagaaagtataattcaacaacatatggtttctccagagccagcttcccttaaggagaaagggaagtcaaggagaaaaaaggatcaaactcatgcttgtccaaatgttaggaaagccaggcctgtgtcctatgatagaacagaaccaaaagatgatgatgtgataagaaatattattaggctacgagaaaagcttggttggcaaactatattaccgcagcacagtttgaaatacggaagctccaaaattgcaattcagaagattactttaaagaaacctttggaagatgatggagaatttgtttattgccttcctcggaaaagtcctaaatccctttacaatccatatgatcttcaggtagtatcggctcatactgctaaacattgcaaagaattttgggttattactgcttcatttatctcaaagagatacttggtcatttgtggagcagtttatatataagaatctccttgggagcatgttatttaatagtgaagtttttccttttgtgtagagatttaggtttgaagattcaactttaataaattttttcatctatcaaatactttgttaatacttggggtaaatttttacaggaagaactacaaaacaagcatttgctagcttaatgggaactataataataaagaaaagaatattctttattggca

SEQ ID NO: 8985 - DNA, 1103 bp, Homo sapiens
  source 1..1103: mol_type = unassigned DNA
aggcgtggctcttggtcaggcggttacggccaggaggcgtcggagcctggcgtggtagggctgtgctgcgcggtccttcccattcaccctagtctggcgctcgccggcgtgggcgggccggaccttcgccgcttccaggaagggccacaacggccgtcggaccacggcgcggcggccagttcctttatagttttgttcagaaaaacatatggagacgtttatacccattgatttgacaactgaaaatcaagagatggacaaggaggaaaccaagacaaaaccaagacttttaagatatgaagagaaaaaatatgaagatgtgaaaccattagagactcaaccagctgaaatagcagaaaaggaaacattggaatataaaacagttagaacattctctgaatctttgaagtcagagaaaacagaagattaccttagagaaagtataattcaacaacatatggtttctccagagccagcttcccttaaggagaaagggaagtcaaggagaaaaaaggatcaaactcatgcttgtccaaatgttaggaaagccaggcctgtgtcctatgatagaacagaaccaaaagatgatgatgtgataagaaatattattaggctacgagaaaagcttggttggcaaactatattaccgcagcacagtttgaaatacggaagctccaaaattgcaattcagaagattactttaaagaaacctttggaagatgatggagaatttgtttattgccttcctcggaaaagtcctaaatccctttacaatccatatgatcttcaggtagtatcggctcatactgctaaacattgcaaagaattttgggttattactgcttcatttatctcaaagagatacttggtcatttgtggagcagtttatatataagaatctccttgggagcatgttatttaatagtgaagtttttccttttgtgtagagatttaggtttgaagattcaactttaataaattttttcatctatcaaatactttgttaatacttggggtaaatttttacaggaagaactacaaaacaagcatttgctagcttaatgggaactataataataaagaaaagaatattctttattggc

SEQ ID NO: 8986 - DNA, 1984 bp, Homo sapiens
  source 1..1984: mol_type = unassigned DNA
ggctcttggtcaggcggttacggccaggaggcgtcggagcctggcgtggtagggctgtgctgcgcggtccttcccattcaccctagtctggcgctcgccggcgtgggcgggccggaccttcgccgcttccaggaagggccacaacggccgtcggaccacggcgcggcggccagttcctttatagttttgttcagaaaaacatatggagacgtttatacccattgatttgacaactgaaaatcaagagatggacaaggaggaaaccaagacaaaaccaagacttttaagatatgaagagaaaaaatatgaagatgtgaaaccattagagactcaaccagctgaaatagcagaaaaggaaacattggaatataaaacagttagaacattctctgaatctttgaagtcagagaaaacagaagattaccttagagaaagtataattcaacaacatatggtttctccagagccagcttcccttaaggagaaagggaagtcaaggagaaaaaaggatcaaactcatgcttgtccaaatgttaggaaagccaggcctgtgtcctatgatagaacagaaccaaaagatgatgatgtgataagaaatattattaggctacgagaaaagcttggttggcaaactatattaccgcagcacagtttgaaatacggaagctccaaaattgcaattcagaagattactttaaagaaacctttggaagatgatggagaatttgtttattgccttcctcggaaaagtcctaaatccctttacaatccatatgatcttcaggtagtatcggctcatactgctaaacattgcaaagaattttgggttattactgcttcatttatctcaaaggttattaatatagttggtagtgtaaaggaagtagaactcatacctactttggaatggctatcagaaagaagacattactatttattacggcaattcaagatattttctgatttccgaatgaataaagcatttgttacctggaaattgaatgttaaaagaattaagacagagaagagcaggtcatttttgtaccaccatctttttttggctgatgacttgtttcaaacctgtttggtttatataagaggactttgtgaagatgcaattaatctcaaaaattataatgaccatgaaaataatctatctgccatatgccttgtaaagctggatagttctcgaacatattctctagatgaattttgtgaagagcagttacagcaagctacccaggcattgaaacaacttgaggacatcaggaataaagcaatttcagagatgaaaagtacttttctaaaggttgcagaaaagaatgaaatcaaagagtattttgagtcaaaactctctgaagatgacacaacacatttcaagctgcctaaatatagacgtttattagaaacatttttcaagtttgtaatgctggttgactacatatttcaggaactcattcgtcaacttatgaacactgcagtcacactacttttggaattatttaatggttctgctggaatgccattttcagtggaaaaaaagaatgaaaatcttatcaggtaaattacttttttgaagtcaaaaagtaacttacaattataatattttaacattgccacatatggaggaaatattcaataatttaagctagagtttgaaaattctccttgtggcagagtacatgtactcatttttgctattaacagaacttattatttggtaataccttacttaatatcggtgctataggatgcgcagtaaaatttgaatttcacataaatggtaaataattttagtatacttcaagtattacctatgttaaaattattgtttatctgaaattcagatttctctgataatttagcaaatatattttttatttgttatatctggcaattctgtgcctaagtatactctgtcttccaggttcagagttagtttttaaagatatgtgagaattctggaaggagctacaaagtccaa

SEQ ID NO: 8987 - DNA, 13788 bp, Homo sapiens
  source 1..13788: mol_type = unassigned DNA
agggcgcaggcgtggctcttggtcaggcggttacggccaggaggcgtcggagcctggcgtggtagggctgtgctgcgcggtccttcccattcaccctagtctggcgctcgccggcgtgggcgggccggaccttcgccgcttccaggaagggccacaacggccgtcggaccacggcgcggcggccagttcctttatagttttgttcagaaaaacatatggagacgtttatacccattgatttgacaactgaaaatcaagagatggacaaggaggaaaccaagacaaaaccaagacttttaagatatgaagagaaaaaatatgaagatgtgaaaccattagagactcaaccagctgaaatagcagaaaaggaaacattggaatataaaacagttagaacattctctgaatctttgaagtcagagaaaacagaagattaccttagagaaagtataattcaacaacatatggtttctccagagccagcttcccttaaggagaaagggaagtcaaggagaaaaaaggatcaaactcatgcttgtccaaatgttaggaaagccaggcctgtgtcctatgatagaacagaaccaaaagatgatgatgtgataagaaatattattaggctacgagaaaagcttggttggcaaactatattaccgcagcacagtttgaaatacggaagctccaaaattgcaattcagaagattactttaaagaaacctttggaagatgatggagaatttgtttattgccttcctcggaaaagtcctaaatccctttacaatccatatgatcttcaggtagtatcggctcatactgctaaacattgcaaagaattttgggttattactgcttcatttatctcaaaggttattaatatagttggtagtgtaaaggaagtagaactcatacctactttggaatggctatcagaaagaagacattactatttattacggcaattcaagatattttctgatttccgaatgaataaagcatttgttacctggaaattgaatgttaaaagaattaagacagagaagagcaggtcatttttgtaccaccatctttttttggctgatgacttgtttcaaacctgtttggtttatataagaggactttgtgaagatgcaattaatctcaaaaattataatgaccatgaaaataatctatctgccatatgccttgtaaagctggatagttctcgaacatattctctagatgaattttgtgaagagcagttacagcaagctacccaggcattgaaacaacttgaggacatcaggaataaagcaatttcagagatgaaaagtacttttctaaaggttgcagaaaagaatgaaatcaaagagtattttgagtcaaaactctctgaagatgacacaacacatttcaagctgcctaaatatagacgtttattagaaacatttttcaagtttgtaatgctggttgactacatatttcaggaactcattcgtcaacttatgaacactgcagtcacactacttttggaattatttaatggttctgctggaatgccattttcagtggaaaaaaagaatgaaaatcttatcagaacattcaaggacaactcttttcctactggaaagacaacaaatgattgtgaagaacttgttgataattcaaagttacatgctatttctgttcaaaagtcagaagtaaaaacagacactgatattaatgagattttgaatagtgttgaagtggggaaggatttgagaaaaacatatgcaccaatatttgaagtaaatctatgcttgagaattcctgctgagagtgattcttcagaaaattctaaagagaactttcatgagtctgaccagtgccctgaagagtgtgtgatgtttgaagatgaaatgtcagaaaataaagacaattgtgtcaaaaaacactcaagtgaagaattgctcccaaaagccaagaaatcaaaagaaattagttacaatcttgaagatattatttcagacacagaaattgagactgagtttgagaataaatacatgtattatgaatttccagaatttcctacaaatctctttatagatcccaacagattggagttttcagtaaaaattcaaaatatgttgactaatatggaaaaatgtataaccacaattactcctctttgccaagatccccagctgtctatcttcattgatttggtttcaataatggatttacctaataagacaggaagcataatacattataaagagcagaccagatggccagattgtcacatcctttttgaaacagatcctgcctaccaaaatataattgtgaatctcctgactattattggtaattcaatgggcctagttaatgcttacagccacaagtttataaagtattgtaccatgacagaaaaggccaaaatcatgagtatgaaaatatcatctatgggagaattaacttcaaaagaatttgaagctattctaaatagattcagaaactattttagacatattgtgaatatggccattgagaagcgtattggtattttcaacgttgtaagtcttgattatcaatcagaatgcttactgtatattgacaacgtcatacatatgagccacaccctcatacaatctgtaattgaaaaaaagaacaaaaatttattggaagttgtggaatcatcattgcagcagctggaatgtgatcccactgaaatagaagaatttctggagcattttatttttttgaatgcaatttcctcaaaaatatctaaattagaaaaagagttcttaacaatgtctcagctatattctgttgcaaagcatcaccagatccatatttcagaagagcaaattgccatattccaagttcttcttcttaagtttagtcaactaaaatcatctatgaagttaagtaaaataaataaagacactgctataactaaattcagagataacttggaagcatgtatcagtggtctacatgttgatgttggcaatttaaaagccaagataagaactcctcttctgttatgtgctggtactcaagtgtcaacagcaatggaaatgatccagactctctcaggggaagctgcaagtttaactaacaaagctaaagcatattcacattatcaggattgtttcagtgattctcaatctcatatgcattctgttaatgtggaagaaattacacagattgtgctttcagagatctctgacattgaaggtgacttgactttgaggaaaaaactatgggaagcacaagaggagtggaagcgagcctcttgggaatggaggaatagttctcttcaaagtattgatgtagaatcagtacagagaaatgtttcaaaactgatgcacataatctcggtactagaaaaaggtttacctaaaagcgatatggtaacacatcttaagcaagtggtaacagagtttaaacaagagctgcctatcattatagctctgggaaatccctgtctcaagccaaggcattgggaggctctccaggagattattgggaagtcagttccgcttgataaaaactgtaaagtagagaatcttctagctctcaagatgtttcagtatgaaaatgaaataaatgatatgtcaacctcagcaactaatgaagctgctcttgaaaaaatgctatttaagattattgatttttggaacactactcctttgcctttaattcttcaccacacagagatttactctatcttcataattccatctatagatgacatatcagctcagttagaagagtctcaagtcatacttgcaacaattaaaggatctccccacattgggcccattaaggatcttgtgaatgaatgggatcaaaacttgactctcttctcttacacccttgaggaatggatgaattgtcaaagaaattggctttatcttgaaccagtctttcattcttcagaaatacgaaggcaactcccagcagaaacagaacttttctctcaagtgatttccatgtggaaaaaaataatgtcaaaaatacaaaacaaacagaatgctttgcagataaccacttctgcaggagtccttgaaattctgcaaaattgtaatatacatcttgaacatataaagaaaagccttgaggattaccttgaagttaaaagattaattttcccaagattttactttcttagcaatgccgagcttcttgatattctagctgatagcagaaatcctgagtctgtacagcctcatcttgtgaaatgctttgaaaatataaaacaattattgatatggaaacaagacattggccctcctgctgtaaaaatgctaatatctgctgaaggggaaggtctcgtgctgccaaagaaaattcgtgtaagaagtgctgtagaacagtggctggtaaatgtagaaaaaagcatgttcgatgtgctaaaaaaagagagatatatatataacattatcttactttttcagagccagatcatgttttataatgattgtgttaaaagttttgtgagttcttattcaagagaaaaattggaaaaagtccacgctggtctgatgtgtcatctagaagaggttgcagacctggtagtgctggatactagtaactctcgaacaaaagctatactaggggcattgcttatcctttatgttcactgcagagatatagtgataaatttactacttaaaaatatcttcaatgcagaggattttgagtggacaagacatttgcaatataaatggaatgaaaaacaaaagttgtgctatgtgtctcaaggaaatgccagctttacttatggctatgagtacttgggctgtacctcaagattggttattacgcctctcacagaccgatgctggctgactctcatggaagcactacacttgaatctaggaggctgtcctgccggtccagctggtacaggaaaaactgagactgtcaaagatctagcaaaatccttaggcaaacattgtgtggtcttcaactgttttgaggatttggattataagatagtgagaaaatttttctttggactagttcagtcaggagcatggagttgttttgatgaattcaatctaattgatttggaagttctctctgtcattgcctcacagatcctaacaattaaggctgcaaaagacaactattctgccaggtttgtactggaaggaaaagaaattcgtatcaatatgtcttgtgcggtatttatcaccatgaatcccagatacggaggtggagtagagctcccagataacttaaaatctctgtttcgcccagtggcaatgatggtgccccattatcaaatgattgctgaaataatattgttttcatttggtttcaaatctgcaaattcactctctggaaagctaactaacctttatgaattagcgcgcaaacagctctcacaacaggatcattataattttggcttgagatctctgaagatagttttaataatggctggaacgaagaaacgggagtttaaatgtctttctgaagcagatgaaaccttgattgttatcgaggctataagagaagctagtttgccaaaatgtcctcctgaagatgtcccactttttgaaaatattataggagatatttttccagaagtgacagttttgaaagtaaatcaacttgccttggagaaagtaatatatactgcaactcagcaattgggtttacaaaactggtcatctcagaaagagaagattatacagttttataatcaacttcaggtttgtgttggtgtgatgttagtgggcccaacaggtggaggaaagacaacagtcagaagaattttggaaaaagcattaacgctattaccaattgcagacttcttatcagttgcagaaagaaaatctgcttcaaagatttcagaaagaaaaggaaaagtagatatttgtgttttaaatccaaagtgtgtcactctcagtgaactatatggacaactggatcctaatactatggaatggactgatggattattatcagcaacaattcgaagttatgtatattttaacacaccaaagaacacaaagaaagacattgatctcagactaaagtcaagaatctcagatttatccaatgttttcaaacttgattcctctgatacaacagagactgatgataatatttttgaggagatagagaaagttgttaaaattccagaaaatcacaattttgattggcagtggattatcctagatggcccagtggacaccttttgggtagaaaatctgaactctgtgctagatgatactagaacattgtgcctagcaaacagtgagagaatagctttaactaataaaataagagtgatttttgaagtggacaatctctctcaggccagtcctgctactgtcagccgatgtgccatggtctatatggatcctgttgatctgggatgggaaccttatgttaagtcatggcttctgaaaacttctaaaattataagtcaatcaggagtggattgtcttgaattcatgattaaaaatagtgtcacagacggactacaatttataaggaatcgtcagaaatttcagccatatcctatggaggacataacagtcgtcataaccctctgcagaattcttgatgctttctttgacttcatgggtaaaaatggaggatttgaacaaagtgatgatttgaatgacacgtcatctaaggaggcaaattcccaaagagagtctgtcacattcaaggatatagaaaagagggatgaaaatacatggtatccagagaaaaatcctgataaattaacaaaaattattcaaaagctttttgtgtttgcctttacttgggcatttggaggagctttaaaccgtgaagatgaacacagagaaaatataccattttgtcccagtcttgaacctgattctcttgcaaaagtaacatacgattttgacaaacttgttcatgaattatttggaaacagttcacaagtaggatggaagcactggggtcagtcacagggcagacggagaaaggggaactgcatcaacctaccaactggtgaatgttccatctttggatattttgtggatatagagcaatgtgaattcataccttggtcagatttagttcctaatgatcagacactaattcaaagaggaacttcattactaactaatcttcaaagatctggcggaaacttcttgaagataacagaatgtggagaatgcattaattataccgctaccagagacacaacatgcctttcttttctcatgagccttcttttaaagaattcctgccctgtacttctcacaggagaatctggtgttgggaaaactgctgccattaatcaaatgcttgaaaagctagagggtccaggagcatttgacataaaacatggttcaattttaggagacaccctattatatagtgaaataaaaaaatcaagtagcctaaaacagaatatcaccatcttgattcctgaaactcataagacagcaactggaagttcagataatcccactaaaaagccagaagttagaactaataaaaagttacttaaaaataatgatcataaaggagttgtagtctctacaataaattttagcaccaatgtaacagctgccaaaaccaaggagatgattcttaagaagttaataagaagaactaaagatactcttggagcaccaaaaaacaaccggattctaatatttattgatgatatgaatatgccagtatcagatatgtatggagcacagccacccctggaattgataagacaattgttagatttgggaggagtttatgatactgaaaaaaatacatggaagaatattcaagatctgtctatagttgcagcttgtgttccagttgtgaatgatatcagcccacgtcttctcaaacacttttccatgctggtattacctcatccttcacaagacatcttatgtactattttccaggctcatttgggaatttatttctccatcaataacttcacacctgaagttcagaaaagtaaggatcagataatatcttgttccctagctatataccatcaagtacgtcagaatatgttaccaactccaacaaaatgtcactacatgtttaatcttcgagatatgtttaagcttctcctaggattgctgcaagctgacaggactgttgttaactccaaagagatggctgctctgctctttgttcatgaagccacccgagtatttcacgatcgcttaattgatttcactgataaaagccttttctatcggttgctttcaagggaacttgagaactgttttcagattggaatagatggatgtgggaaaaaaacatgtgcaaccttggcctgttatttgacagataataaactataccgagtgcctatatctcacaaatgtgcctacatcgaattcaaagaagtctttaaaaaggtgtttattcacgcaggattaaaagggaaacccactgttctgatggttcccaatttaaacatagaacaagactcatttttagaagatttgaactacatcatcagttcaggaagaatacctgacctgtttgaaaatgttgagctggattctattgcaatgaaaatcagatatcttactgaacaatctggtcatatggataataggcaatctttactttcattctttcaaaagagaatatataaaaatcttcatatttttgtgatcatgagtcctgaaggacctagcttccgccaaaattgtagagtgtatccttctatgattagctcctgcacgatcgattggtatgagaggtggccagaagaagctctccttattgtagctaactcattcttaaaagaaaaggtcaattttgagaacagagagaacttgaaagaaaaacttgccccaacatgtgtccaaatccacaaaagcatgaaagacttgaacagaaaatactttgaagaaactggaagattttattataccactcccaatagctacttgcaatttatggaaacatttgcacacattttgagggcacgagaggaagagatgcaaacaaagagggatcgcttccatatgggtctatccacaatcctggaagcaaccactctagttacagaaatgcaagaagagctcttgattcttggccctcaagtagaacaaaaaacaaaggaaacagaaactctaatggaaaaactacggaaagattcacaagtagttgagaaagttcagatgcttgttaaacaggatgaagaaattgtggcagaagaagtaagaattgtggaagattatgctcagaaaactgccaatgaactaaaaagtgtgctgccagcctttgacaaggcaattgtggctctgaatgccctggataaagctgatgtcgctgaattaagagtatacacacggcctcccttccttgtactgactgtcatgaatgcagtgtgtattcttctgcaaaagaaacctaactgggcaacggcaaagttacttctttcagaaactggtttcctgaaaaaattgattaaccttgacaaggacagcatacctgataaggttttcgtgaagctaaaaaaaattgtaaccttacctgatttcaacccacacaagatttcgctggtttctgttgcttgttgctccctgtgccagtgggttatagctttgaataactaccatgaagtacagaaggttgtgggccctaaacaaatccaagtagctgaagctcaaaacgtccttaaaattgcgcgacaaagacttgctgagaaacaaagaggtttacagctggttgaagaacatttgctgtttttacaggcagcttacaaagataccgttgctgaaaaacaactattagcaaatcggaaaacaatggccagcaggcgctttcagtgtgcgtcagtcttactaactgtcctggaagatgagaagactcgatggcaagaaacaatcaatcaaatagataacaaattagaaggaattttgggtgacatacttctttcagcagcgtgcattgtctacagtggaattttaacaccagaatttcgccagttgattgtgaataaatgggagacattctgcattgaaaatggcatttctttgtcttccaaattctctttaattaaagttatggcacaaaaatatgagatcagccgatggcataatcagggactgcctcatggtcagtattcagtagagaatgccatcttgatcaagaatggccagcagtggccactgctgattgacccacataggcaagctcacaaatggatccgtcagatggaaggatccaggctgcagaagctctccattgaagacagcaattataccaaaaaaattgaaaatgctatgaagacaggagggagtgtcctcctgcagaatctccttgagacattagctccaggcttaaaggcaattctgaaaaaggatatctatcagaaaaaaggacactatttcataagggttggtgatgctgagttcgaatacaattcaaattttaggttatacttatctacagaaatagacaacccccattttcttccatcagtttataactttgttactatgatcaacttcactgtaacattccaaggtttgcaagatcaactcttgtctactgtggtaactcatgaagttcctcatttagaagatcaacgttccaagttactggagagtatttcccttgatgccataactcttgaagaactagaggaaaaaacattaaatttactgcagaaagcactaggatccatattagatgatgacaaaattgtagataccttaagaaaatccaaaatgacatcaaacgaaatttcaaagcgcatcgaagcaacaaaaaaagctgaaagtgaaatccaagcaatacgtaaaaactatctccccattgcgacccgaggcgccctgctctacttcctagtagctgatctcacacaaatcaactacatgtaccagttctccctagactggtttcatcaggtttttgtttcatcagtagtttccaaaagcaaagaacaagaacatagttttaaaagggagaaagtgtctccaaaagaagttcatgagtttataagtatttcaaaagaacccaacctggaaaatgagaaaaatctcttagataagcatattaaaagtgcaatagacatgttgacaaaaagtatttttaaggtggtttcttcagctctatttaatgaagataaactttgcttctcttttcggctttgcactgtaatcatgcaaaacaatgctaatggaaatctaatacaggatgacattggattcctaccagaagaagaatggaacatctttttatattctggcatattgataaatattaaaagtgcattatcccagtctagacttactagcacatttgaaataggtgaaagtcaacatcttcagtggctgtcagattccaggtggaggcagtgccaatatgtcagcactcacctggaaccattttcacttctgtgcaaatcccttttatcaaacgtatcacaatgggatacttttaagaacagtaaagcagtttattctctgatcagcacacctttctcttcagaaaatgcttcattggaggaaaatacaaaaccaccagaggaaactgaacttttgaatgaaaataaagaaacgtgtaatcctataaattttccctgggagaaactcacttcatttcaaagacttattttggtaaaagttcttagaccagaaagtttaaacaattcagtgagaaagtttataactgaaaaaatgggaaataagtatcttcaaagaactggagttaatttgaaagatgcatataaaggatccaatgccagaactccgctgatacttattcaaactcatgggatcgaccttaccaatatcctcctgagatttgcacaagagttaaaaggaacaacacatcatgtgaccataatttctctgggccgtgaccaagcagctaaagctgaagacctcattttaaaggcactaacaaaaacacaacaatgggtcttcctccagaactgccatcttgcaacatcatttatgccaaggctttgcacaattgtagaatcttttaatagtccaaacgtgacaatagaccctgagtttcggctatggttaagctcaaaatcatacagttcttttccaattcctgttcttaaaaagggtttaaagattgccgtggaatctccccagggattgaaaagtaacttacttcagacatttggatgtactgggagtggagaggtaacagaagagatatttgaaaatcctgactgtggacaatggtggaaaaaacttttatttagcctatgttttttcaatgctgtaatcaatgaaagaaaaaattacggaatattgggctggaatattgcttataaatttaattcttcagacttgggggttgccattaaggtgttggaaaattccctgagaggacagcccagcatttcgtggcaagcactgcgctacctgattggagaagtgatttacggtggccgggtgattgataattgggacaagcgatgcttgaagaccctactctacaaattttgtaatcctgaagtgctgaaagatgacttcagtttctccagatctgcaagcataaaggactacatacacattatccagtccttacctgatgatgaccttcccgaggtcttaggaatacacccagaggccatcaggagctgctgggagacccagggcgaaaagtttattgaaaatctgattgccatgcaaccaaaaactaccactgccaacctcatgatcagacctgagcagagtaaggatgaactggtgatggaaattctatccgacttgctaaagcggctgccactgacagtggagaaagaagaaattgctgttggaactccaagcacattgaagagcatgatgtcaagctccatttgggagtctctttctaaaaatctcaaagatcacgacccccttatccattgtgtcttgctaacctttttgaagcaagaaattaaacgatttgataagttattatttgtcatacataaatccttaaaagatcttcagcttgctataaaaggagagatcatcctcacccaagaattggaggaaatatttaactcttttcttaatatgagagtgcctacattgtggcagaaacacgcctacagatcttgtaagccactgagttcctggattgatgatctcatccagcgactgaatttcttcaatacttgggccaaagtggcttatactgcaatacagcgtcggtatatgagatttgtcacagtttggaagcagtctattccatcaactagccaaaaatgcaaacaccctgaggattcagagaacaatttctttgaagggtttccttcaagatactggctcccagctttcttctttccacaagcctttcttgctgctgtgcttcaagactatgggaggtcccgaggaatcgctgtggatgccctcaccttcacccaccatgtgatttccaacaccactgacaaggatgagaagttctccgtatttatgccaaagaaactcaacatagtcaggagagcgtttaagggctcagcttcctctcacactggagtttacatttttggtttattcatcgagggggcaagatggaatcgtgaacagaaaatactggaagactcgctgcctctggagatgtgctgtgattttcccgacatatactttttgccaacaaagatttctaccaaaacaccaaatgcttccaaccagacagattcagaactctatgcttttgaatgcccagtttaccagacacctgagaggtcaagaattttggcaactaccggtttaccaacaaactttttaacatcagtgtatttatcaacgaagaaacctcctagtcactggatcacaatgcgggttgcattgctttgtgagaagaatgaaaaataaatgtccatatcaaaccattttaatt

SEQ ID NO: 8988 - DNA, 13548 bp, Homo sapiens
  source 1..13548: mol_type = unassigned DNA
atggagacgtttatacccattgatttgacaactgaaaatcaagagatggacaaggaggaaaccaagacaaaaccaagacttttaagatatgaagagaaaaaatatgaagatgtgaaaccattagagactcaaccagctgaaatagcagaaaaggaaacattggaatataaaacagttagaacattctctgaatctttgaagtcagagaaaacagaagattaccttagagaaagtataattcaacaacatatggtttctccagagccagcttcccttaaggagaaagggaagtcaaggagaaaaaaggatcaaactcatgcttgtccaaatgttaggaaagccaggcctgtgtcctatgatagaacagaaccaaaagatgatgatgtgataagaaatattattaggctacgagaaaagcttggttggcaaactatattaccgcagcacagtttgaaatacggaagctccaaaattgcaattcagaagattactttaaagaaacctttggaagatgatggagaatttgtttattgccttcctcggaaaagtcctaaatccctttacaatccatatgatcttcaggtagtatcggctcatactgctaaacattgcaaagaattttgggttattactgcttcatttatctcaaaggttattaatatagttggtagtgtaaaggaagtagaactcatacctactttggaatggctatcagaaagaagacattactatttattacggcaattcaagatattttctgatttccgaatgaataaagcatttgttacctggaaattgaatgttaaaagaattaagacagagaagagcaggtcatttttgtaccaccatctttttttggctgatgacttgtttcaaacctgtttggtttatataagaggactttgtgaagatgcaattaatctcaaaaattataatgaccatgaaaataatctatctgccatatgccttgtaaagctggatagttctcgaacatattctctagatgaattttgtgaagagcagttacagcaagctacccaggcattgaaacaacttgaggacatcaggaataaagcaatttcagagatgaaaagtacttttctaaaggttgcagaaaagaatgaaatcaaagagtattttgagtcaaaactctctgaagatgacacaacacatttcaagctgcctaaatatagacgtttattagaaacatttttcaagtttgtaatgctggttgactacatatttcaggaactcattcgtcaacttatgaacactgcagtcacactacttttggaattatttaatggttctgctggaatgccattttcagtggaaaaaaagaatgaaaatcttatcagaacattcaaggacaactcttttcctactggaaagacaacaaatgattgtgaagaacttgttgataattcaaagttacatgctatttctgttcaaaagtcagaagtaaaaacagacactgatattaatgagattttgaatagtgttgaagtggggaaggatttgagaaaaacatatgcaccaatatttgaagtaaatctatgcttgagaattcctgctgagagtgattcttcagaaaattctaaagagaactttcatgagtctgaccagtgccctgaagagtgtgtgatgtttgaagatgaaatgtcagaaaataaagacaattgtgtcaaaaaacactcaagtgaagaattgctcccaaaagccaagaaatcaaaagaaattagttacaatcttgaagatattatttcagacacagaaattgagactgagtttgagaataaatacatgtattatgaatttccagaatttcctacaaatctctttatagatcccaacagattggagttttcagtaaaaattcaaaatatgttgactaatatggaaaaatgtataaccacaattactcctctttgccaagatccccagctgtctatcttcattgatttggtttcaataatggatttacctaataagacaggaagcataatacattataaagagcagaccagatggccagattgtcacatcctttttgaaacagatcctgcctaccaaaatataattgtgaatctcctgactattattggtaattcaatgggcctagttaatgcttacagccacaagtttataaagtattgtaccatgacagaaaaggccaaaatcatgagtatgaaaatatcatctatgggagaattaacttcaaaagaatttgaagctattctaaatagattcagaaactattttagacatattgtgaatatggccattgagaagcgtattggtattttcaacgttgtaagtcttgattatcaatcagaatgcttactgtatattgacaacgtcatacatatgagccacaccctcatacaatctgtaattgaaaaaaagaacaaaaatttattggaagttgtggaatcatcattgcagcagctggaatgtgatcccactgaaatagaagaatttctggagcattttatttttttgaatgcaatttcctcaaaaatatctaaattagaaaaagagttcttaacaatgtctcagctatattctgttgcaaagcatcaccagatccatatttcagaagagcaaattgccatattccaagttcttcttcttaagtttagtcaactaaaatcatctatgaagttaagtaaaataaataaagacactgctataactaaattcagagataacttggaagcatgtatcagtggtctacatgttgatgttggcaatttaaaagccaagataagaactcctcttctgttatgtgctggtactcaagtgtcaacagcaatggaaatgatccagactctctcaggggaagctgcaagtttaactaacaaagctaaagcatattcacattatcaggattgtttcagtgattctcaatctcatatgcattctgttaatgtggaagaaattacacagattgtgctttcagagatctctgacattgaaggtgacttgactttgaggaaaaaactatgggaagcacaagaggagtggaagcgagcctcttgggaatggaggaatagttctcttcaaagtattgatgtagaatcagtacagagaaatgtttcaaaactgatgcacataatctcggtactagaaaaaggtttacctaaaagcgatatggtaacacatcttaagcaagtggtaacagagtttaaacaagagctgcctatcattatagctctgggaaatccctgtctcaagccaaggcattgggaggctctccaggagattattgggaagtcagttccgcttgataaaaactgtaaagtagagaatcttctagctctcaagatgtttcagtatgaaaatgaaataaatgatatgtcaacctcagcaactaatgaagctgctcttgaaaaaatgctatttaagattattgatttttggaacactactcctttgcctttaattcttcaccacacagagatttactctatcttcataattccatctatagatgacatatcagctcagttagaagagtctcaagtcatacttgcaacaattaaaggatctccccacattgggcccattaaggatcttgtgaatgaatgggatcaaaacttgactctcttctcttacacccttgaggaatggatgaattgtcaaagaaattggctttatcttgaaccagtctttcattcttcagaaatacgaaggcaactcccagcagaaacagaacttttctctcaagtgatttccatgtggaaaaaaataatgtcaaaaatacaaaacaaacagaatgctttgcagataaccacttctgcaggagtccttgaaattctgcaaaattgtaatatacatcttgaacatataaagaaaagccttgaggattaccttgaagttaaaagattaattttcccaagattttactttcttagcaatgccgagcttcttgatattctagctgatagcagaaatcctgagtctgtacagcctcatcttgtgaaatgctttgaaaatataaaacaattattgatatggaaacaagacattggccctcctgctgtaaaaatgctaatatctgctgaaggggaaggtctcgtgctgccaaagaaaattcgtgtaagaagtgctgtagaacagtggctggtaaatgtagaaaaaagcatgttcgatgtgctaaaaaaagagagatatatatataacattatcttactttttcagagccagatcatgttttataatgattgtgttaaaagttttgtgagttcttattcaagagaaaaattggaaaaagtccacgctggtctgatgtgtcatctagaagaggttgcagacctggtagtgctggatactagtaactctcgaacaaaagctatactaggggcattgcttatcctttatgttcactgcagagatatagtgataaatttactacttaaaaatatcttcaatgcagaggattttgagtggacaagacatttgcaatataaatggaatgaaaaacaaaagttgtgctatgtgtctcaaggaaatgccagctttacttatggctatgagtacttgggctgtacctcaagattggttattacgcctctcacagaccgatgctggctgactctcatggaagcactacacttgaatctaggaggctgtcctgccggtccagctggtacaggaaaaactgagactgtcaaagatctagcaaaatccttaggcaaacattgtgtggtcttcaactgttttgaggatttggattataagatagtgagaaaatttttctttggactagttcagtcaggagcatggagttgttttgatgaattcaatctaattgatttggaagttctctctgtcattgcctcacagatcctaacaattaaggctgcaaaagacaactattctgccaggtttgtactggaaggaaaagaaattcgtatcaatatgtcttgtgcggtatttatcaccatgaatcccagatacggaggtggagtagagctcccagataacttaaaatctctgtttcgcccagtggcaatgatggtgccccattatcaaatgattgctgaaataatattgttttcatttggtttcaaatctgcaaattcactctctggaaagctaactaacctttatgaattagcgcgcaaacagctctcacaacaggatcattataattttggcttgagatctctgaagatagttttaataatggctggaacgaagaaacgggagtttaaatgtctttctgaagcagatgaaaccttgattgttatcgaggctataagagaagctagtttgccaaaatgtcctcctgaagatgtcccactttttgaaaatattataggagatatttttccagaagtgacagttttgaaagtaaatcaacttgccttggagaaagtaatatatactgcaactcagcaattgggtttacaaaactggtcatctcagaaagagaagattatacagttttataatcaacttcaggtttgtgttggtgtgatgttagtgggcccaacaggtggaggaaagacaacagtcagaagaattttggaaaaagcattaacgctattaccaattgcagacttcttatcagttgcagaaagaaaatctgcttcaaagatttcagaaagaaaaggaaaagtagatatttgtgttttaaatccaaagtgtgtcactctcagtgaactatatggacaactggatcctaatactatggaatggactgatggattattatcagcaacaattcgaagttatgtatattttaacacaccaaagaacacaaagaaagacattgatctcagactaaagtcaagaatctcagatttatccaatgttttcaaacttgattcctctgatacaacagagactgatgataatatttttgaggagatagagaaagttgttaaaattccagaaaatcacaattttgattggcagtggattatcctagatggcccagtggacaccttttgggtagaaaatctgaactctgtgctagatgatactagaacattgtgcctagcaaacagtgagagaatagctttaactaataaaataagagtgatttttgaagtggacaatctctctcaggccagtcctgctactgtcagccgatgtgccatggtctatatggatcctgttgatctgggatgggaaccttatgttaagtcatggcttctgaaaacttctaaaattataagtcaatcaggagtggattgtcttgaattcatgattaaaaatagtgtcacagacggactacaatttataaggaatcgtcagaaatttcagccatatcctatggaggacataacagtcgtcataaccctctgcagaattcttgatgctttctttgacttcatgggtaaaaatggaggatttgaacaaagtgatgatttgaatgacacgtcatctaaggaggcaaattcccaaagagagtctgtcacattcaaggatatagaaaagagggatgaaaatacatggtatccagagaaaaatcctgataaattaacaaaaattattcaaaagctttttgtgtttgcctttacttgggcatttggaggagctttaaaccgtgaagatgaacacagagaaaatataccattttgtcccagtcttgaacctgattctcttgcaaaagtaacatacgattttgacaaacttgttcatgaattatttggaaacagttcacaagtaggatggaagcactggggtcagtcacagggcagacggagaaaggggaactgcatcaacctaccaactggtgaatgttccatctttggatattttgtggatatagagcaatgtgaattcataccttggtcagatttagttcctaatgatcagacactaattcaaagaggaacttcattactaactaatcttcaaagatctggcggaaacttcttgaagataacagaatgtggagaatgcattaattataccgctaccagagacacaacatgcctttcttttctcatgagccttcttttaaagaattcctgccctgtacttctcacaggagaatctggtgttgggaaaactgctgccattaatcaaatgcttgaaaagctagagggtccaggagcatttgacataaaacatggttcaattttaggagacaccctattatatagtgaaataaaaaaatcaagtagcctaaaacagaatatcaccatcttgattcctgaaactcataagacagcaactggaagttcagataatcccactaaaaagccagaagttagaactaataaaaagttacttaaaaataatgatcataaaggagttgtagtctctacaataaattttagcaccaatgtaacagctgccaaaaccaaggagatgattcttaagaagttaataagaagaactaaagatactcttggagcaccaaaaaacaaccggattctaatatttattgatgatatgaatatgccagtatcagatatgtatggagcacagccacccctggaattgataagacaattgttagatttgggaggagtttatgatactgaaaaaaatacatggaagaatattcaagatctgtctatagttgcagcttgtgttccagttgtgaatgatatcagcccacgtcttctcaaacacttttccatgctggtattacctcatccttcacaagacatcttatgtactattttccaggctcatttgggaatttatttctccatcaataacttcacacctgaagttcagaaaagtaaggatcagataatatcttgttccctagctatataccatcaagtacgtcagaatatgttaccaactccaacaaaatgtcactacatgtttaatcttcgagatatgtttaagcttctcctaggattgctgcaagctgacaggactgttgttaactccaaagagatggctgctctgctctttgttcatgaagccacccgagtatttcacgatcgcttaattgatttcactgataaaagccttttctatcggttgctttcaagggaacttgagaactgttttcagattggaatagatggatgtgggaaaaaaacatgtgcaaccttggcctgttatttgacagataataaactataccgagtgcctatatctcacaaatgtgcctacatcgaattcaaagaagtctttaaaaaggtgtttattcacgcaggattaaaagggaaacccactgttctgatggttcccaatttaaacatagaacaagactcatttttagaagatttgaactacatcatcagttcaggaagaatacctgacctgtttgaaaatgttgagctggattctattgcaatgaaaatcagatatcttactgaacaatctggtcatatggataataggcaatctttactttcattctttcaaaagagaatatataaaaatcttcatatttttgtgatcatgagtcctgaaggacctagcttccgccaaaattgtagagtgtatccttctatgattagctcctgcacgatcgattggtatgagaggtggccagaagaagctctccttattgtagctaactcattcttaaaagaaaaggtcaattttgagaacagagagaacttgaaagaaaaacttgccccaacatgtgtccaaatccacaaaagcatgaaagacttgaacagaaaatactttgaagaaactggaagattttattataccactcccaatagctacttgcaatttatggaaacatttgcacacattttgagggcacgagaggaagagatgcaaacaaagagggatcgcttccatatgggtctatccacaatcctggaagcaaccactctagttacagaaatgcaagaagagctcttgattcttggccctcaagtagaacaaaaaacaaaggaaacagaaactctaatggaaaaactacggaaagattcacaagtagttgagaaagttcagatgcttgttaaacaggatgaagaaattgtggcagaagaagtaagaattgtggaagattatgctcagaaaactgccaatgaactaaaaagtgtgctgccagcctttgacaaggcaattgtggctctgaatgccctggataaagctgatgtcgctgaattaagagtatacacacggcctcccttccttgtactgactgtcatgaatgcagtgtgtattcttctgcaaaagaaacctaactgggcaacggcaaagttacttctttcagaaactggtttcctgaaaaaattgattaaccttgacaaggacagcatacctgataaggttttcgtgaagctaaaaaaaattgtaaccttacctgatttcaacccacacaagatttcgctggtttctgttgcttgttgctccctgtgccagtgggttatagctttgaataactaccatgaagtacagaaggttgtgggccctaaacaaatccaagtagctgaagctcaaaacgtccttaaaattgcgcgacaaagacttgctgagaaacaaagaggtttacagctggttgaagaacatttgctgtttttacaggcagcttacaaagataccgttgctgaaaaacaactattagcaaatcggaaaacaatggccagcaggcgctttcagtgtgcgtcagtcttactaactgtcctggaagatgagaagactcgatggcaagaaacaatcaatcaaatagataacaaattagaaggaattttgggtgacatacttctttcagcagcgtgcattgtctacagtggaattttaacaccagaatttcgccagttgattgtgaataaatgggagacattctgcattgaaaatggcatttctttgtcttccaaattctctttaattaaagttatggcacaaaaatatgagatcagccgatggcataatcagggactgcctcatggtcagtattcagtagagaatgccatcttgatcaagaatggccagcagtggccactgctgattgacccacataggcaagctcacaaatggatccgtcagatggaaggatccaggctgcagaagctctccattgaagacagcaattataccaaaaaaattgaaaatgctatgaagacaggagggagtgtcctcctgcagaatctccttgagacattagctccaggcttaaaggcaattctgaaaaaggatatctatcagaaaaaaggacactatttcataagggttggtgatgctgagttcgaatacaattcaaattttaggttatacttatctacagaaatagacaacccccattttcttccatcagtttataactttgttactatgatcaacttcactgtaacattccaaggtttgcaagatcaactcttgtctactgtggtaactcatgaagttcctcatttagaagatcaacgttccaagttactggagagtatttcccttgatgccataactcttgaagaactagaggaaaaaacattaaatttactgcagaaagcactaggatccatattagatgatgacaaaattgtagataccttaagaaaatccaaaatgacatcaaacgaaatttcaaagcgcatcgaagcaacaaaaaaagctgaaagtgaaatccaagcaatacgtaaaaactatctccccattgcgacccgaggcgccctgctctacttcctagtagctgatctcacacaaatcaactacatgtaccagttctccctagactggtttcatcaggtttttgtttcatcagtagtttccaaaagcaaagaacaagaacatagttttaaaagggagaaagtgtctccaaaagaagttcatgagtttataagtatttcaaaagaacccaacctggaaaatgagaaaaatctcttagataagcatattaaaagtgcaatagacatgttgacaaaaagtatttttaaggtggtttcttcagctctatttaatgaagataaactttgcttctcttttcggctttgcactgtaatcatgcaaaacaatgctaatggaaatctaatacaggatgacattggattcctaccagaagaagaatggaacatctttttatattctggcatattgataaatattaaaagtgcattatcccagtctagacttactagcacatttgaaataggtgaaagtcaacatcttcagtggctgtcagattccaggtggaggcagtgccaatatgtcagcactcacctggaaccattttcacttctgtgcaaatcccttttatcaaacgtatcacaatgggatacttttaagaacagtaaagcagtttattctctgatcagcacacctttctcttcagaaaatgcttcattggaggaaaatacaaaaccaccagaggaaactgaacttttgaatgaaaataaagaaacgtgtaatcctataaattttccctgggagaaactcacttcatttcaaagacttattttggtaaaagttcttagaccagaaagtttaaacaattcagtgagaaagtttataactgaaaaaatgggaaataagtatcttcaaagaactggagttaatttgaaagatgcatataaaggatccaatgccagaactccgctgatacttattcaaactcatgggatcgaccttaccaatatcctcctgagatttgcacaagagttaaaaggaacaacacatcatgtgaccataatttctctgggccgtgaccaagcagctaaagctgaagacctcattttaaaggcactaacaaaaacacaacaatgggtcttcctccagaactgccatcttgcaacatcatttatgccaaggctttgcacaattgtagaatcttttaatagtccaaacgtgacaatagaccctgagtttcggctatggttaagctcaaaatcatacagttcttttccaattcctgttcttaaaaagggtttaaagattgccgtggaatctccccagggattgaaaagtaacttacttcagacatttggatgtactgggagtggagaggtaacagaagagatatttgaaaatcctgactgtggacaatggtggaaaaaacttttatttagcctatgttttttcaatgctgtaatcaatgaaagaaaaaattacggaatattgggctggaatattgcttataaatttaattcttcagacttgggggttgccattaaggtgttggaaaattccctgagaggacagcccagcatttcgtggcaagcactgcgctacctgattggagaagtgatttacggtggccgggtgattgataattgggacaagcgatgcttgaagaccctactctacaaattttgtaatcctgaagtgctgaaagatgacttcagtttctccagatctgcaagcataaaggactacatacacattatccagtccttacctgatgatgaccttcccgaggtcttaggaatacacccagaggccatcaggagctgctgggagacccagggcgaaaagtttattgaaaatctgattgccatgcaaccaaaaactaccactgccaacctcatgatcagacctgagcagagtaaggatgaactggtgatggaaattctatccgacttgctaaagcggctgccactgacagtggagaaagaagaaattgctgttggaactccaagcacattgaagagcatgatgtcaagctccatttgggagtctctttctaaaaatctcaaagatcacgacccccttatccattgtgtcttgctaacctttttgaagcaagaaattaaacgatttgataagttattatttgtcatacataaatccttaaaagatcttcagcttgctataaaaggagagatcatcctcacccaagaattggaggaaatatttaactcttttcttaatatgagagtgcctacattgtggcagaaacacgcctacagatcttgtaagccactgagttcctggattgatgatctcatccagcgactgaatttcttcaatacttgggccaaagtggcttatactgcaatacagcgtcggtatatgagatttgtcacagtttggaagcagtctattccatcaactagccaaaaatgcaaacaccctgaggattcagagaacaatttctttgaagggtttccttcaagatactggctcccagctttcttctttccacaagcctttcttgctgctgtgcttcaagactatgggaggtcccgaggaatcgctgtggatgccctcaccttcacccaccatgtgatttccaacaccactgacaaggatgagaagttctccgtatttatgccaaagaaactcaacatagtcaggagagcgtttaagggctcagcttcctctcacactggagtttacatttttggtttattcatcgagggggcaagatggaatcgtgaacagaaaatactggaagactcgctgcctctggagatgtgctgtgattttcccgacatatactttttgccaacaaagatttctaccaaaacaccaaatgcttccaaccagacagattcagaactctatgcttttgaatgcccagtttaccagacacctgagaggtcaagaattttggcaactaccggtttaccaacaaactttttaacatcagtgtatttatcaacgaagaaacctcctagtcactggatcacaatgcgggttgcattgctttgtgagaagaatgaaaaataa

SEQ ID NO: 8989 - DNA, 10524 bp, Homo sapiens
  source 1..10524: mol_type = unassigned DNA
atggggaggcgatcacagtggatctgggctatgaggtgtcagatgctggtaccagtcctaagtctgcacataggactggctcgtgctctgggatgtggctgcattgcttccaagatagaatgcctcataagatgtaatgcaccctttcctctgctggatgctgttggttctgtggcatcacaggagttgcagtctctgactggcaccgtcggtgtcacatcgggggccgccgcgtacccgcggtggaatctcgcaagagccagggcccctcctcacctgcccggcacccaggatcccttgcgccgcgttcgggaccccacccccattgtggcctcttcgccagggcgcaggcgtggctcttggtcaggcggttacggccaggaggcgtcggagcctggcgtggtagggctgtgctgcgcggtccttcccattcaccctagtctggcgctcgccggcgtgggcgggccggaccttcgccgcttccaggaagggccacaacggccgtcggaccacggcgcggcggaaaaacatatggagacgtttatacccattgatttgacaactgaaaatcaagagatggacaaggaggaaaccaagacaaaaccaagacttttaagatatgaagagaaaaaatatgaagatgtgaaaccattagagactcaaccagctgaaatagcagaaaaggaaacattggaatataaaacagttagaacattctctgaatctttgaagtcagagaaaacagaagaaccaaaagatgatgatgtgataagaaatattattaggctacgagaaaagcttggttggcaaactatattaccgcagcacagtttgaaatacggaagctccaaaattgcaattcagaagattactttaaagaaacctttggaagatgatggagaatttgtttattgccttcctcggaaaagtcctaaatccctttacaatccatatgatcttcaggtagtatcggctcatactgctaaacattgcaaagaattttgggttattactgcttcatttatctcaaagctggatagttctcgaacatattctctagatgaattttgtgaagagcagttacagcaagctacccaggcattgaaacaacttgaggacatcaggaataaagcaatttcagagatgaaaagtacttttctaaaggttgcagaaaagaatgaaatcaaagagtattttgagtcaaaactctctgaagatgacacaacacatttcaagctgcctaaatatagacgtttattagaaacatttttcaagtttgtaatgctggttgactacatatttcaggaactcattcgtcaacttatgaacactgcagtcacactacttttggaattatttaatggttctgctggaatgccattttcagtggaaaaaaagaatgaaaatcttatcagaacattcaaggacaactcttttcctactggaaagacaacaaatgattgtgaagaacttgttgataattcaaagttacatgctatttctgttcaaaagtcagaagtaaaaacagacactgatattaatgagattttgaatagtgttgaagtggggaaggatttgagaaaaacatatgcaccaatatttgaagtaaatctatgcttgagaattcctgctgagagtgattcttcagaaaattctaaagagaactttcatgagtctgaccagtgccctgaagagtgtgtgatgtttgaagatgaaatgtcagaaaataaagacaattgtgtcaaaaaacactcaagtgaagaattgctcccaaaagccaagaaatcaaaagaaattagttacaatcttgaagatattatttcagccacaattactcctctttgccaagatccccagctgtctatcttcattgatttggtttcaataatggatttacctaataagacaggaagcataatacattataaagagcagaccagatggccagattgtcacatcctttttgaaacagatcctgcctaccaaaatataattgtgaatctcctgactattattggtaattcaatgggcctagttaatgcttacagccacaagtttataaagtattgtaccatgacagaaaaggccaaaatcatgagtatgaaaatatcatctatgggagaattaacttcaaaagaatttgaagctattctaaatagattcagaaactattttagacatattgtgaatatggccattgagaagcgtattggtattttcaacgttgttgtggaatcatcattgcagcagctggaatgtgatcccactgaaatagaagaatttctggagcattttatttttttgaatgcaatttcctcaaaaatatctaaattagaaaaagagttcttaacaatgtctcagctatattctgttgcaaagcatcaccagatccatatttcagaagagcaaattgccatattccaagttcttcttcttaagtttagtcaactaaaatcatctatgaagttaagtaaaataaataaagacactgctataactaaattcagagataacttggaagcatgtatcagtggtctacatgttgatgttggcaatttaaaagccaagataagaactcctcttctgttatgtgctggtactcaagtgtcaacagcaatggaaatgatccagactctctcaggggaagctgcaagtttaactaacaaagctaaagcatattcacattatcaggattgtttcagtgattctcaatctcatatgcattctgttaatgtggaagaaattacacagattgtgctttcagagatctctgacattgaaggtgacttgactttgaggaaaaaactatgggaagcacaagaggagtggaagcgagcctcttgggaatggaggaatagttctcttcaaagtattgatgtagaatcagtacagagaaatgtttcaaaactgatgcacataatctcggtactagaaaaagagatttactctatcttcataattccatctatagatgacatatcagctcagttagaagagtctcaagtcatacttgcaacaattaaaggatctccccacattgggcccattaagagccagatcatgttttataatgattgtgttaaaagttttgtgagttcttattcaagagaaaaattggaaaaagtccacgctggtctgatgtgtcatctagaagaggttgcagacctggtagtgctggatactagtaactctcgaacaaaagctatactaggggcattgcttatcctttatgttcactgcagagatatagtgataaatttactacttaaaaatatcttcaatgcagaggattttgagtggacaagacatttgcaatataaatggaatgaaaaacaaaagttgtgctatgtgtctcaaggaaatgccagctttacttatggctatgagtacttgggctgtacctcaagattggttattacgcctctcacagaccgatgctggctgactctcatggaagcactacacttgaatctaggaggctgtcctgccggtccagctggtacaggaaaaactgagactgtcaaagatctagcaaaatgtgctctgtttgcatttaaatgtaacacagccttaataaagcttccaaactcacttatagttttaacatgctttggactagagaaaacagtgctagtgatgaatactgtaatgtcttttaggtttgtactggaaggaaaagaaattcgtatcaatatgtcttgtgcggtatttatcaccatgaatcccagatacggaggtggagtagagctcccagataacttaaaatctctgtttcgcccagtggcaatgatggtgccccattatcaaatgattgctgaaataatattgttttcatttggtttcaaatctgcaaattcactctctggaaagctaactaacctttatgaattagcgcgcaaacagctctcacaacaggatcattataattttggcttgagatctctgaagatagttttaataatggctggaacgaagaaacgggagtttaaatgtgataccagtgacagtctttctgaagcagatgaaaccttgattgttatcgaggctataagagaagctagtttgccaaaatgtcctcctgaagatgtcccactttttgaaaatattataggagatatttttccagaagtgacagttttgaaagtaaatcaacttgccttggagaaagtaatatatactgcaactcagcaattgggtttacaaaactggtcatctcagaaagagaagattatacagttttataatcaacttcaggtttgtgttggtgtgatgttagtgggcccaacaggtggaggaaagacaacagtcagaagaattttggaaaaagcattaacgctattaccaattgcagacttcttatcagttgcagaaagaaaatctgcttcaaagatttcagaaagaaaaggaaaagtagatatttgtgttttaaatccaaagtgtgtcactctcagtgaactatatggacaactggatcctaatactatggaatggactgatggattattatcagcaacaattcgaagttatgtatattttaacacaccaaagaacacaaagaaagacattgatctcagactaaagtcaagaatctcagatttatccaatgttttcaaacttgattcctctgatacaacagagactgatgataatatttttgaggagatagagaaagttgttaaaattccagaaaatcacaattttgattggcagtggattatcctagatggcccagtggacaccttttgggtagaaaatctgaactctgtgctagatgatactagaacattgtgcctagcaaacagtgagagaatagctttaactaataaaataagagtgatttttgaagtggacaatctctctcaggccagtcctgctactgtcagccgatgtgccatggtctatatggatcctgttgatctgggatgggaaccttatgttaagtcatggcttctgaaaacttctaaaattataagtcaatcaggagtggattgtcttgaattcatgattaaaaatagtgtcacagacggactacaatttataaggaatcgtcagaaatttcagccatatcctatggaggacataacagtcgtcataaccctctgcagaattcttgatgctttctttgacttcatgggtaaaaatggaggatttgaacaaagtgatgatttgaatgacacgtcatctaaggaggcaaattcccaaagagagtctgtcacattcaaggatatagaaaagagggatgaaaatacatggtatccagagaaaaatcctgataaattaacaaaaattattcaaaagctttttgtgtttgcctttacttgggcatttggaggagctttaaaccgtgaagatgaacacagagaaaatataccattttgtcccagtcttgaacctgattctcttgcaaaagtaacatacgattttgacaaacttgttcatgaattatttggaaacagttcacaagtaggcatcaacctaccaactggtgaatgttccatctttggatattttgtggatatagagcaatgtgaattcataccttggtcagatttagttcctaatgatcagacactaattcaaagagataatcccactaaaaagccagaagttagaactaataaaaagttacttaaaaataatgatcataaaggagttgtagtctctacaataaattttagcaccaatgtaacagctgccaaaaccaaggagatgattcttaagaagttaataagaagaactaaagatactcttggagcaccaaaaaacaaccggattctaatatttattgatgatatgaatatgccagtatcagatatgtatggagcacagccacccctggaattgataagacaattgttagatttgggaggagtttatgatactgaaaaaaatacatggaagaatattcaagatctgtctatagttgcagcttgtgttccagttgtgaatgatatcagcccacgtcttctcaaacacttttccatgctggtattacctcatccttcacaagacatcttatgtactattttccagattggaatagatggatgtgggaaaaaaacatgtgcaaccttggcctgttatttgacagataataaactataccgagtgcctatatctcacaaatgtgcctacatcgaattcaaagaagtctttaaaaaggtgtttattcacgcaggattaaaagggaaacccactgttctgatggttcccaatttaaacatagaacaagactcatttttagaagatttgaactacatcatcagttcaggaagaatacctgacctgtttgaaaatgttgagctggattctattgcaatgaaaatcagatatcttactgaacaatctggtcatatggataataggcaatctttactttcattctttcaaaagagaatatataaaaatcttcatatttttgtgatcatgagtcctgaaggacctagcttccgccaaaattgtagagtgtatccttctatgattagctcctgcacgatcgattggtatgagaggtggccagaagaagctctccttattgtagctaactcattcttaaaagaaaaggtcaattttgagaacagagagaacttgaaagaaaaacttgccccaacatgtgtccaaatccacaaaagcatgaaagacttgaacagaaaatactttgaagaaactggaagattttattataccactcccaatagctacttgcaatttatggaaacatttgcacacattttgagggcacgagaggaagagatgcaaacaaagagggatcgcttccatatgggtctatccacaatcctggaagcaaccactctagttacagaaatgcaagaagagctcttgattcttggccctcaagtagaacaaaaaacaaaggaaacagaaactctaatggaaaaactacggaaagattcacaagtagttgagaaagttcagatgcttgttaaacaggatgaagaaattgtggcagaagaagtaagaattgtggaagattatgctcagaaaactgccaatgaactaaaaagtgtgctgccagcctttgacaaggcaattgtggctctgaatgccctggataaagctgatgtcgctgaattaagagtatacacacggcctcccttccttgtactgactgtcatgaatgcagtgtgtattcttctgcaaaagaaacctaactgggcaacggcaaagttacttctttcagaaactggtttcctgaaaaaattgattaaccttgacaaggacagcatacctgataaggttttcgtgaagctaaaaaaaattgtaaccttacctgatttcaacccacacaagatttcgctggtttctgttgcttgttgctccctgtgccagtgggttatagctttgaataactaccatgaagtacagaaggttgtgggccctaaacaaatccaagtagctgaagctcaaaacgtccttaaaattgcgcgacaaagacttgctgagaaacaaagaggtttacagctgatcagccgatggcataatcagggactgcctcatggtcagtattcagtagagaatgccatcttgatcaagaatggccagcagtggccactgctgattgacccacataggcaagctcacaaatggatccgtcagatggaaggatccaggctgcagaagctctccattgaagacagcaattataccaaaaaaattgaaaatgctatgaagacaggagggagtgtcctcctgcagtcctgtcaagcttctacatggaggaaaaagttatacttatctacagaaatagacaacccccattttcttccatcagtttataactttgttactatgatcaacttcactgtaacattccaaggtttgcaagatcaactcttgtctactgtggtaactcatgaagttcctcatttagaagatcaacgttccaagttactggagagtatttcccttgatgccataactcttgaagaactagaggaaaaaacattaaatttactgcagaaagcactaggatccatattagatgatgacaaaattgtagataccttaagaaaatccaaaatgacatcaaacgaaatttcaaagcgcatcgaagcaacaaaaaaagctgaaagtgaaatccaagcaatacgtaaaaactatctccccattgcgacccgaggcgccctgctctacttcctagtagctgatctcacacaaatcaactacatgtaccagttctccctagactggtttcatcaggtttttgtttcatcagtagtttccaaaagcaaagaacaagaacatagttttaaaagggagaaagtgtctccaaaagaagttcatgagtttataagtatttcaaaagaacccaacctggaaaatgagaaaaatctcttagataagcatattaaaagtgcaatagacatgttgacaaaaagtatttttaaggtggtttcttcagctctatttaatgaagataaactttgcttctcttttcggctttgcactgtaatcatgcaaaacaatgctaatggaaatctaatacaggatgacattggattcctaccagaagaagaatggaacatctttttatattctggcatattgataaatattaaaagtgcattatcccagtctagacttactagcacatttgaaataggtgaaagtcaacatcttcagtggctgtcagattccaggtggaggcagtgccaatatgtcagcactcacctggaaccattttcacttctgtgcaaatcccttttatcaaacgtatcacaatgggatacttttaagaacagtaaagcagtttattctctgatcagcacacctttctcttcagaaaatgcttcattggaggaaaatacaaaaccaccagaggaaaaacatactttctgcctgcttctccgtgccataaaccatacaggaacagaccttggtcctgtagggagaggccaatggctgaccagcactgcttgtgacaggcacactgacgtgtgtagcttcagttttgctttaaatgatggagtcccagatgttgaacatgttcaggacatattttatggtcattgtgtagacaaatatcatgtaaaagttcttagaccagaaagtttaaacaattcagtgagaaagtttataactgaaaaaatgggaaataagtatcttcaaagaactggagttaatttgaaagatgcatataaaggatccaatgccagaactccgctgatacttattcaaactcatggatctgcaagcataaaggactacatacacattatccagtccttacctgatgatgaccttcccgaggtcttaggaatacacccagaggccatcaggagctgctgggagacccagggcgaaaagtttattgaaaatctgattgccatgcaaccaaaaactaccactgccaacctcatgatcagacctgagcagagtaaggatgaactggtgatggaaattctatccgacttgctaaagcggctgccactgacagtggagaaagaagaaattgctgttggaactccaagcacattgaagagcatgatgtcaagctccatttgggagtctctttctaaaaatctcaaagatcacgacccccttatccattgtgtcttgctaacctttttgaagcaagaaattaaacgatttgataagttattatttgtcatacataaatccttaaaagatcttcagcttgctataaaaggagagatcatcctcacccaagaattggaggaaatatttaactcttttcttaatatgagagtgcctacattgtggcagaaacacgcctacagatcttgtaagccactgagttcctggattgatgatctcatccagcgactgaatttcttcaatacttgggccaaagtggcttatactgcaatacagcgtcggtatatgagatttgtcacagtttggaagcagtctattccatcaactagccaaaaatgcaaacaccctgaggattcagagaacaatttctttgaagggtttccttcaagatactggctcccagctttcttctttccacaagcctttcttgctgctgtgcttcaagactatgggaggtcccgaggaatcgctgtggatgccctcaccttcacccaccatgtgatttccaacaccactgacaaggatgagaagttctccgtatttatgccaaagaaactcaacatagtcaggagagcgtttaagggctcagcttcctctcacactggagtttacatttttggtttattcatcgagggggcaagatggaatcgtgaacagaaaatactggaagactcgctgcctctggagatgtgctgtgattttcccgacatatactttttgccaacaaagatttctaccaaaacaccaaatgcttccaaccagacagattcagaactctatgcttttgaatgcccagtttaccagacacctgagaggtcaagaattttggcaactaccggtttaccaacaaactttttaacatcagtgtatttatcaacgaagaaacctcctagtcactggatcacaatgcgggttgcattgctttgtgagaagaatgaaaaataa

SEQ ID NO: 8990 - DNA, 2633 bp, Homo sapiens
  source 1..2633: mol_type = unassigned DNA
gttttgcctgcacgatgtccagcaaagctgagaagaagcagcgattgagtggccgaggaagctcccaggcaagctggtcagggcgggccactcgggctgctgtggccacacaggagcaggggaatgccccggctgtcagtgagccagagctgcaggctgagctccccaaggaggagcctgagccacggttggagggacctcaagcacagagtgaagaatcagtggagcccgaggcagatgtgaagcccctcttcctttcccgagctgcgctgacaggactggcggatgcagtgtggacacaggagcatgatgccattctggaacactttgcccaggaccctacagaatccatcctcaccatcttcattgacccttgttttgggctgaagctagagctgggcatgcctgtacagacccagaaccagcttgtctacttcattcgccaagcaccagttcccatcacctgggagaacttcgaggcaactgtgcagtttgggacggtgcggggcccctatatcccggccctgcttcggctgctcggtggagtctttgcccctcagatctttgcaaacacaggctggcctgagagcattagaaatcattttgcttctcatctgcacaagttcttggcctgcctgacagacactcggtacaaactggaggggcacacggtcctctacatccctgcagaggccatgaacatgaagcctgagatggtgataaaggacaaagagctggtgcaacggctagagacctccatgatccactggacccggcagataaaggagatgctcagtgcccaggagactgtggagacaggagaaaatttaggtcctctggaggagattgagttctggcgcaaccgatgcatggacctgtctggcatcagtaagcagctggtgaagaagggagtgaagcacgttgaatccatcctgcaccttgccaagtcgtcctacttggcgccctttatgaaactggcacagcagatccaggatggctctcgtcaagcacagtcaaacctgacctttttgtcaatcctgaaggaaccttaccaggagttggctttcatgaagcccaaggacatctctagcaagctccctaagctgatcagtctcatccgcatcatctgggtcaactctccccactacaacactcgggagagactgacctcgctcttccgaaagatgagcaatgagatcatccgcttatgctgccacgccatctccctggaccggatctttgagggatatgtctcttccagcaaggaggacctgcaaggctgcattctctgttgtcacgcttggaaagatcactacgtacaggctgtgcagatgcacatccagttctccagtcggggctgggtcctagatcagaccagcatctttgctcaggttgatgcctttgtgcagcgctgcaaggaccttattgaggtatgtgactgtcagtatcacttcgcccgctgggaagatggcaagcagggtccccttccttgcttctttggtgcccaggggccacagataacacggaacttgctggagattgaggacatctttcataaaaatctgcacacgctgcgagccgttcgcgggggtatcctggatgtcaagaacacctgttggcatgaagactacaataagttccgtgccggaatcaaggacctggaggtgatgacccagaacctgatcacctcagccttcgagttggtgcgggacgtgccgcacggcgtgcttctgctggacaccttccacaggcttgcctcccgcgaggctatcaagcggacttatgacaagaaggcggtggatctctacatgctgttcaatagcgagctggccctggtgaaccgtgaacggaacaagaaatggccagacctggagccctacgtggcccagtattccggaaaggcgcgctgggtgcacatcctccggcgtcgcatcgacagagtcatgacctgccttgctggtgctcatttcctgccccgtattgggactggaaaggagagtgtgcacacctatcagcagatggtccaggccattgatgagctggttcgaaaaaccttccaagagtggacatcaagtctggacaaggattgcattcggcggttggataccccattgctgcgaatcagccaggagaaggcgggcatgctggatgtcaactttgacaagtacaggagccacctggccccttttccctatactccccttctgcagctctcccaagaatttcactcccatcttttgactcctctcttcattattctctctctttctcatacaatatgtttgctatcgtcattttacttttttttttcttcttttatttttgtctctccccacctcccaccctgctatcaacattttaattttacaacttatcttaaaacacaacaaaacaaaacaatgatcggccaggcacggtggctcacacctgtaatcccagcactttgggaggctgaggtgggcgcatcgcttgagcccaggagtttgagaacagcctgggcaacatggcaaaacccagtctctgcaaaaaatacaaagattagctgggcgtggtggcacaagcctgtagtctcagctacttgggagggtgaggtgggaggatcgcctgagcccgggaggcagaggctgcagtga

SEQ ID NO: 8991 - DNA, 12602 bp, Homo sapiens
  source 1..12602: mol_type = unassigned DNA
gttttgcctgcacgatgtccagcaaagctgagaagaagcagcgattgagtggccgaggaagctcccaggcaagctggtcagggcgggccactcgggctgctgtggccacacaggagcaggggaatgccccggctgtcagtgagccagagctgcaggctgagctccccaaggaggagcctgagccacggttggagggacctcaagcacagagtgaagaatcagtggagcccgaggcagatgtgaagcccctcttcctttcccgagctgcgctgacaggactggcggatgcagtgtggacacaggagcatgatgccattctggaacactttgcccaggaccctacagaatccatcctcaccatcttcattgacccttgttttgggctgaagctagagctgggcatgcctgtacagacccagaaccagcttgtctacttcattcgccaagcaccagttcccatcacctgggagaacttcgaggcaactgtgcagtttgggacggtgcggggcccctatatcccggccctgcttcggctgctcggtggagtctttgcccctcagatctttgcaaacacaggctggcctgagagcattagaaatcattttgcttctcatctgcacaagttcttggcctgcctgacagacactcggtacaaactggaggggcacacggtcctctacatccctgcagaggccatgaacatgaagcctgagatggtgataaaggacaaagagctggtgcaacggctagagacctccatgatccactggacccggcagataaaggagatgctcagtgcccaggagactgtggagacaggagaaaatttaggtcctctggaggagattgagttctggcgcaaccgatgcatggacctgtctggcatcagtaagcagctggtgaagaagggagtgaagcacgttgaatccatcctgcaccttgccaagtcgtcctacttggcgccctttatgaaactggcacagcagatccaggatggctctcgtcaagcacagtcaaacctgacctttttgtcaatcctgaaggaaccttaccaggagttggctttcatgaagcccaaggacatctctagcaagctccctaagctgatcagtctcatccgcatcatctgggtcaactctccccactacaacactcgggagagactgacctcgctcttccgaaaggtatgtgactgtcagtatcacttcgcccgctgggaagatggcaagcagggtccccttccttgcttctttggtgcccaggggccacagataacacggaacttgctggagattgaggacatctttcataaaaatctgcacacgctgcgagccgttcgcgggggtatcctggatgtcaagaacacctgttggcatgaagactacaataagttccgtgccggaatcaaggacctggaggtgatgacccagaacctgatcacctcagccttcgagttggtgcgggacgtgccgcacggcgtgcttctgctggacaccttccacaggcttgcctcccgcgaggctatcaagcggacttatgacaagaaggcggtggatctctacatgctgttcaatagcgagctggccctggtgaaccgtgaacggaacaagaaatggccagacctggagccctacgtggcccagtattccggaaaggcgcgctgggtgcacatcctccggcgtcgcatcgacagagtcatgacctgccttgctggtgctcatttcctgccccgtattgggactggaaaggagagtgtgcacacctatcagcagatggtccaggccattgatgagctggttcgaaaaaccttccaagagtggacatcaagtctggacaaggattgcattcggcggttggataccccattgctgcgaatcagccaggagaaggcgggcatgctggatgtcaactttgacaagtcccttctgattctctttgcggaaattgactactgggagcggctgctgtttgagacgccccattacgtggtgaacgtagctgagcgagccgaggacctgcgcattctgcgtgaaaatctgctactcgttgctagagactacaataggattattgccatgctgtccccagatgagcaggccctattcaaagagcgtattcggctcctggataagaagatccacccgggactcaagaaactgcactgggccttgaagggggccagtgccttcttcatcacggagtgccgtatacatgccagcaaggtgcagatgattgtgaatgagttcaaggcatccactctgaccattggctggcgagcccaagagatgtcagagaagctgctggtacgcattagtggcaaacgggtatacagggacctggaatttgaagaggaccaaagagagcatcgggcagctgtacagcagaaattgatgaacctgcaccaggatgtggtgaccatcatgaccaactcctatgaggtcttcaagaatgatggtcctgagattcagcagcagtggatgctgtacatgattcggctggaccgcatgatggaggatgccctgcgcctgaatgtgaagtggtcactgctagaactatccaaggctatcaacggggatggaaagaccagcccaaacccactcttccaagtccttgtcattttgaagaatgatctgcaaggaagtgtggcacaggtggaattctcacccactctgcagactttggcaggtgtggtcaatgacattggcaaccacctcttttccaccatctctgtcttctgccacctccctgacattctcaccaagcgcaagttacatcgtgaacccatccaaacagttgtggagcaagatgaggacatcaagaagatccagacccaaatcagcagcggcatgactaacaacgcaagcctgctgcagaactacctcaagacctgggacatgtaccgggagatctgggagatcaacaaggactccttcattcatcgctaccagcgcctcaaccctcctgtctcttcttttgttgccgacattgcccgctacacggaagttgctaataacgtgcagaaggaggagacagtcaccaacatccagtttgtgctgctggactgttcgcacctcaagttctccctggtgcagcactgcaatgaatggcagaacaagttcgcgactctgctcagggagatggctgctgggcgcctcctggagctgcacacctacctgaaggagaacgcagagaaaatcagccgccctccgcagacactggaggaactgggggtcagcttgcagctcgtggatgccctgaagcacgacttggccaacgtggagactcagatccctcccatacacgagcaatttgccattcttgaaaagtacgaggtgccagtcgaggacagtgtcctggagatgctggacagtctcaacggggagtgggttgtcttccaacaaactctgctggacagtaagcaaatgctgaagaaacacaaggagaaattcaagacaggcctgatccactcggcagatgacttcaagaagaaagcacatacacttctggaagatttcgaattcaaaggccatttcaccagcaacgtgggatacatgtctgccttagaccagattacacaagtgcgggccatgctgatggccatgcgggaagaggaaaatagtctccgagccaacctgggcatcttcaagatcgagcagccaccctccaaggaccttcagaacctggagaaggagctcgatgccctccagcaaatctgggagatcgcacgagactgggaggagaactggaatgagtggaagactggccggttcctgatcctgcagacggaaaccatggagaccacggcccacgggctgtttcgtcgcctcacaaaattagccaaagagtataaggaccgaaactgggaaattattgaaaccactcgctcaaaaatagagcagttcaagaggaccatgcctctcatctcagacctgcggaaccctgcccttagagagaggcactgggaccaggtccgggatgagatccagcgggagtttgatcaggaatctgaaagcttcaccttggagcagattgtggagcttgggatggatcagcatgtggagaaaattggggagatctctgcttcagcaactaaagagctggctatagaagtggctttacaaaacattgccaagacctgggatgtgactcagctcgacatagtaccctacaaggataagggccatcatcggctcagaggtacagaagaagtattccaggcactggaagataaccaggtagctctgtctaccatgaaggcatcacgctttgtcaaggcctttgagaaggatgtggaccactgggaacgctgcctctccctcattttggaggttattgagatgattctcacagtgcagcgtcagtggatgtacttagagaatatcttcctaggagaagacatccgcaagcagctgcccaatgaatcgaccttatttgaccaggtcaacagcaactggaaagccatcatggacaggatgaacaaggacaacaatgctctccggagcacccatcacccaggcctcctggacacattgatagaaatgaatacaatcctggaagatattcagaaatctctggatatgtatttagagaccaagcgacatattttcccccgcttctacttcttgtccaatgatgacctgctggagattctgggccagtcccgaaacccagaggctgtgcagccacacctcaaaaaatgctttgacaacatcaagttgctgagaatccagaaggttggagggcccagcagcaaatgggaagctgtggggatgttctcgggcgacggcgagtacattgacttcctccactcagtatttttagaaggccctgtggagtcctggcttggcgatgtggaacagaccatgagggtgaccctgcgggaccttctccggaactgccacctggccctcaggaagttcctcaacaagagggacaaatgggtgaaggagtgggctggccaggtggtgatcactgccagtcagatccagtggacggctgatgtcaccaagtgcctgctgacagcgaaggagcgggcagacaagaaaatcctcaaggtcatgaagaagaaccaggtgtcaatcctgaataagtattcagaagccatcagggggaacttgaccaagatcatgcggcttaaaattgtggctctggtgacgatagaaattcatgcccgggatgtgttggagaagctttacaagagtggcctcatggatgtcaattcctttgactggctcagccaacttcggttctactgggagaaggatcttgatgactgtgtcatccgccagaccaacacgcaatttcagtataattatgagtacttgggtaactcgggccggctcgtcatcacccccctgacggacaggtgttacatgacactgaccacggcattgcacctgcaccgagggggctcccccaaaggccctgcaggcacaggcaagaccgagaccgtcaaggacctgggcaaggccctgggcatatatgtcattgtggtcaactgctctgagggcctggactacaagtccatgggccgaatgtactcaggtctggcccagactggagcttggggctgctttgatgagtttaaccgcatcaacatcgaggtgctgtcagtggtggcccaccagatcctgtgcatcctgtctgccctggctgccggcctcacccatttccattttgatggctttgaaataaatctggtgtggtcctgtgggatcttcattaccatgaatcctggctatgctggccgcacagagcttcccgaaaatcttaaatccatgttccgcccaattgccatggtggtgcctgactccaccctcattgcagaaatcattctctttggagagggctttggcaactgcaagattctggccaagaaggtgtacacactctactcactggctgtgcagcagctgtccagacaggaccactatgactttggcctgcgtgccctcacctcccttctgcgctatgctggcaagaagcgccgcctacagccggatctgactgatgaagaggttctgctgctctcaatgagagatatgaacatcgccaagctcacttcagttgatgcacccctgttcaatgccatcgtgcaagatctgtttcccaacattgagctgcctgtcattgactatggcaagctgcgggagaccgttgagcaggagattcgagacatgggcctgcaaagcacgccgttcaccctcaccaaggttttccagttgtatgaaaccaagaactcccgccactccaccatgatcgtgggctgcacgggcagcggcaagactgcctcatggcgcattctacaggcctccctgtcctctctgtgccgcgccggagaccctaacttcaacattgttagagagttccctttgaaccccaaggcattgtccctaggggaactgtatggggaatatgacctcagcaccaatgaatggacagatggcatcttgtccagtgtcatgcggacggcatgtgcagatgagaaacccgacgagaagtggatcctgttcgatggccccgtggacacactgtggatcgagaacatgaactccgtcatggacgataacaaggtgttgaccctcatcaacggcgagcgcatcgcgatgcccgagcaggtgtctctcctgtttgaagtggaggacctggcaatggcctctccggccactgtatcccgctgcgggatggtctacactgactacgctgacctgggctggaagccctatgttcagtcatggctggagaagaggccaaaggctgaggtggagccccttcaacgcatgttcgaaaagctcatcaacaagatgctggcctttaagaaggacaactgcaaggagctggtgcccctgcccgagtacagcggtatcacctccctctgcaagctgtactctgccctggccacgccagagaatggggtgaacccagctgacggcgagaactatgtcaccatggtagagatgacatttgtgttcagcatgatctggtctgtgtgtgcctctgtggatgaggagggccggaagaggatcgacagctacctccgagagatcgagggctcctttcccaataaggacacggtatatgagtattttgtggaccccaaaatacggagttggacatcatttgaggacaagctccctaagagttggcgctaccctccaaacgcccccttctataagatcatggtgcccaccgtcgacactgttcgctacaactacctggtgagcagcttggtggccaaccagaatcccattctgctggtgggtcccgtggggactgggaagacctccatcgcccagagcgttctgcagtccctgccctccagccagtggtcggtgctcgttgtcaacatgtccgcacagaccacatccaataacgtgcagagcatcattgagagcagggttgagaagcgaaccaagggtgtctacgtgccattcgggggcaaaagcatgatcacctttatggatgacctaaatatgcccgctaaggacatgtttgggtcccagccacccctggagctgatccgcctctggattgactatggcttctggtatgaccgtacgaagcagaccatcaagtacattcgagaaatgttcctgatggctgccatgggcccccctgggggtggacggactgtcatctccccaaggctacggagtcgcttcaacattatcaacatgaccttccccacaaagtcccagatcatccgcatattcggcaccatgatcaatcagaagcttcaggactttgaggaagaggtgaagcccattgggaacgtggtgacagaggccaccctggacatgtacaacaccgtggtacagcgcttcctgcccacgcccaccaagatgcattacctcttcaaccttcgagacatctccaaggtgttccagggcatgcttagagccaacaaggacttccatgataccaagtccagcatcacacggctctggatccatgaatgtttcagagtcttctctgaccggctggttgatgcggcagacacagaagccttcatgggcatcataagcgacaagctcggctccttctttgacctcacatttcatcatctctgtcccagcaagcgtcctcctatctttggggatttcctgaaggagcccaaggtgtatgaagacctcacggatctgacagtgctgaagacagtcatggagacagctctaaatgagtataacctgtcaccctctgtcgtgcccatgcagctagtgctcttccgagaggctattgaacacatcacacggatcgtgcgggtcattggacagcctcggggcaacatgctcctggtgggtatcgggggcagcggacgccagagtctggcccgcctggcttcatccatctgcgactacaccaccttccagatcgaggtcaccaaacattatcggaagcaggagttccgagatgatatcaagcgtctgtatcgccaggctggggtggagctcaagaccacgtccttcatttttgtggacacccaaatagctgatgagtccttcctagaggacatcaacaacatcctcagctcaggcgaggtgcccaatctctacaagcctgatgaatttgaagagatccagtcgcatatcatagaccaggcccgggtggagcaggtgcctgagtcatcggacagcctcttcgcctacctcattgaacgcgtgcagaacaacctgcacatcgtgctctgcctcagccccatgggggatcccttcaggaactggatccgccagtacccagccttggtgaactgcacaaccatcaactggttctcagagtggccccaagaggccctgctcgaggtggctgagaagtgcctcataggagtagacctgggaactcaggagaatatccacaggaaggtggcccagatctttgtcactatgcactggtcagtagctcagtattcccagaagatgctgttggaactgcggagacacaactatgtcacacccaccaaatacctggaactcctgtctggatataagaagttgctgggagaaaaacggcaggagctgctggcccaagccaataaactgcggacaggcttgttcaagatcgacgaaactagggaaaaggtgcaagtgatgtcgttggagctggaggatgccaagaagaaggtggctgagttccagaagcagtgtgaggagtacctggtcatcattgtgcagcagaagcgggaggcagatgagcagcagaaggccctggagtctctgaacaagaaggatataggagagatcaagtcttatggacggcccccagcccaagtggagatagtgatgcaggcagttatgattcttcgaggcaacgagcccacatgggcagaggccaagaggcagctaggggaacagaacttcatcaagtcactgatcaactttgataaagacaatatctcagataaggttctgaagaagattggggcctactgcgcccagcctgacttccagcctgatatcatcggccgcgtctccctggctgccaagtccctctgcatgtgggtgcgggccatggagctgtatgggcggctatatcgggtggtggagcccaagcgaatccgaatgaacgctgccttggctcagcttcgggagaagcaagccgcgctcgctgaggcccaggagaagctgcgggaggtagctgagaaactggagatgctaaagaaacagtatgatgagaagctggcacagaaggaggagcttcgcaagaagtctgaagagatggagctgaagctggagcgagctgggatgctcgtgtcggggttggctggcgagaaggccagatgggaggagacagtccagggcctggaggaggacctgggctacctggtgggggactgtctcctggcagctgccttcctgtcctacatgggacccttcctgaccaactaccgggatgagattgtcaaccaaatctggatcgggaagatctgggagcttcaggttccttgctccccttctttcgccatcgataacttcctgtgcaatcctaccaaagtccgggactggaacatccaagggttgccctcagacgccttctccactgagaatggcatcatcgtcacccgaggcaacaggtgggcactgatgatcgaccctcaggcccaggccctgaaatggattaagaacatggaaggaggccagggcctgaagatcatcgacctgcagatgagcgattacctgcgaatcctagaacacgccattcactttggatacccggtgctacttcagaacgtgcaggaatatctggaccccacactgaaccccatgctcaacaaatctgtagcccgaatcggtggtcggctgttgatgcgcattggcgataaggaggtggaatataataccaatttccgtttctacatcaccaccaagctctccaacccccactacagcccagagacctcagccaagaccaccatcgtcaactttgctgttaaagaacagggcctggaggcccagctgctgggcattgtggtgcggaaggagcggcctgagctggaggagcagaaggactcactggtcatcaacatcgcggctggtaaaaggaagctcaaggagctggaggatgagatcctgcggctgctgaatgaggccaccggctccctgctggatgatgtgcagctggtgaacacgctgcatacctccaagatcacagccacagaggtgactgagcagctggagaccagtgagaccacagagatcaacactgacttggcgcgggaggcttaccgcccatgcgcccagcgggcatcaatcctgttcttcgtgctcaatgatatgggctgcatcgaccccatgtaccagttctcactggatgcctacatcagcctctttattctcagcattgacaaaagccaccgcagcaataagctggaggaccgcattgactacctgaatgactaccacacctacgctgtctacaggtacacctgccgtacccttttcgaacgccacaaactactattcagttttcatatgtgtgccaaaatcttggagacttctggcaagctcaacatggatgaatacaacttctttctacgtgggggtgtggtcttggatcgggagggccaaatggacaatccatgtagtagctggcttgcagatgcctactgggataacatcacagagctagacaaactgaccaacttccacggactcatgaactcctttgagcagtaccctcgtgactggcacctgtggtataccaatgctgccccggagaaggcgatgctgccaggtgagtgggaaaatgcctgcaatgaaatgcaacggatgctgatcgttcgctccctgcgccaggaccgcgtggccttctgcgtgacctccttcatcatcaccaaccttggctcccgcttcatcgagccgcctgtgctgaatatgaagtcggtgctggaggattcaaccccacgatccccactcgtgttcatcctgtcccctggtgtggaccccaccagtgccctgctgcagctggcagagcacatgggcatggcccagcgcttccacgccctgtccctgggccagggccaggcccccatcgctgctcggctcctccgagagggtgtgactcagggacactgggtgttcctggcaaactgccacctgtcactgtcttggatgcctaatctggacaagctggtggagcagctgcaggtggaggatcctcatccatccttccgcctctggctcagctccatcccccacccagacttccctatctcaatcttgcaggtcagcatcaagatgaccacagagccaccaaagggcctaaaggccaacatgacacgtctttaccaactgatgtcagaaccacagttttcccgctgctccaaacctgccaaatataagaagctgctgttttcactctgtttcttccactctgtgttacttgaacgcaaaaagttcctgcagcttggctggaacatcatctatggcttcaatgactccgactttgaggtgtcagaaaacttgctgagcctctatctcgatgagtacgaggagacaccttgggacgcacttaagtacctcattgccggcatcaactatggtggacatgtcacagatgactgggaccggcgcctgctgaccacctacatcaatgattatttctgtgaccagtctctatcaactcccttccaccggttgtcagcactggagacttatttcatccccaaggatggcagcctcgcttcttacaaggaatacatcagcttattgcctggcatggacccccctgaggcctttggccagcaccccaatgctgatgtggcctctcagatcactgaggcacaaaccctctttgatactttgctttccttgcaacctcagattacacccaccagggctggaggccagacccgggaagagaaggtccttgagttggccgctgatgtgaagcagaagatccctgaaatgatcgactatgaggggactcaaaaactgctagctctcgacccctcccccctcaatgtggtccttctgcaggagatccagagatacaacacactgatgcagaccatcctgttctcactgacagacctagagatacctagttgtgttagccataaaagtgaaagagttgtattggagctcagtgctgtaaaacacccgcgacaa

SEQ ID NO: 8992 - DNA, 13505 bp, Homo sapiens
  source 1..13505: mol_type = unassigned DNA
gttttgcctgcacgatgtccagcaaagctgagaagaagcagcgattgagtggccgaggaagctcccaggcaagctggtcagggcgggccactcgggctgctgtggccacacaggagcaggggaatgccccggctgtcagtgagccagagctgcaggctgagctccccaaggaggagcctgagccacggttggagggacctcaagcacagagtgaagaatcagtggagcccgaggcagatgtgaagcccctcttcctttcccgagctgcgctgacaggactggcggatgcagtgtggacacaggagcatgatgccattctggaacactttgcccaggaccctacagaatccatcctcaccatcttcattgacccttgttttgggctgaagctagagctgggcatgcctgtacagacccagaaccagcttgtctacttcattcgccaagcaccagttcccatcacctgggagaacttcgaggcaactgtgcagtttgggacggtgcggggcccctatatcccggccctgcttcggctgctcggtggagtctttgcccctcagatctttgcaaacacaggctggcctgagagcattagaaatcattttgcttctcatctgcacaagttcttggcctgcctgacagacactcggtacaaactggaggggcacacggtcctctacatccctgcagaggccatgaacatgaagcctgagatggtgataaaggacaaagagctggtgcaacggctagagacctccatgatccactggacccggcagataaaggagatgctcagtgcccaggagactgtggagacaggagaaaatttaggtcctctggaggagattgagttctggcgcaaccgatgcatggacctgtctggcatcagtaagcagctggtgaagaagggagtgaagcacgttgaatccatcctgcaccttgccaagtcgtcctacttggcgccctttatgaaactggcacagcagatccaggatggctctcgtcaagcacagtcaaacctgacctttttgtcaatcctgaaggaaccttaccaggagttggctttcatgaagcccaaggacatctctagcaagctccctaagctgatcagtctcatccgcatcatctgggtcaactctccccactacaacactcgggagagactgacctcgctcttccgaaaggtatgtgactgtcagtatcacttcgcccgctgggaagatggcaagcagggtccccttccttgcttctttggtgcccaggggccacagataacacggaacttgctggagattgaggacatctttcataaaaatctgcacacgctgcgagccgttcgcgggggtatcctggatgtcaagaacacctgttggcatgaagactacaataagttccgtgccggaatcaaggacctggaggtgatgacccagaacctgatcacctcagccttcgagttggtgcgggacgtgccgcacggcgtgcttctgctggacaccttccacaggcttgcctcccgcgaggctatcaagcggacttatgacaagaaggcggtggatctctacatgctgttcaatagcgagctggccctggtgaaccgtgaacggaacaagaaatggccagacctggagccctacgtggcccagtattccggaaaggcgcgctgggtgcacatcctccggcgtcgcatcgacagagtcatgacctgccttgctggtgctcatttcctgccccgtattgggactggaaaggagagtgtgcacacctatcagcagatggtccaggccattgatgagctggttcgaaaaaccttccaagagtggacatcaagtctggacaaggattgcattcggcggttggataccccattgctgcgaatcagccaggagaaggcgggcatgctggatgtcaactttgacaagtcccttctgattctctttgcggaaattgactactgggagcggctgctgtttgagacgccccattacgtggtgaacgtagctgagcgagccgaggacctgcgcattctgcgtgaaaatctgctactcgttgctagagactacaataggattattgccatgctgtccccagatgagcaggccctattcaaagagcgtattcggctcctggataagaagatccacccgggactcaagaaactgcactgggccttgaagggggccagtgccttcttcatcacggagtgccgtatacatgccagcaaggtgcagatgattgtgaatgagttcaaggcatccactctgaccattggctggcgagcccaagagatgtcagagaagctgctggtacgcattagtggcaaacgggtatacagggacctggaatttgaagaggaccaaagagagcatcgggcagctgtacagcagaaattgatgaacctgcaccaggatgtggtgaccatcatgaccaactcctatgaggtcttcaagaatgatggtcctgagattcagcagcagtggatgctgtacatgattcggctggaccgcatgatggaggatgccctgcgcctgaatgtgaagtggtcactgctagaactatccaaggctatcaacggggatggaaagaccagcccaaacccactcttccaagtccttgtcattttgaagaatgatctgcaaggaagtgtggcacaggtggaattctcacccactctgcagactttggcaggtgtggtcaatgacattggcaaccacctcttttccaccatctctgtcttctgccacctccctgacattctcaccaagcgcaagttacatcgtgaacccatccaaacagttgtggagcaagatgaggacatcaagaagatccagacccaaatcagcagcggcatgactaacaacgcaagcctgctgcagaactacctcaagacctgggacatgtaccgggagatctgggagatcaacaaggactccttcattcatcgctaccagcgcctcaaccctcctgtctcttcttttgttgccgacattgcccgctacacggaagttgctaataacgtgcagaaggaggagacagtcaccaacatccagtttgtgctgctggactgttcgcacctcaagttctccctggtgcagcactgcaatgaatggcagaacaagttcgcgactctgctcagggagatggctgctgggcgcctcctggagctgcacacctacctgaaggagaacgcagagaaaatcagccgccctccgcagacactggaggaactgggggtcagcttgcagctcgtggatgccctgaagcacgacttggccaacgtggagactcagatccctcccatacacgagcaatttgccattcttgaaaagtacgaggtgccagtcgaggacagtgtcctggagatgctggacagtctcaacggggagtgggttgtcttccaacaaactctgctggacagtaagcaaatgctgaagaaacacaaggagaaattcaagacaggcctgatccactcggcagatgacttcaagaagaaagcacatacacttctggaagatttcgaattcaaaggccatttcaccagcaacgtgggatacatgtctgccttagaccagattacacaagtgcgggccatgctgatggccatgcgggaagaggaaaatagtctccgagccaacctgggcatcttcaagatcgagcagccaccctccaaggaccttcagaacctggagaaggagctcgatgccctccagcaaatctgggagatcgcacgagactgggaggagaactggaatgagtggaagactggccggttcctgatcctgcagacggaaaccatggagaccacggcccacgggctgtttcgtcgcctcacaaaattagccaaagagtataaggaccgaaactgggaaattattgaaaccactcgctcaaaaatagagcagttcaagaggaccatgcctctcatctcagacctgcggaaccctgcccttagagagaggcactgggaccaggtccgggatgagatccagcgggagtttgatcaggaatctgaaagcttcaccttggagcagattgtggagcttgggatggatcagcatgtggagaaaattggggagatctctgcttcagcaactaaagagctggctatagaagtggctttacaaaacattgccaagacctgggatgtgactcagctcgacatagtaccctacaaggataagggccatcatcggctcagaggtacagaagaagtattccaggcactggaagataaccaggtagctctgtctaccatgaaggcatcacgctttgtcaaggcctttgagaaggatgtggaccactgggaacgctgcctctccctcattttggaggttattgagatgattctcacagtgcagcgtcagtggatgtacttagagaatatcttcctaggagaagacatccgcaagcagctgcccaatgaatcgaccttatttgaccaggtcaacagcaactggaaagccatcatggacaggatgaacaaggacaacaatgctctccggagcacccatcacccaggcctcctggacacattgatagaaatgaatacaatcctggaagatattcagaaatctctggatatgtatttagagaccaagcgacatattttcccccgcttctacttcttgtccaatgatgacctgctggagattctgggccagtcccgaaacccagaggctgtgcagccacacctcaaaaaatgctttgacaacatcaagttgctgagaatccagaaggttggagggcccagcagcaaatgggaagctgtggggatgttctcgggcgacggcgagtacattgacttcctccactcagtatttttagaaggccctgtggagtcctggcttggcgatgtggaacagaccatgagggtgaccctgcgggaccttctccggaactgccacctggccctcaggaagttcctcaacaagagggacaaatgggtgaaggagtgggctggccaggtggtgatcactgccagtcagatccagtggacggctgatgtcaccaagtgcctgctgacagcgaaggagcgggcagacaagaaaatcctcaaggtcatgaagaagaaccaggtgtcaatcctgaataagtattcagaagccatcagggggaacttgaccaagatcatgcggcttaaaattgtggctctggtgacgatagaaattcatgcccgggatgtgttggagaagctttacaagagtggcctcatggatgtcaattcctttgactggctcagccaacttcggttctactgggagaaggatcttgatgactgtgtcatccgccagaccaacacgcaatttcagtataattatgagtacttgggtaactcgggccggctcgtcatcacccccctgacggacaggtgttacatgacactgaccacggcattgcacctgcaccgagggggctcccccaaaggccctgcaggcacaggcaagaccgagaccgtcaaggacctgggcaaggccctgggcatatatgtcattgtggtcaactgctctgagggcctggactacaagtccatgggccgaatgtactcaggtctggcccagactggagcttggggctgctttgatgagtttaaccgcatcaacatcgaggtgctgtcagtggtggcccaccagatcctgtgcatcctgtctgccctggctgccggcctcacccatttccattttgatggctttgaaataaatctggtgtggtcctgtgggatcttcattaccatgaatcctggctatgctggccgcacagagcttcccgaaaatcttaaatccatgttccgcccaattgccatggtggtgcctgactccaccctcattgcagaaatcattctctttggagagggctttggcaactgcaagattctggccaagaaggtgtacacactctactcactggctgtgcagcagctgtccagacaggaccactatgactttggcctgcgtgccctcacctcccttctgcgctatgctggcaagaagcgccgcctacagccggatctgactgatgaagaggttctgctgctctcaatgagagatatgaacatcgccaagctcacttcagttgatgcacccctgttcaatgccatcgtgcaagatctgtttcccaacattgagctgcctgtcattgactatggcaagctgcgggagaccgttgagcaggagattcgagacatgggcctgcaaagcacgccgttcaccctcaccaaggttttccagttgtatgaaaccaagaactcccgccactccaccatgatcgtgggctgcacgggcagcggcaagactgcctcatggcgcattctacaggcctccctgtcctctctgtgccgcgccggagaccctaacttcaacattgttagagagttccctttgaaccccaaggcattgtccctaggggaactgtatggggaatatgacctcagcaccaatgaatggacagatggcatcttgtccagtgtcatgcggacggcatgtgcagatgagaaacccgacgagaagtggatcctgttcgatggccccgtggacacactgtggatcgagaacatgaactccgtcatggacgataacaaggtgttgaccctcatcaacggcgagcgcatcgcgatgcccgagcaggtgtctctcctgtttgaagtggaggacctggcaatggcctctccggccactgtatcccgctgcgggatggtctacactgactacgctgacctgggctggaagccctatgttcagtcatggctggagaagaggccaaaggctgaggtggagccccttcaacgcatgttcgaaaagctcatcaacaagatgctggcctttaagaaggacaactgcaaggagctggtgcccctgcccgagtacagcggtatcacctccctctgcaagctgtactctgccctggccacgccagagaatggggtgaacccagctgacggcgagaactatgtcaccatggtagagatgacatttgtgttcagcatgatctggtctgtgtgtgcctctgtggatgaggagggccggaagaggatcgacagctacctccgagagatcgagggctcctttcccaataaggacacggtatatgagtattttgtggaccccaaaatacggagttggacatcatttgaggacaagctccctaagagttggcgctaccctccaaacgcccccttctataagatcatggtgcccaccgtcgacactgttcgctacaactacctggtgagcagcttggtggccaaccagaatcccattctgctggtgggtcccgtggggactgggaagacctccatcgcccagagcgttctgcagtccctgccctccagccagtggtcggtgctcgttgtcaacatgtccgcacagaccacatccaataacgtgcagagcatcattgagagcagggttgagaagcgaaccaagggtgtctacgtgccattcgggggcaaaagcatgatcacctttatggatgacctaaatatgcccgctaaggacatgtttgggtcccagccacccctggagctgatccgcctctggattgactatggcttctggtatgaccgtacgaagcagaccatcaagtacattcgagaaatgttcctgatggctgccatgggcccccctgggggtggacggactgtcatctccccaaggctacggagtcgcttcaacattatcaacatgaccttccccacaaagtcccagatcatccgcatattcggcaccatgatcaatcagaagcttcaggactttgaggaagaggtgaagcccattgggaacgtggtgacagaggccaccctggacatgtacaacaccgtggtacagcgcttcctgcccacgcccaccaagatgcattacctcttcaaccttcgagacatctccaaggtgttccagggcatgcttagagccaacaaggacttccatgataccaagtccagcatcacacggctctggatccatgaatgtttcagagtcttctctgaccggctggttgatgcggcagacacagaagccttcatgggcatcataagcgacaagctcggctccttctttgacctcacatttcatcatctctgtcccagcaagcgtcctcctatctttggggatttcctgaaggagcccaaggtgtatgaagacctcacggatctgacagtgctgaagacagtcatggagacagctctaaatgagtataacctgtcaccctctgtcgtgcccatgcagctagtgctcttccgagaggctattgaacacatcacacggatcgtgcgggtcattggacagcctcggggcaacatgctcctggtgggtatcgggggcagcggacgccagagtctggcccgcctggcttcatccatctgcgactacaccaccttccagatcgaggtcaccaaacattatcggaagcaggagttccgagatgatatcaagcgtctgtatcgccaggctggggtggagctcaagaccacgtccttcatttttgtggacacccaaatagctgatgagtccttcctagaggacatcaacaacatcctcagctcaggcgaggtgcccaatctctacaagcctgatgaatttgaagagatccagtcgcatatcatagaccaggcccgggtggagcaggtgcctgagtcatcggacagcctcttcgcctacctcattgaacgcgtgcagaacaacctgcacatcgtgctctgcctcagccccatgggggatcccttcaggaactggatccgccagtacccagccttggtgaactgcacaaccatcaactggttctcagagtggccccaagaggccctgctcgaggtggctgagaagtgcctcataggagtagacctgggaactcaggagaatatccacaggaaggtggcccagatctttgtcactatgcactggtcagtagctcagtattcccagaagatgctgttggaactgcggagacacaactatgtcacacccaccaaatacctggaactcctgtctggatataagaagttgctgggagaaaaacggcaggagctgctggcccaagccaataaactgcggacaggcttgttcaagatcgacgaaactagggaaaaggtgcaagtgatgtcgttggagctggaggatgccaagaagaaggtggctgagttccagaagcagtgtgaggagtacctggtcatcattgtgcagcagaagcgggaggcagatgagcagcagaaggccgtaacagccaacagtgaaaagattgcagttgaggaaatcaagtgtcaggcactggctgacaatgcccagaaagatctagaagaggcactgcccgccctggaagaggccatgcgggccctggagtctctgaacaagaaggatataggagagatcaagtcttatggacggcccccagcccaagtggagatagtgatgcaggcagttatgattcttcgaggcaacgagcccacatgggcagaggccaagaggcagctaggggaacagaacttcatcaagtcactgatcaactttgataaagacaatatctcagataaggttctgaagaagattggggcctactgcgcccagcctgacttccagcctgatatcatcggccgcgtctccctggctgccaagtccctctgcatgtgggtgcgggccatggagctgtatgggcggctatatcgggtggtggagcccaagcgaatccgaatgaacgctgccttggctcagcttcgggagaagcaagccgcgctcgctgaggcccaggagaagctgcgggaggtagctgagaaactggagatgctaaagaaacagtatgatgagaagctggcacagaaggaggagcttcgcaagaagtctgaagagatggagctgaagctggagcgagctgggatgctcgtgtcggggttggctggcgagaaggccagatgggaggagacagtccagggcctggaggaggacctgggctacctggtgggggactgtctcctggcagctgccttcctgtcctacatgggacccttcctgaccaactaccgggatgagattgtcaaccaaatctggatcgggaagatctgggagcttcaggttccttgctccccttctttcgccatcgataacttcctgtgcaatcctaccaaagtccgggactggaacatccaagggttgccctcagacgccttctccactgagaatggcatcatcgtcacccgaggcaacaggtgggcactgatgatcgaccctcaggcccaggccctgaaatggattaagaacatggaaggaggccagggcctgaagatcatcgacctgcagatgagcgattacctgcgaatcctagaacacgccattcactttggatacccggtgctacttcagaacgtgcaggaatatctggaccccacactgaaccccatgctcaacaaatctgtagcccgaatcggtggtcggctgttgatgcgcattggcgataaggaggtggaatataataccaatttccgtttctacatcaccaccaagctctccaacccccactacagcccagagacctcagccaagaccaccatcgtcaactttgctgttaaagaacagggcctggaggcccagctgctgggcattgtggtgcggaaggagcggcctgagctggaggagcagaaggactcactggtcatcaacatcgcggctggtaaaaggaagctcaaggagctggaggatgagatcctgcggctgctgaatgaggccaccggctccctgctggatgatgtgcagctggtgaacacgctgcatacctccaagatcacagccacagaggtgactgagcagctggagaccagtgagaccacagagatcaacactgacttggcgcgggaggcttaccgcccatgcgcccagcgggcatcaatcctgttcttcgtgctcaatgatatgggctgcatcgaccccatgtaccagttctcactggatgcctacatcagcctctttattctcagcattgacaaaagccaccgcagcaataagctggaggaccgcattgactacctgaatgactaccacacctacgctgtctacaggtacacctgccgtacccttttcgaacgccacaaactactattcagttttcatatgtgtgccaaaatcttggagacttctggcaagctcaacatggatgaatacaacttctttctacgtgggggtgtggtcttggatcgggagggccaaatggacaatccatgtagtagctggcttgcagatgcctactgggataacatcacagagctagacaaactgaccaacttccacggactcatgaactcctttgagcagtaccctcgtgactggcacctgtggtataccaatgctgccccggagaaggcgatgctgccaggtgagtgggaaaatgcctgcaatgaaatgcaacggatgctgatcgttcgctccctgcgccaggaccgcgtggccttctgcgtgacctccttcatcatcaccaaccttggctcccgcttcatcgagccgcctgtgctgaatatgaagtcggtgctggaggattcaaccccacgatccccactcgtgttcatcctgtcccctggtgtggaccccaccagtgccctgctgcagctggcagagcacatgggcatggcccagcgcttccacgccctgtccctgggccagggccaggcccccatcgctgctcggctcctccgagagggtgtgactcagggacactgggtgttcctggcaaactgccacctgtcactgtcttggatgcctaatctggacaagctggtggagcagctgcaggtggaggatcctcatccatccttccgcctctggctcagctccatcccccacccagacttccctatctcaatcttgcaggtcagcatcaagatgaccacagagccaccaaagggcctaaaggccaacatgacacgtctttaccaactgatgtcagaaccacagttttcccgctgctccaaacctgccaaatataagaagctgctgttttcactctgtttcttccactctgtgttacttgaacgcaaaaagttcctgcagcttggctggaacatcatctatggcttcaatgactccgactttgaggtgtcagaaaacttgctgagcctctatctcgatgagtacgaggagacaccttgggacgcacttaagtacctcattgccggcatcaactatggtggacatgtcacagatgactgggaccggcgcctgctgaccacctacatcaatgattatttctgtgaccagtctctatcaactcccttccaccggttgtcagcactggagacttatttcatccccaaggatggcagcctcgcttcttacaaggaatacatcagcttattgcctggcatggacccccctgaggcctttggccagcaccccaatgctgatgtggcctctcagatcactgaggcacaaaccctctttgatactttgctttccttgcaacctcagattacacccaccagggctggaggccagacccgggaagagaaggtccttgagttggccgctgatgtgaagcagaagatccctgaaatgatcgactatgaggggactcaaaaactgctagctctcgacccctcccccctcaatgtggtccttctgcaggagatccagagatacaacacactgatgcagaccatcctgttctcactgacagacctagagaaaggcatccagggtctcatcgtcatgtctacaagcctggaagagattttcaattgcatctttgatgcccatgttcctccgctctggggaaaggcatacccctcacaaaagccattggctgcctggacccgggacttggccatgcgtgtggagcagtttgagctgtgggccagccgggcccggcctcctgtgatcttctggttgtctggtttcacctttcccactggcttcctcactgctgtgctgcagtcttcagctcgccaaaacaacgtttcagtggacagcctctcctgggagtttatcgtttccactgtggatgacagcaacctagtgtatccccccaaggatggtgtctgggtccggggcctgtacctggaaggtgctggctgggaccggaagaactcctgcttggtggaggcagagcccatgcagcttgtctgcctcatgcccacgatccacttccggcctgcagagagccgcaagaagagcgccaagggcatgtactcctgcccctgctattactatcccaaccgggcaggcagctcagaccgagcctcctttgtcatcggcattgacctgcggtctggggccatgacacctgatcattggatcaagaggggcactgctctactcatgagcctggacagctgagacctcctcctcttctccgcttgagagagagggtcagggactccaggagctaagacagatgttgcacctaggactgaggccggacctcactcagactttgaccttggccgaatttgtgtgatgtggccctggagatacctagttgtgttagccataaaagtgaaagagttgtattggagctcagtgctgtaaaacacccgcgacaac

SEQ ID NO: 8993 - DNA, 12394 bp, Homo sapiens
  source 1..12394: mol_type = unassigned DNA
atgggagctacagggcgcctcgagctcacactggccgcccctccccatccgggcccagcctttcagcgttcaaaagccagggagacccaaggagaggaggaagggagtgaaatgcagatcgccaaaagtgactccatacatcacatgagccactcccaggggcagccagagctgcctcctctgcctgcttctgctaatgaggaaccgtctggactctatcagactgtcatgtcacacagcttttacccgcccttgatgcaacgcacgtcatggaccttggctgcacccttcaaagaacagcatcaccaccgtggacccagtgattccatcgccaacaactactccttgatggcccaggacctgaagctgaaagatctgctgaaggtctaccaaccggccaccatcagtgtccctagggacaggaccggtcaggggctgccatcatcaggaaatagaagctcatcagagcccatgaggaaaaaaacgaagttttcctccagaaacaaagaggattccactaggatcaagttggccttcaagacgtcaatcttctcacccatgaagaaggaggtaaagacatctttgacgttcccaggaagcagaccaatgagtccagaacagcagctcgatgtcatgttacagcaggagatggaaatggaaagtaaagaaaagaagccatctgaatcggacctggagagatactattactatctgaccaatggaattcgcaaagacatgattgcccctgaggagggtgaagtgatggttcggatttcaaagctgatttctaacacgctgctgacgagtcccttcctggagcccctgatggtggtcctcgtgcaggagaaggagaatgactattactgtagcctcatgaaaagcatcgttgattacatcctcatggacccaatggagagaaaacggctctttattgagagcatcccccgcttgtttcctcaaagagtgatccgggcccctgtgccctggcacagtgtctacaggagcgccaagaagtggaacgaggagcatctgcacacggtgaaccccatgatgctcaggctgaaagaactgtggtttgcagaattcagagacctcaggtttgttcgaacagcagaaatactagcgggaaaattgcctctgcagcctcaggaattttgggatgtgatccagaaacactgcctggaggcacaccagactcttctcaacaagtggatccccacctgcgcccagctttttacctcacggaaggagcactggattcattttgctcccaagagcaactatgactcaagtcgaaacattgaggaatattttgcttctgtggcatcattcatgtcgctgcagcttagggagctggtcattaagtcacttgaggacctcgtttcccttttcatgatacacaaagatgggaatgattttaaggagccctaccaagagatgaagtttttcatacctcagctaatcatgatcaaacttgaagtcagtgaacccattattgtcttcaatccatcttttgatggctgctgggaattaatacgtgactctttcctggaaattattaagaactctaatgggatccccaagctgaaatacataccacttaagttctccttcactgctgctgctgctgatcggcaatgtgtgaaagcagctgagccaggagagcccagcatgcacgcggctgccactgcaatggcagagctgaaaggatataatctgctccttggaactgttaacgcagaagaaaaacttgtttctgattttttgattcaaactttcaaggtatttcagaaaaatcaagttggcccctgcaaatatttaaatgtctacaaaaagtatgttgacttattggataacacggcagagcaaaacatcgctgcgttcctgaaagaaaatcatgacattgatgattttgtgacgaagatcaatgccataaagaaacggagaaatgaaattgcatccatgaacatcaccgtgcctttagccatgttctgccttgatgctacggccctaaatcatgatctctgtgagcgagctcaaaatcttaaagaccatctgattcaattccaagtggatgtaaaccgagacaccaataccagcatttgtaatcagtacagccacatcgcagacaaagtcagtgaggttcctgccaacactaaggagctggtatccctcattgaattcctaaagaaatccagtgctgtcactgtgttcaaactcaggaggcaacttagagatgcaagtgaacggctggagttcctgatggactatgcagacttgccgtaccagattgaagatatctttgacaacagccggaacttgctccttcacaagagggatcaggcagaaatggatctgattaaaagatgctcagaatttgagttgagacttgagggctaccacagagaactggaaagttttaggaagcgcgaagtgatgactacagaagaaatgaagcacaatgttgaaaagcttaatgagctttcaaagaacctaaatcgggcgtttgcagagtttgagttgatcaataaggaggaagagctattggaaaaggagaagagtacttaccctcttctgcaggccatgctgaagaacaaagtaccttatgagcagctgtggtcgacagcctatgagttcagcatcaagtcagaggaatggatgaatggacccctcttcttactgaatgctgagcaaattgcggaggagatagggaatatgtggaggacaacgtataaactgatcaagaccttgtctgatgtgcctgcacccaggcgcttagcagagaatgtgaagatcaagatcgataagttcaagcagtacattcccatcctcagtatttcctgcaacccaggaatgaaagaccgacactggcagcagatcagtgagattgttggctatgagataaagcccaccgaaacgacctgcctctcaaatatgctcgaatttggattcggcaaattcgttgaaaaattggagcccattggtgcagctgccagcaaggaatactctctggagaaaaacttggatagaatgaagttggattgggttaacgtgacgttcagcttcgtgaaatacagggacactgatacaaacatcttgtgtgcaattgatgacattcaaatgctacttgatgatcacgtgataaagacccagaccatgtgtggctccccattcatcaaaccaatagaagcagaatgccggaaatgggaagaaaagctaattcgcatacaagacaatttggatgcctggttgaaatgccaagccacctggctgtacctggaaccaatcttcagttcagaggacatcatagcccagatgccagaagaggggaggaaatttggcattgttgatagttactggaaatcacttatgtcccaagcggtgaaagataacaggattctggtggcagccgaccagccacggatggcagagaagcttcaagaagccaactttctcttggaggacatccagaaagggctgaatgattacttggagaagaagagactattcttccccagattcttcttcctatcaaacgatgagctgctggaaatcttgtccgagacaaaggaccctctccgagtgcagccgcacttgaagaagtgctttgaaggaattgccaagcttgagtttacagacaatctggaaattgtgggcatgatcagctcggaaaaagaaactgttccattcatacagaaaatctacccagctaatgccaagggcatggtggaaaagtggctccagcaggtggagcagatgatgctggccagtatgcgagaagtcattggacttgggattgaagcatatgtcaaggtccctcgaaatcactgggtcttacagtggcctggacaggtggttatctgtgtctcctccatcttttggacccaggaggtgtcccaagccctggcggaaaataccttactggattttctgaaaaagagcaatgatcagattgcgcagattgtccagctggtgcgagggaagctgagcagtggagctcgactcactctcggggccctcacggtcatcgatgtccacgcccgcgacgtggtggccaagttatctgaggacagggtctccgatctgaatgatttccaatggatctcacagctgcgctactactgggtggccaaggatgtgcaggtgcagattatcaccacagaagccttgtatggctatgagtacctgggaaactccccccggctggtgatcacacccctcaccgaccgctgctacaggacactgatgggagctttgaagctgaaccttgggggtgctccagagggtccagctgggactggcaagacagaaaccaccaaagatttggccaaagccttggctaagcagtgtgtggtcttcaactgctccgatggtttggattacaaagctatggggaagttcttcaaggggctggcacaggctggagcatgggcgtgctttgatgagttcaacaggatcgaggtagaagtgctgtctgtggtcgctcagcagatcctcagcatccaacaagccatcattcggaagctaaagacattcatctttgaagggactgagctctctctgaacccaacctgcgctgtgttcatcaccatgaaccccgggtatgctggcagggctgaactgcccgacaatctcaaggccttgttccggacagtggccatgatggtcccagattacgccctcattggagaaatctccctctactccatggggtttctggactccagaagtctcgcccagaagatcgttgcgacctaccgcctgtgctcggaacaactgtcctctcagcatcactatgactacggtatgcgcgctgtcaagtctgtgcttactgccgcaggaaacctgaagctcaagtatccagaggagaatgaaagtgtcctgctgctccgggcattgcttgatgtcaatctggccaagttcttagcgcaagatgtccctctgtttcagggaattatatctgatttatttcctggagttgttcttccaaagccagactatgaagtttttctgaaagtgctgaatgataacatcaaaaagatgaaactccagccagtaccttggtttatagggaaaattatccagatctacgaaatgatgctggtgagacatggctatatgattgtaggagaccccatgggcggcaagacctctgcttataaagtgttggctgcagctctcggcgatttacacgcagccaatcagatggaggagtttgctgtggagtacaagatcatcaaccccaaggctatcacgatggggcagctgtatgggtgctttgaccaagtgagccacgagtggatggatggtgtccttgccaatgctttccgggagcaagcgtcttcactctctgatgatcgcaagtggattatatttgatgggccagtggatgctatttggattgaaaatatgaacactgttctggatgacaataaaaagctgtgtctcatgagtggggaaattatccagatgaactccaagatgagcctgatcttcgagcccgccgacctcgagcaagcctctccagccactgtgagcaggtgtgggatgatctacatggagccccatcaactaggctggaagcccctgaaggattcctacatggacaccctgccctccagtctcaccaaggagcacaaagaattggtcaatgacatgttcatgtggcttgtccagccctgcctggaatttggtcgccttcattgtaaatttgttgtccagacatctcccatccaccttgccttctcaatgatgagactgtactcttctctgcttgatgaaatcagggcagtagaagaggaggaaatggaattaggtgaaggcctgtcaagtcaacagatctttctctggctccaaggactgtttctcttttccttggtgtggaccgtggctggcaccatcaacgcagacagcagaaagaaatttgatgtgtttttccgcaacctgatcatgggcatggatgataaccacccaaggcccaaaagcgtcaaactcaccaaaaacaacatctttccagaaagaggaagcatctatgatttttattttatcaaacaagctagtggacattgggaaacgtggacacagtatatcaccaaagaggaggaaaaagttccagctggtgcaaaggtctcagaactcatcatccccacaatggagacagcccggcagtccttcttcttgaaaacctacttagaccatgagattccaatgctgttcgtgggtcccacaggcactggcaaatcagccatcaccaacaacttccttctccaccttcccaaaaatacgtacctacccaactgcatcaatttctctgccagaacctcagccaatcagacccaggatatcatcatgtccaagctggatcgacgacggaagggccttttcgggcctcccatagggaagaaagcagtggtgtttgtggatgacctcaacatgccagccaaagaggtgtatggggcccagccacccatcgagctcctgaggcagtggattgaccatggttactggtttgacaaaaaagacacaaccaggctggacatcgtggacatgctgctcgtgacagccatggggccccccgggggaggaaggaatgacattactggacgattcactcgccatctgaatatcatttccatcaatgcctttgaggatgacattttaaccaagattttcagttcgattgttgactggcacttcgggaaagggtttgatgtgatgtttttaaggtacggaaagatgctggtccaagctactaagacaatttatagagatgcagtggagaacttcttgccaactccctcgaagtcacattacgtctttaacctgcgggacttctcacgagtgattcaaggggtcctgctgtgccctcacacacacctgcaggatgtagaaaaatgtatccggctttggatccatgaggtttatcgggtcttctatgatcgtctgattgacaaggaggacagacaggtctttttcaacatggtgaaggaaaccacctccaattgcttcaagcagaccatagagaaggtgcttatccacttgtcacccactggaaagatagtcgatgataacattcgaagcctcttctttggagattatttcaagccagaaagtgaccaaaaaatctacgatgagatcactgacctgaaacagctgactgtggtcatggagcactatctggaagaattcaacaacatcagcaaggcccccatgtccctggtcatgttcaggtttgccattgagcacatctctaggatctgccgtgtcctgaagcaggacaaaggccacctgctcctggtgggcatagggggcagcgggcggcaaagtgccgccaaactgtccacattcatgaacgcatacgagctataccagattgagatcaccaagaactacgcaggcaatgactggcgagaagatcttaagaagatcatactgcaggtcggtgtggccaccaagagcaccgtgttcctcttcgccgacaaccagatcaaggatgaatcattcgtggaggacatcaacatgcttctgaacacaggtgacgtgcctaacatcttccctgctgacgagaaggctgacatcgtggagaagatgcagactgcagccaggacccaaggagagaaggttgaagtcactcctctttctatgtataacttctttattgagagggtaattaacaaaatctccttttcattagccatgagtccaataggggatgccttcaggaaccgcctgcggatgttcccttcgctgatcaattgctgtacgattgattggttccagtcctggcccacagatgccctagagttggtggctaacaaatttctagaggatgtggagcttgatgacaacattcgggtagaggtcgtgtccatgtgcaaatatttccaagagagcgtcaagaagctgtcactcgattattacaacaaacttcgaagacacaactatgttacccccacctcctaccttgaattgattctaaccttcaagacgctcctgaatagcaagaggcaagaggtggctatgatgaggaaccgctacctgacaggcttgcagaaactcgactttgcagcttctcaggtagcggttatgcaaagagaactgacagctcttcaacctcaactcatcctcacctccgaggaaactgccaagatgatggtgaaaattgaagcggagacgagagaagctgatggaaagaaacttctggtgcaggcagatgaaaaagaagccaatgttgctgctgccattgcccaaggaatcaagaacgaatgtgagggggacctagctgaggcaatgcctgcactcgaggctgcactagctgctctggacaccctgaacccggccgacatctcgctggtgaagtcgatgcagaacccaccaggccctgtcaaactggtcatggagagcatctgcatcatgaaagggatgaagccagagaggaagccagaccccagtggctccggtaagatgatagaagattactggggggtatccaaaaagattcttggggatctgaaattcttggagagtcttaagacatatgacaaagacaacatccccccactgaccatgaagcggatccgggaaaggtttatcaatcacccggaattccagccagctgtcattaaaaatgtatcgtcggcctgcgagggtctgtgcaagtgggtgagggccatggaggtgtacgatcgcgtggccaaggtggtggctcccaaacgggagcgactgagggaggcagaggggaagctggctgcacagatgcagaagctgaaccagaaaagagcagagctgaagctggtggtagatcggctccaggccctgaatgacgactttgaagagatgaacaccaagaaaaaggacttggaggaaaacattgaaatctgctcccaaaagctggtcagggcagagaaactgatcagtggtcttgggggagagaaggacagatggaccgaagctgcccgacagctggggatccgctatactaatctgactggtgacgtgttgctgtcctcaggaactgtggcttacctgggcgcttttacagtggattatcgggtccagtgccaaaatcagtggttggctgaatgtaaggacaaggtcatccctggcttcagtgacttcagtctcagccacacgttaggggatcccataaaaatccgtgcctggcagattgctgggcttcccgttgactccttctccatcgacaatggcatcattgtatccaattccagacgctgggccttaatgattgaccctcacgggcaggccaataaatggattaagaacatggagaaggcgaataaactggctgtcatcaagttctctgatagcaactacatgaggatgctggaaaacgcgctgcagttaggcacccctgtcttgattgaaaacattggagaagagctggatgcttctatcgaacctatcttgctcaaggcaacattcaaacagcaaggagttgagtacatgaggctgggtgaaaacatcattgaatattccagggattttaagttatacatcacaacccgtttgaggaatccacattacctcccagaagttgccgtgaaggtctgtctcctcaacttcatgatcacccccttgggtctccaagatcaactccttggcatcgtggctgcgaaggagaagccagagctggaagagaaaaagaaccagttgattgtggaaagtgccaagaacaagaagcatctcaaggaaattgaagataagatcttggaggttctctccatgtccaagggtaacatcctggaggatgaaaccgccatcaaagttctgtcctcctccaaagtgctatctgaagagatctcagagaaacagaaagttgcttccatgacagaaacgcagattgacgagactcggatgggctacaagccagtggctgtgcattctgccaccatcttcttttgtatctcggacctggccaacatcgagccgatgtaccagtactccctgacttggttcataaatctctacatgcattccttgacccacagcacgaagagcgaggaactgaatctgcgcatcaagtacatcattgaccatttcaccctgagcatctacaacaacgtgtgccgttctctgtttgagaaggacaagctactcttctctctcctcctgaccatcggcatcatgaaacagaagaaggaaattacggaggaggtgtggtacttccttctcactggaggcatcgcactggataacccctaccccaatccagctccccaatggctgtctgagaaggcatgggcagagattgtccgtgcatctgccttacccaaactgcatggcctgatggagcatttggaacagaacctgggtgaatggaagctgatctatgactcggcctggccccatgaggagcaactccctgggtcttggaagttctctcaaggattggagaagatggtgatccttcgatgtttgcggcctgacaaaatggtgccagcggtccgggagttcattgctgaacatatgggaaagctgtatatcgaagcccctacgttcgatctccagggatcctacaatgattccagctgctgtgcgcctttgatttttgtgttgtctccaagtgcagacccaatggcaggcctgctgaagtttgctgatgatcttggtatgggaggtaccagaacacagaccatctcccttggccaaggccaaggccctattgctgccaaaatgatcaacaatgccatcaaagacgggacctgggtggtcttacagaactgccacctggccgcaagctggatgcctaccctggagaagatttgtgaggaggtgattgttcctgagagcaccaatgccagattcagactctggctaaccagctatccatcagagaagtttccagtcagcattctccagaatggaatcaaaatgaccaatgagccccccaaagggctccgggccaacctgttgcgctcctacctcaatgaccccatctcagatcctgtgttcttccaaagctgtgcaaaggcggtgatgtggcaaaagatgttatttggcctttgtttcttccacgccgttgttcaagagagaagaaacttcggccccctagggtggaatattccctatgaattcaacgaatctgacctgaggattagtatgtggcagatccagatgtttctcaatgactacaaggaggtgccctttgatgctctgacctacctgacaggggaatgtaattacggaggcagagtgactgatgacaaagaccggcgtctcctgctgtcacttctgtccatgttctactgtaaggaaattgaggaggactattactccctcgctcctggagacacttactacatccctcctcatggctcctaccagtcctatatcgactatctcaggaatctccccatcacagcccacccagaagtgttcggcctccatgagaacgcagacatcaccaaagacaaccaggaaaccaaccagctgtttgagggggtcctgctgaccctccctagacagtcaggaggaagtggcaagtcccctcaggaagtggttgaggagttggcacaagacattctctccaagcttcccagagactttgacctggaagaggtcatgaagttgtaccccgtggtctatgaagaatccatgaataccgtcctaaggcaggagctcatcagattcaacaggctgaccaaagtggttcggaggagcctcatcaatcttggccgagccatcaaaggacaggtcctgatgtcctcggagctagaggaagtctttaacagcatgcttgtgggtaaagtgccagccatgtgggcagccaagtcttacccatcactgaagcctctggggggctacgtggctgacctgctggcccgcctgaccttcttccaggaatggattgacaaggggccccctgtggtattttggatctctggattctacttcacacagtcttttttgactggcgtctctcaaaattatgcccggaaatataccatccccattgaccacattggatttgagtttgaggtaaccccacaagaaacagtgatggagaataaccccgaagatggggcctacatcaaagggctcttcttagaaggtgcccgttgggacaggaaaacgatgcagattggggaatctctccccaaaatcctctatgacccactgcccatcatttggctgaaacctggggagagcgcaatgtttctgcatcaggacatctatgtgtgtccagtctacaaaacaagtgcccgcagaggaaccctctccaccacaggccactctaccaactatgtcctctccattgagcttccaacagacatgccccagaagcactggataaaccgaggggtggcctcactgtgccagctggataactgatggcatttgtctcaagacagaaaataaaaagcatttcattctt

SEQ ID NO: 8994 - DNA, 3073 bp, Homo sapiens
  source 1..3073: mol_type = unassigned DNA
gttaagagtccagggaggaggagggagaacagttcgggctgccaggatgttgtttggagggggaactcctcagcgggccaaagtctatgacctcagagaggcaacctcatgaacagagctttcagaacatctggaaagttccattgttggtgtcatccccattatgctataaggaagtgtgaatttcagaccaactggataggagaggcacatccctggagaagctgaaagctctttattcattttaaaaaaatagctacaattagagtggacaccatgggtgacatggattgctcatctcagaagatcgccaaaagtgactccatacatcacatgagccactcccaggggcagccagagctgcctcctctgcctgcttctgctaatgaggaaccgtctggactctatcagactgtcatgtcacacagcttttacccgcccttgatgcaacgcacgtcatggaccttggctgcacccttcaaagaacagcatcaccaccgtggacccagtgattccatcgccaacaactactccttgatggcccaggacctgaagctgaaagatctgctgaaggtctaccaaccggccaccatcagtgtccctagggacaggaccggtcaggggctgccatcatcaggaaatagaagctcatcagagcccatgaggaaaaaaacgaagttttcctccagaaacaaagaggattccactaggatcaagttggccttcaagacgtcaatcttctcacccatgaagaaggaggtaaagacatctttgacgttcccaggaagcagaccaatgagtccagaacagcagctcgatgtcatgttacagcaggagatggaaatggaaagtaaagaaaagaagccatctgaatcggacctggagagatactattactatctgaccaatggaattcgcaaagacatgattgcccctgaggagggtgaagtgatggttcggatttcaaagctgatttctaacacgctgctgacgagtcccttcctggagcccctgatggtggtcctcgtgcaggagaaggagaatgactattactgtagcctcatgaaaagcatcgttgattacatcctcatggacccaatggagagaaaacggctctttattgagagcatcccccgcttgtttcctcaaagagtgatccgggcccctgtgccctggcacagtgtctacaggagcgccaagaagtggaacgaggagcatctgcacacggtgaaccccatgatgctcaggctgaaagaactgtggtttgcagaattcagagacctcaggtttgttcgaacagcagaaatactagcgggaaaattgcctctgcagcctcaggaattttgggatgtgatccagaaacactgcctggaggcacaccagactcttctcaacaagtggatccccacctgcgcccagctttttacctcacggaaggagcactggattcattttgctcccaagagcaactatgactcaagtcgaaacattgaggaatattttgcttctgtggcatcattcatgtcgctgcagcttagggagctggtcattaagtcacttgaggacctcgtttcccttttcatgatacacaaagatgggaatgattttaaggagccctaccaagagatgaagtttttcatacctcagctaatcatgatcaaacttgaagtcagtgaacccattattgtcttcaatccatcttttgatggctgctgggaattaatacgtgactctttcctggaaattattaagaactctaatgggatccccaaggtggaatctgtcctgttcccagagctgaaaggatataatctgctccttggaactgttaacgcagaagaaaaacttgtttctgattttttgattcaaactttcaaggtatttcagaaaaatcaagttggcccctgcaaatatttaaatgtctacaaaaagtatgttgacttattggataacacggcagagcaaaacatcgctgcgttcctgaaagaaaatcatgacattgatgattttgtgacgaagatcaatgccataaagaaacggagaaatgaaattgcatccatgaacatcaccgtgcctttagccatgttctgccttgatgctacggccctaaatcatgatctctgtgagcgagctcaaaatcttaaagaccatctgattcaattccaagtggatgtaaaccgagacaccaataccagcatttgtaatcagtacagccacatcgcagacaaagtcagtgaggttcctgccaacactaaggagctggtatccctcattgaattcctaaagaaatccagtgctgtcactgtgttcaaactcaggaggcaacttagagatgcaagtgaacggctggagttcctgatggactatgcagacttgccgtatgaggacatcaaattgaacagcactctgttcctctggccagaccagattgaagatatctttgacaacagccggaacttgctccttcacaagagggatcaggcagaaatggatctgattaaaaggtaccgggagagtctgggattgtcttggaaatgagacctgacttcttcacccatgctgcaggttcctggttctgtctaagccatcccccagctcactccatggcaacgtgtgggcgaagtctgaaaacaattggtggagaaggcatttcctttggtttcccactgagggatgttttctttaagactgcttcactgtaataacctctgctaatgtcttcccttcctgccttgaataattggaatttggtggtgcagagagaaaaacgcaaaactagtggcatgttataacggcctccccaataataatagtgaaattgtcagccttacattggagaccacagatctgtaagatatcaagatatcaagataataaaggcatggcaggggggctgagaaattgcctattttgcagctggtcttattcagagctaatgtggctgtaatcacttattcattcattatttgtcaattcagttggtatttattgcggattttcatgatgtgctatgctctgttctagacatctatgtgtgtttggctgctaaataaagattttaatccagcgacat

SEQ ID NO: 8995 - DNA, 12221 bp, Homo sapiens
  source 1..12221: mol_type = unassigned DNA
atgggagctacagggcgcctcgagctcacactggccgcccctccccatccgggcccagcctttcagcgttcaaaagccagggagacccaaggagaggaggaagggagtgaaatgcagatcgccaaaagtgactccatacatcacatgagccactcccaggggcagccagagctgcctcctctgcctgcttctgctaatgaggaaccgtctggactctatcagactgtcatgtcacacagcttttacccgcccttgatgcaacgcacgtcatggaccttggctgcacccttcaaagaacagcatcaccaccgtggacccagtgattccatcgccaacaactactccttgatggcccaggacctgaagctgaaagatctgctgaaggtctaccaaccggccaccatcagtgtccctagggacaggaccggtcaggggctgccatcatcaggaaatagaagctcatcagagcccatgaggaaaaaaacgaagttttcctccagaaacaaagaggattccactaggatcaagttggccttcaagacgtcaatcttctcacccatgaagaaggaggtaaagacatctttgacgttcccaggaagcagaccaatgagtccagaacagcagctcgatgtcatgttacagcaggagatggaaatggaaagtaaagaaaagaagccatctgaatcggacctggagagatactattactatctgaccaatggaattcgcaaagacatgattgcccctgaggagggtgaagtgatggttcggatttcaaagctgatttctaacacgctgctgacgagtcccttcctggagcccctgatggtggtcctcgtgcaggagaaggagaatgactattactgtagcctcatgaaaagcatcgttgattacatcctcatggacccaatggagagaaaacggctctttattgagagcatcccccgcttgtttcctcaaagagtgatccgggcccctgtgccctggcacagtgtctacaggagcgccaagaagtggaacgaggagcatctgcacacggtgaaccccatgatgctcaggctgaaagaactgtggtttgcagaattcagagacctcaggtttgttcgaacagcagaaatactagcgggaaaattgcctctgcagcctcaggaattttgggatgtgatccagaaacactgcctggaggcacaccagactcttctcaacaagtggatccccacctgcgcccagctttttacctcacggaaggagcactggattcattttgctcccaagagcaactatgactcaagtcgaaacattgaggaatattttgcttctgtggcatcattcatgtcgctgcagcttagggagctggtcattaagtcacttgaggacctcgtttcccttttcatgatacacaaagatgggaatgattttaaggagccctaccaagagatgaagtttttcatacctcagctaatcatgatcaaacttgaagtcagtgaacccattattgtcttcaatccatcttttgatggctgctgggaattaatacgtgactctttcctggaaattattaagaactctaatgggatccccaagctgaaatacataccacttaagttctccttcactgctgctgctgctgatcggcaatgtgtgaaagcagctgagccaggagagcccagcatgcacgcggctgccactgcaatggcagagctgaaaggatataatctgctccttggaactgttaacgcagaagaaaaacttgtttctgattttttgattcaaactttcaaggtatttcagaaaaatcaagttggcccctgcaaatatttaaatgtctacaaaaagtatgttgacttattggataacacggcagagcaaaacatcgctgcgttcctgaaagaaaatcatgacattgatgattttgtgacgaagatcaatgccataaagaaacggagaaatgaaattgcatccatgaacatcaccgtgcctttagccatgttctgccttgatgctacggccctaaatcatgatctctgtgagcgagctcaaaatcttaaagaccatctgattcaattccaagtggatgtaaaccgagacaccaataccagcatttgtaatcagtacagccacatcgcagacaaagtcagtgaggttcctgccaacactaaggagctggtatccctcattgaattcctaaagaaatccagtgctgtcactgtgttcaaactcaggaggcaacttagagatgcaagtgaacggctggagttcctgatggactatgcagacttgccgtaccagattgaagatatctttgacaacagccggaacttgctccttcacaagagggatcaggcagaaatggatctgattaaaagatgctcagaatttgagttgagacttgagggctaccacagagaactggaaagttttaggaagcgcgaagtgatgactacagaagaaatgaagcacaatgttgaaaagcttaatgagctttcaaagaacctaaatcgggcgtttgcagagtttgagttgatcaataaggaggaagagctattggaaaaggagaagagtacttaccctcttctgcaggccatgctgaagaacaaagtaccttatgagcagctgtggtcgacagcctatgagttcagcatcaagtcagaggaatggatgaatggacccctcttcttactgaatgctgagcaaattgcggaggagatagggaatatgtggaggacaacgtataaactgatcaagaccttgtctgatgtgcctgcacccaggcgcttagcagagaatgtgaagatcaagatcgataagttcaagcagtacattcccatcctcagtatttcctgcaacccaggaatgaaagaccgacactggcagcagatcagtgagattgttggctatgagataaagcccaccgaaacgacctgcctctcaaatatgctcgaatttggattcggcaaattcgttgaaaaattggagcccattggtgcagctgccagcaaggaatactctctggagaaaaacttggatagaatgaagttggattgggttaacgtgacgttcagcttcgtgaaatacagggacactgatacaaacatcttgtgtgcaattgatgacattcaaatgctacttgatgatcacgtgataaagacccagaccatgtgtggctccccattcatcaaaccaatagaagcagaatgccggaaatgggaagaaaagctaattcgcatacaagacaatttggatgcctggttgaaatgccaagccacctggctgtacctggaaccaatcttcagttcagaggacatcatagcccagatgccagaagaggggaggaaatttggcattgttgatagttactggaaatcacttatgtcccaagcggtgaaagataacaggattctggtggcagccgaccagccacggatggcagagaagcttcaagaagccaactttctcttggaggacatccagaaagggctgaatgattacttggagaagaagagactattcttccccagattcttcttcctatcaaacgatgagctgctggaaatcttgtccgagacaaaggaccctctccgagtgcagccgcacttgaagaagtgctttgaaggaattgccaagcttgagtttacagacaatctggaaattgtgggcatgatcagctcggaaaaagaaactgttccattcatacagaaaatctacccagctaatgccaagggcatggtggaaaagtggctccagcaggtggagcagatgatgctggccagtatgcgagaagtcattggacttgggattgaagcatatgtcaaggtccctcgaaatcactgggtcttacagtggcctggacaggtggttatctgtgtctcctccatcttttggacccaggaggtgtcccaagccctggcggaaaataccttactggattttctgaaaaagagcaatgatcagattgcgcagattgtccagctggtgcgagggaagctgagcagtggagctcgactcactctcggggccctcacggtcatcgatgtccacgcccgcgacgtggtggccaagttatctgaggacagggtctccgatctgaatgatttccaatggatctcacagctgcgctactactgggtggccaaggatgtgcaggtgcagattatcaccacagaagccttgtatggctatgagtacctgggaaactccccccggctggtgatcacacccctcaccgaccgctgctacaggacactgatgggagctttgaagctgaaccttgggggtgctccagagggtccagctgggactggcaagacagaaaccaccaaagatttggccaaagccttggctaagcagtgtgtggtcttcaactgctccgatggtttggattacaaagctatggggaagttcttcaaggggctggcacaggctggagcatgggcgtgctttgatgagttcaacaggatcgaggtagaagtgctgtctgtggtcgctcagcagatcctcagcatccaacaagccatcattcggaagctaaagacattcatctttgaagggactgagctctctctgaacccaacctgcgctgtgttcatcaccatgaaccccgggtatgctggcagggctgaactgcccgacaatctcaaggccttgttccggacagtggccatgatggtcccagattacgccctcattggagaaatctccctctactccatggggtttctggactccagaagtctcgcccagaagatcgttgcgacctaccgcctgtgctcggaacaactgtcctctcagcatcactatgactacggtatgcgcgctgtcaagtctgtgcttactgccgcaggaaacctgaagctcaagtatccagaggagaatgaaagtgtcctgctgctccgggcattgcttgatgtcaatctggccaagttcttagcgcaagatgtccctctgtttcagggaattatatctgatttatttcctggagttgttcttccaaagccagactatgaagtttttctgaaagtgctgaatgataacatcaaaaagatgaaactccagccagtaccttggtttatagggaaaattatccagatctacgaaatgatgctggtgagacatggctatatgattgtaggagaccccatgggcggcaagacctctgcttataaagtgttggctgcagctctcggcgatttacacgcagccaatcagatggaggagtttgctgtggagtacaagatcatcaaccccaaggctatcacgatggggcagctgtatgggtgctttgaccaagtgagccacgagtggatggatggtgtccttgccaatgctttccgggagcaagcgtcttcactctctgatgatcgcaagtggattatatttgatgggccagtggatgctatttggattgaaaatatgaacactgttctggatgacaataaaaagctgtgtctcatgagtggggaaattatccagatgaactccaagatgagcctgatcttcgagcccgccgacctcgagcaagcctctccagccactgtgagcaggtgtgggatgatctacatggagccccatcaactaggctggaagcccctgaaggattcctacatggacaccctgccctccagtctcaccaaggagcacaaagaattgatgaaatcagggcagtagaagaggaggaaatggaattaggtgaaggcctgtcaagtcaacagatctttctctggctccaaggactgtttctcttttccttggtgtggaccgtggctggcaccatcaacgcagacagcagaaagaaatttgatgtgtttttccgcaacctgatcatgggcatggatgataaccacccaaggcccaaaagcgtcaaactcaccaaaaacaacatctttccagaaagaggaagcatctatgatttttattttatcaaacaagctagtggacattgggaaacgtggacacagtatatcaccaaagaggaggaaaaagttccagctggtgcaaaggtctcagaactcatcatccccacaatggagacagcccggcagtccttcttcttgaaaacctacttagaccatgagattccaatgctgttcgtgggtcccacaggcactggcaaatcagccatcaccaacaacttccttctccaccttcccaaaaatacgtacctacccaactgcatcaatttctctgccagaacctcagccaatcagacccaggatatcatcatgtccaagctggatcgacgacggaagggccttttcgggcctcccatagggaagaaagcagtggtgtttgtggatgacctcaacatgccagccaaagaggtgtatggggcccagccacccatcgagctcctgaggcagtggattgaccatggttactggtttgacaaaaaagacacaaccaggctggacatcgtggacatgctgctcgtgacagccatggggccccccgggggaggaaggaatgacattactggacgattcactcgccatctgaatatcatttccatcaatgcctttgaggatgacattttaaccaagattttcagttcgattgttgactggcacttcgggaaagggtttgatgtgatgtttttaaggtacggaaagatgctggtccaagctactaagacaatttatagagatgcagtggagaacttcttgccaactccctcgaagtcacattacgtctttaacctgcgggacttctcacgagtgattcaaggggtcctgctgtgccctcacacacacctgcaggatgtagaaaaatgtatccggctttggatccatgaggtttatcgggtcttctatgatcgtctgattgacaaggaggacagacaggtctttttcaacatggtgaaggaaaccacctccaattgcttcaagcagaccatagagaaggtgcttatccacttgtcacccactggaaagatagtcgatgataacattcgaagcctcttctttggagattatttcaagccagaaagtgaccaaaaaatctacgatgagatcactgacctgaaacagctgactgtggtcatggagcactatctggaagaattcaacaacatcagcaaggcccccatgtccctggtcatgttcaggtttgccattgagcacatctctaggatctgccgtgtcctgaagcaggacaaaggccacctgctcctggtgggcatagggggcagcgggcggcaaagtgccgccaaactgtccacattcatgaacgcatacgagctataccagattgagatcaccaagaactacgcaggcaatgactggcgagaagatcttaagaagatcatactgcaggtcggtgtggccaccaagagcaccgtgttcctcttcgccgacaaccagatcaaggatgaatcattcgtggaggacatcaacatgcttctgaacacaggtgacgtgcctaacatcttccctgctgacgagaaggctgacatcgtggagaagatgcagactgcagccaggacccaaggagagaaggttgaagtcactcctctttctatgtataacttctttattgagagggtaattaacaaaatctccttttcattagccatgagtccaataggggatgccttcaggaaccgcctgcggatgttcccttcgctgatcaattgctgtacgattgattggttccagtcctggcccacagatgccctagagttggtggctaacaaatttctagaggatgtggagcttgatgacaacattcgggtagaggtcgtgtccatgtgcaaatatttccaagagagcgtcaagaagctgtcactcgattattacaacaaacttcgaagacacaactatgttacccccacctcctaccttgaattgattctaaccttcaagacgctcctgaatagcaagaggcaagaggtggctatgatgaggaaccgctacctgacaggcttgcagaaactcgactttgcagcttctcaggtagcggttatgcaaagagaactgacagctcttcaacctcaactcatcctcacctccgaggaaactgccaagatgatggtgaaaattgaagcggagacgagagaagctgatggaaagaaacttctggtgcaggcagatgaaaaagaagccaatgttgctgctgccattgcccaaggaatcaagaacgaatgtgagggggacctagctgaggcaatgcctgcactcgaggctgcactagctgctctggacaccctgaacccggccgacatctcgctggtgaagtcgatgcagaacccaccaggccctgtcaaactggtcatggagagcatctgcatcatgaaagggatgaagccagagaggaagccagaccccagtggctccggtaagatgatagaagattactggggggtatccaaaaagattcttggggatctgaaattcttggagagtcttaagacatatgacaaagacaacatccccccactgaccatgaagcggatccgggaaaggtttatcaatcacccggaattccagccagctgtcattaaaaatgtatcgtcggcctgcgagggtctgtgcaagtgggtgagggccatggaggtgtacgatcgcgtggccaaggtggtggctcccaaacgggagcgactgagggaggcagaggggaagctggctgcacagatgcagaagctgaaccagaaaagagcagagctgaagctggtggtagatcggctccaggccctgaatgacgactttgaagagatgaacaccaagaaaaaggacttggaggaaaacattgaaatctgctcccaaaagctggtcagggcagagaaactgatcagtggtcttgggggagagaaggacagatggaccgaagctgcccgacagctggggatccgctatactaatctgactggtgacgtgttgctgtcctcaggaactgtggcttacctgggcgcttttacagtggattatcgggtccagtgccaaaatcagtggttggctgaatgtaaggacaaggtcatccctggcttcagtgacttcagtctcagccacacgttaggggatcccataaaaatccgtgcctggcagattgctgggcttcccgttgactccttctccatcgacaatggcatcattgtatccaattccagacgctgggccttaatgattgaccctcacgggcaggccaataaatggattaagaacatggagaaggcgaataaactggctgtcatcaagttctctgatagcaactacatgaggatgctggaaaacgcgctgcagttaggcacccctgtcttgattgaaaacattggagaagagctggatgcttctatcgaacctatcttgctcaaggcaacattcaaacagcaaggagttgagtacatgaggctgggtgaaaacatcattgaatattccagggattttaagttatacatcacaacccgtttgaggaatccacattacctcccagaagttgccgtgaaggtctgtctcctcaacttcatgatcacccccttgggtctccaagatcaactccttggcatcgtggctgcgaaggagaagccagagctggaagagaaaaagaaccagttgattgtggaaagtgccaagaacaagaagcatctcaaggaaattgaagataagatcttggaggttctctccatgtccaagggtaacatcctggaggatgaaaccgccatcaaagttctgtcctcctccaaagtgctatctgaagagatctcagagaaacagaaagttgcttccatgacagaaacgcagattgacgagactcggatgggctacaagccagtggctgtgcattctgccaccatcttcttttgtatctcggacctggccaacatcgagccgatgtaccagtactccctgacttggttcataaatctctacatgcattccttgacccacagcacgaagagcgaggaactgaatctgcgcatcaagtacatcattgaccatttcaccctgagcatctacaacaacgtgtgccgttctctgtttgagaaggacaagctactcttctctctcctcctgaccatcggcatcatgaaacagaagaaggaaattacggaggaggtgtggtacttccttctcactggaggcatcgcactggataacccctaccccaatccagctccccaatggctgtctgagaaggcatgggcagagattgtccgtgcatctgccttacccaaactgcatggcctgatggagcatttggaacagaacctgggtgaatggaagctgatctatgactcggcctggccccatgaggagcaactccctgggtcttggaagttctctcaaggattggagaagatggtgatccttcgatgtttgcggcctgacaaaatggtgccagcggtccgggagttcattgctgaacatatgggaaagctgtatatcgaagcccctacgttcgatctccagggatcctacaatgattccagctgctgtgcgcctttgatttttgtgttgtctccaagtgcagacccaatggcaggcctgctgaagtttgctgatgatcttggtatgggaggtaccagaacacagaccatctcccttggccaaggccaaggccctattgctgccaaaatgatcaacaatgccatcaaagacgggacctgggtggtcttacagaactgccacctggccgcaagctggatgcctaccctggagaagatttgtgaggaggtgattgttcctgagagcaccaatgccagattcagactctggctaaccagctatccatcagagaagtttccagtcagcattctccagaatggaatcaaaatgaccaatgagccccccaaagggctccgggccaacctgttgcgctcctacctcaatgaccccatctcagatcctgtgttcttccaaagctgtgcaaaggcggtgatgtggcaaaagatgttatttggcctttgtttcttccacgccgttgttcaagagagaagaaacttcggccccctagggtggaatattccctatgaattcaacgaatctgacctgaggattagtatgtggcagatccagatgtttctcaatgactacaaggaggtgccctttgatgctctgacctacctgacaggggaatgtaattacggaggcagagtgactgatgacaaagaccggcgtctcctgctgtcacttctgtccatgttctactgtaaggaaattgaggaggactattactccctcgctcctggagacacttactacatccctcctcatggctcctaccagtcctatatcgactatctcaggaatctccccatcacagcccacccagaagtgttcggcctccatgagaacgcagacatcaccaaagacaaccaggaaaccaaccagctgtttgagggggtcctgctgaccctccctagacagtcaggaggaagtggcaagtcccctcaggaagtggttgaggagttggcacaagacattctctccaagcttcccagagactttgacctggaagaggtcatgaagttgtaccccgtggtctatgaagaatccatgaataccgtcctaaggcaggagctcatcagattcaacaggctgaccaaagtggttcggaggagcctcatcaatcttggccgagccatcaaaggacaggtcctgatgtcctcggagctagaggaagtctttaacagcatgcttgtgggtaaagtgccagccatgtgggcagccaagtcttacccatcactgaagcctctggggggctacgtggctgacctgctggcccgcctgaccttcttccaggaatggattgacaaggggccccctgtggtattttggatctctggattctacttcacacagtcttttttgactggcgtctctcaaaattatgcccggaaatataccatccccattgaccacattggatttgagtttgaggtaaccccacaagaaacagtgatggagaataaccccgaagatggggcctacatcaaagggctcttcttagaaggtgcccgttgggacaggaaaacgatgcagattggggaatctctccccaaaatcctctatgacccactgcccatcatttggctgaaacctggggagagcgcaatgtttctgcatcaggacatctatgtgtgtccagtctacaaaacaagtgcccgcagaggaaccctctccaccacaggccactctaccaactatgtcctctccattgagcttccaacagacatgccccagaagcactggataaaccgaggggtggcctcactgtgccagctggataactga

SEQ ID NO: 8996 - DNA, 2340 bp, Homo sapiens
  source 1..2340: mol_type = unassigned DNA
aaaaagacctactttgtgagagagtatagtgtcctccatgatgtcaacctcaatgaatcagataggtcccaagccatatctgtgggttaataatccatcatgaatcaattgccattaacttgccaagaactttttttcaatttcagtttgaagtttcactcttctgtgtgcttatttgtttgttggtttgttatgttttagccactgtaggcttctagagagaataaccattcctttcctggcccacgccctttccagtttgctttccagggtagagttactaattaaattccagacacttattaacaaacttttattactagacaggatcatgcacatggatgtaactccttttagctccatcttttcctcactccctctgattggttggtatgaccaaagggccattgtccagttccatatagggaagggatctgtggggtcttgctggctagctccctcacccttccaccttctcactctctccatgcattatgtatgcttcacatgggccttgctcatgtgaaacgaatgcccaggagttcaaggttgcagtgcaaggaggcccaagcattcttctctttgcaatctggtacttacagggttctaagtactccattaaaactgggtgtgtgggaggagaagaaacactgggcagctctcctacaaccagtatccctaggaaggaaatggaagaaaagaccctgtaatttggatgactatgtatggggacagctgaaatacataccacttaagttctccttcactgctgctgctgctgatcggcaatgtgtgaaagcagctgagccaggagagcccagcatgcacgcggctgccactgcaatggcaggtaccagggccggtactacatttgatgaattacaatgccaagaagacatggtttgtaccaggtttgaaaacaaggcctatgtgaataccaatgactttacgagacaataaggaaaaacaacgtagactgagttccccatctagtgacacccacagccctagcttcctccttaagcccctcagactgttttatctctgaactggttagtgaagacttaaaaacatagtcctgcaggttgactaagaaaaatctttaagaatggcaactggtgggtgttaccttcactcactgcaagatctgccgtatatatggtttaaaaagaattttaaaagttagttaaggtcaatcatggtggctcacacctataattttagagctttgggaggtcgagaagcaggaagattgcttgaggccaggagttcaatatcagcctgggcaatatagcaagacctcatctctacaaaattaaattagctggggtggtggcacacgtctgtagtcctagctactcaggaggctgaggcaggaggatcgcttgagcccagaagttcaagggtgcagtgagctatgattgcaccattgcactccagcctgggcaacagagtgagactctgtcaaaaaaaaaaaaaaaaaagttggtagggaaaagctaacaagagacttttgaaaatagaaaatagagtaaatagcattattcaagacacagaaagaaagcaggaaagcatatttgtgagaaataattattaaaggggctaggcacagtggctcacacctgtaatcccagcactttggtaggccaagatggctggatcacctgaggtcaggcgttcaataccagcctggccaacatggtgaaaccccgtctctactaaaaatacaaaaaattagccgagatggctggatcatctgaggtcaggagttcaataccagcctagccaacatggtgaaaccccgtctctactaaaaatacaaaaaattagctgggattacaggcacacaccacaatgccaggctatttttttgtattttcagtagagacagggcttttgccatgtcgcccaggctggtctcgaactcctgagctcaggcaatccactccccctttggcctcccaaagtgctgggattacaggcgccaccgcgcctggccaaaaggcatttcattctttttattttattttattattatactttaagttctagggtacatgtgcacaacgtgcaggtttgttacatacgtatacatgtgccatgttggtgtgctgcacccattaactcatcatttacattaggtgtatctcctaatgctatccttccccccccaccctccccaccccacgacaggcccaggtgtgtgatgttccctttcctgtgtccaagtgttctcattgttcaattccgacctatgagtgagaacgaaggcatttcattcttgatgatggtggtggtgatgatgttgatgacaattatattaataaagcaattgctatg

SEQ ID NO: 8997 - DNA, 15633 bp, Homo sapiens
  source 1..15633: mol_type = unassigned DNA
agtaaaactttccatttggaagcctgttggatgttgagcaggtctgccaggagttagaagaccattccggaagagctgactccagcctgtccatgcacggctacaatgtttaggattgggaggagacagctctggaagcatagcgtcactcgagttttaacgcaaagactgaagggagagaaggaagccaagcgggctcttttggatgcgaggcataactacttatttgcaattgtggcttcctgtttggacctgaacaaaaccgaagtggaggatgccattcttgaagggaatcagattgaaagaattgatcaactttttgctgttggaggtctccgacacctcatgttttactatcaagatgtggaggaagcagaaacaggacaacttggctctctaggaggggtaaatcttgtttctggaaagattaaaaaacctaaggtgttcgtgaccgagggaaacgatgtggctcttactggggtatgtgtgttcttcatcaggactgacccttccaaagccatcacccctgacaacatccaccaggaggtgagttttaacatgttagatgcggcagatggaggcctgctcaacagtgtgagacgtttgctgtcggacatcttcattcctgctctcagagccacgagccatggctggggcgagctcgagggccttcaggacgcagctaacattcgccaggagttcttgagctccctggaaggctttgtgaacgtcctgtcgggtgcacaggagagtctgaaggagaaggtgaaccttcgaaagtgtgacatacttgaactgaaaaccctaaaggaacctacggactacttgactctagcaaataaccctgagactttgggaaaaatagaggattgcatgaaagtatggatcaaacagacagaacaggttcttgctgaaaacaatcagctgctgaaggaagcggatgacgttgggccacgagcggagctggagcactggaaaaaaagactctccaagtttaactaccttttggaacaattgaaaagcccggatgtgaaggctgtgctggcagtgcttgcggcggccaagtcgaaactgctgaagacttggcgggagatggatattcgaatcactgatgcaactaatgaagcaaaggacaatgtgaaatacttgtatacacttgaaaaatgttgtgaccctttgtacagcagtgatcccctatccatgatggatgctattcctacacttataaatgcaattaaaatgatctatagtatctctcattactataatacctctgagaagatcacatctctgtttgtaaaggtgacaaatcagattatatctgcatgtaaagcctatattaccaataatggaaccgcttccatctggaaccagccacaggatgttgttgaagaaaaaatactatctgcgattaaactgaaacaggaataccagctctgctttcacaagacaaaacaaaagcttaaacaaaatccaaatgcaaaacaatttgattttagcgagatgtatatttttggaaaattcgaaacttttcaccgacgccttgccaagataatagacatctttacaaccctcaagacgtattcagtcctgcaagattccacaattgaagggctggaagacatggccactaaataccagggcattgtggcaaccataaagaaaaaggaatacaatttcctagaccagcggaaaatggattttgaccaagattacgaagagttttgcaagcagactaatgaccttcataacgagttgcggaagttcatggatgttacatttgcaaagattcaaaacacaaatcaagctctaagaatgttgaagaaatttgaaagattgaatatacctaatcttggtattgatgacaaatatcaacttatccttgagaactatggggctgacattgatatgatttcaaagctgtatacaaagcagaaatacgatcctcctctggctcgaaaccagcctcccatcgctggaaagattttgtgggcccgccagctcttccataggattcagcagcccatgcagcttttccagcagcacccagctgtgctaagcacggcagaagccaaacctataattcgcagttacaacaggatggccaaggtcctcctggagtttgaggtcctcttccacagggcgtggcttcggcaaattgaagaaattcatgtaggtcttgaggcttcattattggtgaaggctccaggcacaggggaattgtttgtaaactttgaccctcagatattaatcttatttagagaaacagagtgcatggcccagatgggtctggaagtctctccactggcaacttccctcttccagaaacgagatagatacaaaaggaacttcagtaacatgaagatgatgctagctgaatatcagagagtgaagtcaaaaatacctgctgccattgagcaattgattgtccctcacttggccaaagtggatgaagctctccaacctggcttggctgcactgacctggacatcactgaatattgaggcttatttagaaaacacttttgcaaagatcaaggacctggagttgctgcttgacagggtcaatgatttgattgagttccgcattgatgccattctagaagaaatgagcagcacgcctctttgtcagcttccccaggaggagccactaacctgtgaagagtttctccaaatgacaaaggatctttgtgtaaatggtgcacaaatactacattttaaaagctcattagtggaggaggcagtcaatgagcttgtaaatatgttgctggatgtggaagttttatctgaagaagaaagtgaaaaaatatccaatgagaatagtgttaattacaaaaatgaaagttcagcaaaaagagaagaaggaaattttgacaccttgacatcatctattaatgccagggccaatgccctgcttttgacgacagtcacgaggaaaaagaaagaaactgagatgttaggggaagaagcccgcgagttactctctcatttcaaccatcagaacatggatgctcttctgaaagttacaaggaatacactagaggccattcgcaaacgtattcattcctctcacacaattaacttccgggacagtaacagtgcctctaacatgaagcagaacagtttgcccattttccgggcaagcgtcactctggccattcccaacatcgtcatggcccctgccctggaagatgtacagcagaccctgaacaaagccgtggagtgcatcatcagtgtccctaagggggtcagacagtggagcagtgaactgttgtccaagaaaaagatacaagaaagaaaaatggctgctttgcagagtaatgaagacagtgattctgatgttgaaatgggagaaaatgaacttcaagataccttggagatagcatctgtaaatttacccattcccgtgcaaaccaagaactattataagaatgtttctgaaaacaaagagattgtaaaattagtttctgtgcttagcacaattatcaactccaccaaaaaggaagttattacatccatggattgcttcaaacgctacaatcacatttggcaaaagggaaaagaagaagccattaagacatttattacacagagccccttgctttctgaatttgagtcccagattctctatttccaaaacctagagcaggaaattaatgctgagcctgaatatgtctgtgtgggttccattgctctgtacacagctgacttgaagttcgccctgactgctgagacaaaggcctggatggttgtcattggacgccactgtaacaaaaaataccggagtgagatggaaaacatttttatgcttattgaagaattcaataagaaactaaatcgtccaattaaggacctagatgatattcggattgcaatggcagcgctgaaagaaataagggaggagcaaatctccattgactttcaagtaggacctattgaggaatcttatgccctgcttaacagatatggacttctgatagcaagggaagagatagacaaagttgatacactgcactatgcttgggagaagctgctggcacgtgctggcgaagtccagaataaattagtctcactgcagcccagtttcaagaaagagcttattagtgctgtggaggtattcctccaagattgtcaccagttttatctggactatgatttgaatggtccaatggctagcggcttgaagccccaggaagccagtgacaggcttatcatgtttcagaatcaatttgataatatctatcggaaatacatcacatatactggaggagaggagctttttggcctgccagctacacagtatcctcagcttcttgaaataaagaagcaactaaatcttctacagaaaatatatactctgtacaacagtgtcatagaaactgtaaatagctattatgatattctttggtcagaggtgaatattgaaaaaattaacaatgaactcttagaattccagaacagatgtcgaaagcttccccgggccttgaaggactggcaggcttttttggacctgaagaagatcattgatgatttcagcgagtgttgcccgctgctggaatacatggccagtaaagccatgatggagcggcactgggaaaggataaccaccctcaccgggcacagtctggatgtggggaatgaaagctttaagttaagaaatatcatggaggcacctcttctgaaatataaagaggaaatagaggacatctgtatcagtgcggtgaaagagagagacattgagcaaaagctgaagcaagtgattaatgaatgggacaataaaacattcaccttcggcagctttaaaacccgtggagagctcctcttgagaggagacagtacctcggaaatcatcgccaacatggaggacagcttgatgttgctgggatccctactgagcaacaggtacaatatgccattcaaagcccagattcaaaaatgggtgcagtacctttccaactcaacagacatcatcgagagctggatgacggtgcaaaacctgtggatttatttagaagctgtctttgtgggaggagacattgccaagcagctgcccaaggaagccaagcggttttctaacatagataaatcttgggtgaagatcatgactcgggcacatgaagtgcccagtgtagtccagtgctgtgttggagatgagaccctggggcagctgttaccacacttgctggaccagttggaaatatgccagaaatcccttactgggtacttggagaaaaaacgactgtgctttcctcggtttttcttcgtctcagatcctgcccttctagagattctggggcaggcgtcggactcccacactatacaggcccatttgctgaatgtgtttgacaacattaaatctgtcaagttccacgaaaagatctatgatcgaattctgtcaatttcctctcaagagggtgagacgattgaattggataaacctgtcatggcagagggcaatgtggaagtttggcttaattctcttttggaagaatctcagtcctcattgcatcttgtgattcgccaggcagccgcaaatattcaagaaacaggtttccaactaactgaatttctttcatccttccctgctcaggttggattattaggaattcagatgatatggacacgggattcagaagaagcccttagaaatgccaagtttgataaaaaaatcatgcagaaaactaatcaggctttcctggagctactcaatacattgatagacgtcaccacgagggatctgagttccacggaacgagtgaaatacgagactctgattactattcatgtgcaccaaagggatatctttgatgacctgtgtcatatgcatatcaagagtcccatggactttgagtggctgaaacagtgcagattttactttaacgaagattctgacaagatgatgattcacatcacagatgtggcgttcatataccagaatgaatttttaggctgcactgacaggcttgtaataactccacttacagacagatgttacatcacgctggctcaagctctgggaatgagcatggggggagcccctgctggacctgcaggcacaggcaaaacagaaaccactaaagacatgggacgatgcctcgggaaatacgtcgtggttttcaattgttcagaccagatggatttccgaggacttggacggatttttaagggactggcacagtctggatcctggggttgttttgatgaatttaaccgtattgatctaccagttctctcggttgcagcccagcaaatttccattattctgacatgtaaaaaggagcacaaaaagtcttttatctttactgatggagataatgtgactatgaaccctgaatttgggcttttcttaaccatgaatcctggctatgccggacggcaggaactccctgaaaacttgaagattaatttccgctcagtggccatgatggtgcctgaccgtcagattatcataagggtgaagttggctagttgtggcttcattgacaacgttgttttggccaggaagtttttcacgctctacaaactgtgtgaggagcagctttctaagcaggttcattatgactttggcctgcgtaacattctgtcagttcttcggaccttgggagcagcaaaaagagccaatccaatggatacggagtccacgattgtcatgcgtgtactacgggacatgaatctttctaaactgattgatgaggatgaacccttgtttttgagtttgattgaagatctctttccaaatattcttctggacaaggcaggttaccctgaactggaagcagcaattagtagacaggttgaagaagctggtttaatcaaccatcctccttggaaactgaaggtcatccagctattcgaaacgcagagagtgcgacatgggatgatgactctggggcccagtggggctgggaagaccacctgcatccacaccttgatgagagccatgacagattgtggaaaaccacatcgggaaatgaggatgaatcccaaagcgattactgccccacagatgtttggtcggctggacgttgccacaaatgactggactgatgggatattttctacgctttggaggaaaacattaagagcaaagaaaggggaacatatctggataattcttgatggtccagtagatgccatctggattgaaaatctgaattctgttttggatgataacaaaactctaacccttgccaatggtgatcggattcccatggctccaaactgcaagatcattttcgagcctcataacattgacaatgcttctcctgccaccgtctcaagaaatggaatggttttcatgagctcttctatccttgattggagtcctattcttgagggttttcttaagaaacgctcacctcaagaagcagaaattcttcgtcagctgtacaccgagtctttcccagacttgtatcgcttctgtatccagaacttagaatacaagatggaggtgctggaggcctttgtcatcacacagagcattaacatgcttcaaggcctgattcctctgaaggagcaaggcggggaggtgagccaggctcacctggggcggctgttcgtgttcgcgctgctgtggagcgcgggggcggcgctggagctggacggacggcgccgcctggagctctggctgcgctctcggcccacagggacgctggagctgccgccgccagcggggcccggggacaccgccttcgactactatgtggcgcccgatggtacatggacgcactggaacacgcgtacccaggaatacctgtatccgtctgataccaccccagagtatggttctattctggtgccaaatgttgacaatgtgaggactgactttctaattcaaaccattgctaaacagggcaaggctgtgctattaattggtgaacaaggaacagccaaaacagtaataattaaaggatttatgtcaaaatatgatcctgaatgtcacatgatcaagagtctgaatttttcttctgcaaccaccccactgatgttccagaggacgatagagagctatgtggataaacgaatgggtacaacatatggccctcctgcgggaaagaagatgactgtttttattgatgatgtgaatatgccaataatcaatgagtggggagatcaggttacgaatgagatagtgcgacagctgatggaacaaaatggattctataatctagagaagcctggggagttcaccagcatcgtggacatccagtttttggcagccatgatccatcctggtggtggacgcaatgacataccccaaagactcaagaggcagttctctatatttaattgcacgttgccctctgaagcttctgtggacaagatctttggtgtgattggggtaggccactactgtactcagaggggtttctcagaagaagtgagagattctgtgacaaaattggtgcctctgacacgccgactatggcagatgaccaagattaaaatgcttcctacccctgcaaaattccattatgtgtttaacctacgagatctttctcgggtctggcagggaatgctgaacactacttcagaggtcatcaaggaaccaaatgatctgttaaagctgtggaagcatgagtgtaaacgtgttatagctgaccgtttcacagtgtccagtgatgtgacctggtttgataaggctttagtaagtttggtagaggaggagtttggtgaagagaaaaaactcttggtggattgtggaattgacacatattttgtggatttcttgagagatgcacctgaagctgcaggtgaaacatctgaagaggctgatgctgaaacacctaaaatttatgagccaattgaatcttttagtcacctaaaagagcgtctgaatatgttcctgcagctctataatgagagcatccgtggcgccggcatggacatggtgttctttgcagatgccatggttcacttagtcaagatctctcgtgtcattcgtactcctcagggaaatgccctcctggtcggggtgggcggatcaggaaagcagagcctgacgaggttggcttcattcattgctggctacgtttccttccagatcactctgacgagatcctacaacacatcaaatctgatggaagatctgaaggttttgtatcgaacagctggtcagcaaggcaaaggaatcacttttattttcacagacaatgagattaaagatgagtcatttttggaatatatgaacaatgttttatcatcaggtgaggtctctaacctatttgctcgagatgaaattgatgaaattaatagcgacctggcatcagtcatgaaaaaagaattccccaggtgccttcctaccaatgagaacctgcacgactacttcatgagtcgggtccgacagaaccttcatattgtgctctgcttctcgccagtgggggagaaatttcgaaacagagctttgaagttccctgccctaatttcaggatgcacaattgactggttcagccgatggcccaaagatgctttagttgctgtgtctgaacacttcctcacttcctatgatattgactgcagtttggaaatcaagaaggaggtggtccaatgcatgggctccttccaggatggggtggctgagaagtgtgttgattattttcagagattccgacgttctacccacgtgacgcccaaatcatacctctcctttattcagggctataagttcatatatggagaaaagcatgtggaggtgcggaccctggccaacagaatgaatactggattggaaaagctcaaagaagcttcagagtctgttgcagccttgagtaaagaactggaagcgaaagaaaaggagctacaagtggccaacgataaagccgacatggtcttaaaagaagtgacaatgaaagcacaggctgctgaaaaggtcaaggctgaggtacagaaggtgaaggacagggcccaggccattgtggacagcatctctaaagacaaagccattgctgaagaaaaactggaagcagcaaaaccagctttagaagaggcagaagctgcattgcagaccatcaggccttcggacatcgccactgttcgcacgttgggccgcccccctcacctcatcatgcggatcatggattgcgtactgctgctgtttcaaaggaaagtcagtgctgtgaaaattgacctggaaaaaagctgtaccatgccctcctggcaggaatccttaaaattgatgactgcagggaactttttacagaacttacagcaattcccaaaagacacaatcaatgaagaggtgatagaatttttgagtccttactttgaaatgcctgactataacatcgaaactgctaaacgcgtatgtggaaatgtagctggtctttgttcctggacgaaagctatggcttccttcttttctataaacaaagaagtactgcctctgaaggccaacttggtggtgcaagagaatcgccatctcctggccatgcaggatctgcagaaagcccaggccgagttggatgacaagcaggcggaacttgacgtggtgcaggctgagtatgaacaggccatgactgaaaagcagaccttgcttgaagatgcagagcgatgcagacacaagatgcagacagcttccacgctcatcagtggcttggcaggtgaaaaagaaagatggacagagcaaagccaagagtttgctgcacaaactaaaagacttgtaggggatgtactgttggctacagcttttctatcttattctggtccatttaaccaagagtttcgtgatcttctgttaaatgactggcggaaggaaatgaaagcccggaaaattccatttggaaagaacctaaatctcagtgagatgttgattgatgctcctactattagtgaatggaacctccaaggtctgccaaatgatgacttgtccattcaaaatggaattattgtcacgaaggcatctcgttaccctttgttaattgatccacagactcaaggcaagatctggattaaaaataaagaaagccgaaatgaactccagatcacgtctttaaatcacaagtacttcagaaaccacctggaagacagcctttctcttggaaggcctttgcttattgaagatgttggagaggaactagatccagcactagataatgttttggaaagaaacttcattaaaactgggtctacctttaaggtgaaagttggtgacaaggaagtagatgtgttggatggctttagactctacattaccaccaaattgcctaacccagcctacacccctgagataagtgcccgtacctccatcattgacttcactgtcaccatgaaaggtctagaagatcagttactggggagggtcattctcacagagaagcaggaattggagaaagaaagaactcatctgatggaagatgtaactgcaaacaaaagaaggatgaaggaactagaagataacttgctttaccgcctgacaagtacccaggggtccctggtagaagatgaaagtctcattgtcgtgctgagtaacacaaaaaggacagccgaggaggtgacacagaagctagaaatttctgctgagacagaagttcaaattaactcagcccgggaggaatacagacctgtggctacgcggggcagcatcctctacttcctcattactgagatgcgcttggttaatgagatgtatcagacttcgcttcgccagtttctgggcttatttgacctttccttagccaggtctgtcaagagcccgattacaagcaagaggattgctaatatcatcgagcacatgacctacgaggtttataagtatgctgcccgagggctgtacgaggagcacaaattcctgttcaccttgttgcttaccctaaagattgacatccagaggaaccgagtcaagcatgaagagtttctcactcttattaaaggaggtgcctcattagaccttaaagcttgtcctccaaaaccatcaaaatggatcctggacataacatggctgaatttggtggaacttagcaaactcagacagttttcagatgtccttgaccagatatcgagaaatgagaaaatgtggaaaatttggtttgataaggaaaacccggaggaggaacctcttccaaatgcctatgataaatctcttgactgcttcagacgtcttctccttattagatcctggtgtcctgacagaaccatcgcccaggcccgcaagtacatcgtggactccatgggagaaaaatatgccgaaggtgttattttagacttggagaagacgtgggaggaatctgatccacggacgccactcatctgtctcctgtctatgggctcagaccccacagattccatcattgccttggggaagagattaaaaatagaaacccgttatgtgtccatgggccagggccaggaagtccatgctcggaagctcttgcagcagaccatggcgaacggaggatgggcacttctgcagaactgccatctgggacttgatttcatggatgagctgatggacataatcatagaaactgagcttgtacatgatgcgttccgcctctggatgaccaccgaggctcataagcagtttcccattacactccttcagatgtccattaaatttgccaacgatcctccacaaggactccgggcaggactgaaaagaacatatagtggtgtcagccaagacctgctggacgtgagctctgggtcccagtggaagcccatgctgtacgcagtggctttcctgcactccactgtccaggagaggcgcaagttcggtgccctggggtggaatatcccctacgaatttaaccaagcggactttaatgccactgtgcagttcatccaaaaccacttggatgacatggatgtcaaaaagggtgtctcctggaccaccatccgctacatgataggagagattcaatatggaggcagagtcactgacgactatgataagagattgttgaacacatttgctaaggtttggttcagtgaaaatatgtttggaccagatttcagtttttaccaaggatacaatattccaaaatgcagcacagtggataactatcttcagtatatccagagtttgcctgcctatgacagccctgaggtgtttgggctgcaccccaatgctgacatcacctaccagagcaagctggccaaggacgtgctggacaccatcctaggcatccaacccaaggacacctctggtggaggggatgagacccgggaggcggtggtggcccggctggctgatgatatgctggagaagctgcccccagactatgtcccctttgaagtaaaagagaggctgcagaagatggggccattccagcctatgaacattttcctcaggcaggaaatagacagaatgcaaagggtactcagccttgtccgcagcaccctcactgagctgaaacttgctattgatggcaccatcatcatgagcgaaaatctgcgagatgcattggattgcatgtttgatgctagaatccctgcttggtggaaaaaagcttcttggatttctagtacactgggtttctggtttactgaacttatagaaagaaacagccagtttacctcgtgggttttcaatggccgacctcactgcttttggatgacgggtttttttaacccccagggatttttaactgcaatgcgacaggaaataactcgggccaacaaaggctgggctctggacaatatggtgctttgcaatgaagtcaccaaatggatgaaggacgacatttctgcccctcccacagagggtgtctatgtctatggcttatatcttgaaggtgctggctgggacaagaggaacatgaaactcattgaatcaaagccaaaagtgctctttgagttgatgcctgtcataaggatttatgcagaaaacaatactttacgagatcctcggttttactcctgtcccatctataagaagccagttcgaacggacttgaactacattgccgctgtggatctcaggacagcccagacccctgaacactgggtgctccgtggggttgcccttctgtgtgatgtcaagtaacatgtggggagtgtccccacccaatgctttggaaaatgcaagatctaaattattgtaacctttatttctgtatgactgctggacagtgtatgttaggtcgtttatgcaattaatgagctgcataggttttccccactccttaattggatgcttatattttacttgtttcatcattagtgaccaatgtctgagtttgttgaaaatgttatttagtgatataaaagtaaatttacagcatcctaatgaagtgtggccctcaaatccacagtagtatattttcttcttacttcgctccgaagactgactagggtaagcagacagtatttctctgggaggaattattcttctgttaacgtggcctggtaacagccaagttcttgaaggtaacagggcaagtctgtgctgattttgcttctattgcctttcgtatttaggtcaagttaagagacttattttcagggtttcaagcagccaattaaaaataccttttaaaaaatagaaggaaatagaagaatggattaagaatgtaaatagaaaatttatgtaaacatagagaataaacgtagaacaatgcttaagcctacttataattaataatgaaatactaattgataattcttataataaaaattaaagctaaaagtaaatgatagcatgctctcagtaaaactgatccactcacaaattgctggagcaatgtaaatcaacccaacctttttgtaaaatgattaaatacagaaagagccataaaaatattcacacccttggatctttgttttctctacatcaaggaaacaatttaaaagactgaaaacagtctatataaaattgcatttaataacagaaaaaaatggaaaaatcataaatattcaatagtcaggctatggttaaggaaattaagagatatttggcaaccataaaaaacaattttgaagattccataatatgaaatggtagacccagactgttaagtgaaagatttagtttacaaaatattgagcacactgtgattataacagcaaatatatttgcatgtggacaaagattagatggcaagatagaaaaataagaacagatgtgatagcaagaattatagttggcttgaaaaaatgtgatgatcaggagaaaaaataaaaaaagggtagaaatattagacggtgcgtagggactttctatggacttttattaattaggaaacattatcaaaggaacttttcacgtatttttctttaaattctggttagatgttattaataattcttcatctaacctactgactagaaaatatagtcagtactaaattagaattgtggtttataaacttttggttagctctggatctgtataactgcatttttttggataaacagtttttggtaggtggataccgggagacaagtgtgggtccctctcactgggcttcattctgtggaccaggatcattatttcatgctcatgatcatgagagttaggactgagtggctcctgtgactcccaccatcttagatgatactgttttcttgtgagttctttcttttggtgtggattagtatatcagttgatttgtgtgaattgtggtgaaacaatcatttcattttgaaaagcaagtaatgaaaatgtcaacatcataggaattaataaaatgtttttact

SEQ ID NO: 8998 - DNA, 12666 bp, Homo sapiens
  source 1..12666: mol_type = unassigned DNA
gagtaaggatgacttttcgggccacagatagtgaatttgacctgacaaatattgaagagtatgccgaaaattctgcactttcaagactgaataatataaaagccaaacaaagagtgagttatgtgacatccacagaaaatgaatctgatacacaaatcctaacgtttaggcacattacaaaagctcaggagaagacaagaaaacgacagcagcctataaaactagagcctttgccagtgctaaaagtctaccaagatcataagcagccagaatacatacatgaacagaaccgatttcagttaatgactgcaggaatcattaaacgtccagtaagcatagcaaaaaaaagttttgccacatcatctactcagtttcttgagcatcaagatgctgtgaaaaaaatgcagattcatcggccctatgttgaggtgttctctccctctcctcctaaactgccacatactggtattggaaaaagaggtctctttgggactagatcttcagcttaccctaagtacacttttcacgaccgagaagaagttgttaaagccaacattcgtgatcccttgcaaatcattaaaataatacgtgaaaatgaacatcttggatttctttatatgatccctgcagtgccaagatcatccattgaatatgatacatataatctaaaagttgtaagttatgagaacatcaataaaaatgactactatactattagccaaagggcagtaacacacatttataatgaagacattgaatttatcgaaattgatcgatgggaacaggaatatctgtatcacagagaactcactaagattcccatattttcactgttccggaaatggaaggcttttagtgtatggaggaagaatgtccgctccaagaaaatcactggatgtcaaaaatctctacaaaaaaatttgttcattgttaatcctcatttgcgaccagctcttcttaaaataaatgaattgtgttatcatttgagttttatgggactttgttatattgaaaagtgtcacacctacaccctgcaggaatttaaggccgcacaagtcatacggctagcagaggtgacagaacgcctaggagaatttcgaaatgaggcaaaatatgtagtcaggagggcttgtcgatttgctttgcgtgctgcaggatttgttcctgatgactgtgcatttggaccttttgaggattatcataaagtgcagagcagtggaagtttcattaatacaccacatgagttgcccacttatggagactctgagaaaatgacatatacagaacaggccagcaaaaggcattattgcatgaggctgacgtgctttattcgtctaaacgactatctaattgagaacacaatgcacatcttaacggtaaatgctgttaattcgcttttgaaccatctcactgacaagctaaaacgaacaccttcagcagatgtcattcagaaatggattactgaagagaagcctgaagtccctgataaaaaggggacccttatggtggaaaagcaagaagaagatgaatctctcatccccatgtttctcacagaactaatgttgacagtccagtcactgctctttgagccttctctggaagactttctggatggtattttgggtgcagttaatcactgtcaaaacactgtgttatcagttcctaatctcgtgcctgattcgtattttgatgctttcaccagcccttatattaacaacaaacttgaaggaaaaacctgtggaactgggccaagtttagcagcagtatttgaggatgataagaattttcacacaattatttctcaaataaaggaaaccattcaggccgcatttgaatcagcccgcatctatgcagctacctttgaaaagttccagatattcttcaaggaaaatgaaagtcttgatttacaagctcttaaacttcaggaacctgatattaacttttttagtgaacaactggaaaaatatcacaaacagcacaaggacgcagtagcgctcagacccaccagaaatgtaggattgctgctcattgatactaggcttctaagagaaaaattaattccatcacctttgcgatgcttagaggtgctaaattttatgcttcctcgtcaaagcaagaaaaaagtggatgccattatctttgaggcacaagatgcagagtataaacttgagtttgttccaactactaccacagaatatgttcatagcttattatttcttgatgaaattcaggaacggattgaaagccttgaagatgaggggaatatagtgactcaaatgtacaagcttatggaacaatatcaggtgcccacacctcctgaagactttgctgtttttgcaactatgaagccatccattgttgctgttcggaatgccattgataaatcagtgggtgatagagaatcaagcattaagcaattttgtgtgcatttgggtagtgatcttgaagaattaaacaacgaagtgaatgaagtaaaactgcaagcacaggatccacagattttagatatctctgctgaccaagacaaaataaggctcatattgaataatctgcaatctgttctggctgatcttcagaaacgtgcatttcagtataagtcctatcagaagaattttaaggtagaagtgtccaagtttgaagctttggaagaagtcagtgctgaactgaagctcaaacaattgctctgggattctttctctgaatgggataaactccaacaagaatggttaaagtccaaatttgattgcctggatccagaagtcctaaacggtcaagtttctaaatatgctaaatttgtgactcaactggaaaaaggcttgccacccaacagtgtagtgccccagctcaaatacaaggtggaaaaaatgaaagaaaagcttccagttatcattgacttgaggaacccgactttgaaggcaagacattgggcagctattgaacaaacagttgatgccactctagtggatgctgaaattccattaaccttggagaggctctcccagttgcatgtttttgactttggtcaagaaatccaggacatatctggacaggcttctggagaagctgccttagaagcaattcttaaaaaggtggaggactcttggaaaacaactgaatttgtcattctgcctcaccgtgactccaaagatgtgtttatactgggcggcacagatgacatacaggtccttcttgatgatagcaccatcaatgttgcaactcttgcctcatcacgttaccttggtccactgaaaactcgagtggatgaatggcaaaaacaacttgctttatttaatcaaacactggaagagtggctgacctgccagagaaactggctctacctagaaagtattttcaatgctccagacattcagaggcaattgcctgcagaggccaagatgttccttcaggtggataagtcatggaaagaaatcatgagaaaggtgaatcggctgcctaatgctcttcgagccgctactcagccaggacttctggaaacttttcaaaacaataatgcattacttgaccaaattcagaagtgcctagaggcatacttagaatcaaaaagagttatctttccaaggttttacttcttgtcaaatgatgaacttctggagattttggcccagacacgaaatccacaggccgtgcagccacacttaaggaaatgcttcgactccatttcaaagctcgaatttgctctcatgcctcctgccgaaggaaagattcctggtattgatggagaaccagaaaaggtttatactaatgatattttagcaatgctgtcaccagagggagaaagggttagcttggggaaaggcctcaaggcccgaggcaatgtagaggaatggcttggtaaagtggaagaagccatgttcacatctctgcgtcgcctgtgcaaagctgccatcgctgactatcaggggaaactgaggacagactgggtggttgctggccacccttctcaagttatcctgactgtttctcaaattatgtggtgccgtgatttgactgaatgtctggaaacagaacacagtaatcatatacaggccctgaagaattttgaaaaagtaaattttgagagattaaatgccctagctgcaatagttcaaggcagtcttcctaaattacacagaaacatcctaactgcattgattactattgatgtgcatgcaagagatatagtcactgaacttgttcaatccaaggtggagacagttgaatcttttgactggcagagacaactgcgctattactgggatatagacctggataattgtgtggctagaatggcgctctctcagtacacttatggctatgaatatttgggtgcatgcccaagattggttattactccactcacagatcgctgctatctttgcctcatgggagctttgcagcttgaccttgggggtgcaccagctggtcctgctggcactgggaaaacagagactaccaaagatctggcaaaagctcttgccatccagtgtgtggtctttaactgttcagatggtttggactacaagatgatggggcgcttcttcagtggcttggcacagtcaggggcctggtgctgctttgatgaatttaatcgaattgacatagaagttctgtccgtcatcgcgcagcaactcattaccattaggaacgccaaagcggcaaagctctctagattcatgtttgaggggcgggaaataaagttggtgatgacttgtgcagccttcatcacaatgaatcctggctatgcagggagaactgaattgccagataatttgaaagccctgtttagaccatttgcgatgatggttccaaattatgccttgattgcagaggtaattctatattctgaaggatttgaatccagtaaaatattagcaagaaaaatgactcagatgtataagctttgcagtgagcagctgtctcagcaggatcactacgactttggcatgagagctgtgaagtctgtcctggtcatggctggatctttaaaaagagaaaacccagacctaaatgaagatgtggtgttgataagagctttacaagactccaatttgccaaaatttctaacagatgatgctcttctgttcagtggaatcatatctgacctttttcctggagtccaaattccagaacatgattatggtattttacaatcaacaattgtggatgtcatgaatagacaaaatcttcagcctgagatgtgtatggttagaaaggtgatacagttttatgaaactatgctagtaaggcatggtgttatgttagtcgggccaacaggaggcggcaagaccacagtttaccgaatactagcagaaactttagggaatttacaaaaacttgggatagaaaattccttttaccaagcagttaaaacatatgttctcaaccctaaatcaattaccatgggtgaattatatggagaggttaataacttaaccttggaatggaaagatggtttgatggcactaagtgtccgagcagctgtgaatgatacttcagaagaccataaatggatcatcagtgatgggccagtagatgctctttggattgaaaacatgaatacagtgctggatgataacaagatgctttgcctggctaacagtgagaggattaaactcacacctcaaattcacatgctttttgaggtgcaagatctgcgggttgcctcccctgcaacagtcagtcgatgtggaatggtgtttgtggatcctgaagaactgaaatggatgccttatgttaaaacttggatgaagggtatttctaaaaaactgactgaggaaacccaagaatatatattgaatcttttccaacgttatgttgatgaaggtttacattttatcaataaaaagtgcagccaagcaattccacaagtggacatcagcaaagttactacactctgttgcttattggagtccttgatacttgggaaagatggagttaacttggcaatggaacaaacaaaattgaacactatactatgtcagacttttgtattctgttatttgtggtctttgggtggaaacctaactgaaaactactatgattcttttgatacatttattagaacacaatttgatgataatcctgatgccaggcttcccaattctggtgatctgtggagcattcatatggactttgacaccaaacggctggatccctgggaacgaatcatacctactttcaaatacaaccgagatgttccattttttgaaatgcttgtccccacaactgacacagtgcgctatgggtatctaatggaaaaactactggcagtcaagcattccgtgttgtttactggaataactggagtgggcaagtctgtgattgcaaaaggattgctaaataaaattcaagaatcagctggctatgtccctgtttatctaaatttttctgctcaaacttcatctgcaaggacacaagagatcattgagtcaaaactggagagaaaaagaaaaaatattctaggagcaccgggaaacaaacgaattgtgatttttgttgatgatttaaacatgcccagactggatcgctatggctctcagcctccgattgaattacttcggcagtatcaagattttgggggattttatgacagaaacaaactgttttggaaagaaatacaggatgtaacaatcatatcggcatgtgcacctccaggcggtggccgcaaccctgtgactccccgcttcatcagacacttcagcatgctgtgcctcccaatgccctcagagcacagtctgaaacagatttttcaggccatcttaaatggtttcctgagtgactttccaccagctgtaaagcaaactgcatcaagcattgtagaagcctcagttgagatttataacaaaatgagtgttgacctcctgccaacacccgccaagtcccattatgtctttaacttgagggacttatccaaatgtgtgcaaggtatcctccaatgtgatccaggaacaataagagaagaaattcagatatttagactcttttgccatgagtgccaaagggtcttccatgatcgcttgattaataatgaagataagcactatttccatgttattctgacagaaatggccaacaaacattttggaattgcaattgacctggaatattttttgaataagcccatcatatttggagatttcattaagtttggagcagataaagctgatcggatttatgatgacatgcctgatatagagaaaactgcaaatgttctacaggactatcttgatgattataatctcacaaatcccaaagaagtaaagttggtgttcttccaggatgctatagaacatgtttcaaggattgctcggatgatacgtcaagaaagaggcaatgccctgcttgttggagtaggaggcacaggaaagcagtcactcacgagacttgcagctcatatatgcggttacaaatgtttgcagattgaactcagccggggatataattatgatagttttcatgaagacctgaggaagttgtacaaaatggctggtgtagaagacaagaatatggttttccttttcactgacacccagattgtagtggaggagttcctagaagatataaataacatcctgaactcaggtgaagtgcctaatttatttgaaaaggatgaactggagcaggttttagcggccaccagaccaagagcaaaagaagtaggaatttctgaggggaacagagacgaggtgtttcaatactttatcagcaaagtgcgtcagaagctgcacattgttctctgcatgagcccagttggggaggcctttcggtcccgatgcaggatgtttccatcccttgtgaattgctgcaccattgactggtttgtgcagtggcccagagaagcacttctttctgtgtcaaagacatttttctcacaagtcgatgctggaaatgaagaactgaaagaaaagcttcccttgatgtgcgtgaacgttcacttgagtgtctccagcatggcagagcgctattacaatgagctgcgcaggcggtactacacgacacccacctcctacctggagcttatcaatctttacctgtctatgctgtctgaaaaaaggaagcagattatttcagcacgagatcgggtgaagaatggtctcaccaagctactagaaacaaacatactagtagataaaatgaaactagatctttcagctttagagcctgtacttttagcaaaatcagaagatgttgaagccctgatggaaaaattggcagtggatcaagaaagtgccgatcaggtccgtaacactgtgcaggaggatgaagcaacagcaaaagtcaaagctgaagaaacccaagcaatagctgatgatgctcaaagagatcttgacgaggcactacctgcactagatgctgccaataaagcactggattccttagataaggcagatatatctgaaatcagagtttttacaaagcccccagatttggtcatgacagtaatggaagcaatctccattcttttgaatgccaagcctgattggccatcagcaaagcaacttcttggtgactctaactttctaaaaaggcttttagaatatgataaggagaacataaagcctcagatattggcaaagcttcaaaagtatattaataatcctgattttgtgcctgaaaaagtggagaaagtgtccaaagcatgtaaatctatgtgcatgtgggtaagagctatggatttgtactctcgagtggtcaaggtcgtcgaaccaaaaagacaaaagctccgcgccgcacaggctgaacttgacattaccatggctaccctgagagaaaagcaagcattactaagacaagtagaagatcaaatacaggccttacaagatgaatatgacaaaggtgtaaatgaaaaagaaagcctggcaaagaccatggccctgacaaaagcacgtctagtacgtgctggaaagctgacagcagcattagaagatgagcaggttcgatgggaagaaagcatacagaagtttgaggaagaaatatcaaatatcactgggaacgtgttcatagcagcagcttgtgtggcctactatggggctttcacagcccagtacaggcagtcacttatagagtgttggatccaggactgtcagtctctggagatcccaatcgatccttccttcagtctcattaacattcttggagatccctacgagatacggcagtggaacactgatgggctgccccgtgacttgatatcaacagaaaatggcattttggttactcaaggcagaagatggcctttgatgattgatccccaagatcaggcaaaccgttggataaggaacaaggaaagcaaaagtggtttaaagatcattaagcttacagatagtaatttcttacgaatactcgagaattcaatccgacttggtttacctgtcttactggaagagcttaaggaaaccttggatccagctctagaacccattcttttgaaacaaatttttatcagtggtggccgactactcatccgtcttggagactcagacattgattatgacaaaaactttaggttctatatgacaaccaaaatgccaaatccccactatctgcctgaggtatgcattaaagttaccattatcaatttcactgtaacaaaatcaggcctggaggatcagttgttaagtgatgtggtgcgacttgaaaaacccaggttggaagaacaaagaattaagctcatcgtgaggatcaacactgataaaaaccagttgaaaactatcgaagagaaaatcctgagaatgctctttacctctgaaggaaatattctggacaatgaagaacttattgacacactccaggattcaaagatcacttctggtgccattaaaaccaggctggaagaagcagagtccactgagcagatgatcaatgtggctcgtgagaagtatcgtccagtggccactcaaggctctgtaatgtactttgtcattgcaagcctctcagaaatagatcctatgtaccagtactcattaaaatactttaaacagttgttcaataccaccattgaaacttctgtaaagacagaaaatctacaacagcgcctggacgtactactagaacaaactctcctaactgcttatgtcaatgtttcaagaggactttttgagcaacataaactcatctacagctttatgctttgtgttgagatgatgcgtcagcaaggaaccctatctgatgctgaatggaatttctttctccgaggttctgcaggattggaaaaggaacgcccacctaagcctgaagctccctggctacctactgctacatggttcgcatgctgtgacttggaagaatcatttccagtttttcacggacttacccaaaatatattgtcacatcctatttccatacgcttaggatcttttgagacttatattaacccacagaaatgggaaggctattctaaaatgaaacacgaagataaacacatgagacaggaaaaggaggcagcacaccaagatccatggagtgcaggattgagttctttccataagctaattcttattaaatgttgtaaagaagaaaaggtggtttttgctcttacagactttgtgatagaaaatcttggaaaacagtttatagagacaccacctgtggacctgcctaccctgtatcaagacatgtcatgcaacactcccctggtattcatcctaagcacaggctcagatcccatgggtgcatttcagaggtttgccagggaaagtggatattcagaacgggtgcagtcaatttcactggggcaaggacaaggacctattgctgaaaaaatggtcaaggatgcaatgaaatcaggaaactgggtatttttgcaaaattgccatcttgctgtttcttggatgttggcaatggaagagctcattaaaaccttcacagatccagatagtgctatcaaggacacttttcgactttttttaagctccatgcctagtaatacatttcctgttacagttcttcaaaattctgtcaaggtgaccaatgagcctccaaaaggcttacgtgcaaatatcagacgagcatttactgaaatgacaccttcgttttttgaagaaaatatacttggaaaaaaatggagacaaataatatttggcatttgtttcttccatgcaattattcaggagagaaagaagtttggcccccttggttggaatatctgctatgaatttaatgacagtgacagggaatgtgctttactgaatctcaaactctattgtaaagaaggaaagattccctgggatgcactaatttacattactggtgaaattacttatggtggtagagtcacagacagctgggaccaaagatgccttcgtactatcttgaaaagatttttttctcctgaaacattagaagaagattataaatactctgaatcaggcatctattttgcacccatggctgacagcctacaagagtttaaggactacattgaaaatctgcctttgatcgatgacccagaaatttttggaatgcatgaaaatgctaatctagtcttccagtacaaagagaccagcactttaatcaacaccatacttgaggttcagccaaggtcatctactggtggagagggaaaaagcaatgacgaaattgttcaagaacttgttgcttctgtccagaccagagttccagaaaaactggaaatggagggtgcttctgagagcctttttgtcaaggatcttcaaggacgtctgaactccttgaccaccgttcttggacaggaagtggaccggtttaacaacctgctgaagttaattcatacttctctggaaacactcaacaaagccatcgctggatttgtggtgatgtctgaagaaatggaaaaagtgtataacagtttcctcaacaaccaggttcccgctctgtggtccaacacagcctacccatccctgaagccactaggatcatgggtcaaagaccttatcctgaggacctcatttgtggatctgtggctcaaaagaggacagcctaagtcctactggatctctggtttcttctttcctcaaggatttctaacaggaactcttcaaaatcatgctcgaaaatacaatttgcctatagatgagctgagtttcaaatacagcgtaattcccacctatcgggatcaagctgcagtgatagaagctgccaagacagtgcaatttggacaagaactgcccatggacatggagttgccctctcctgaggatggtgttcttgttcatgggatgttcatggatgcttctcgatgggatgataaggagatggtgatagaagatgcattgcccggacagatgaatccagtgctgcctgtggtgcattttgaaccacaacaaaactataagccaagcccaacactttaccactgcccactttataaaacaggagcccgggcaggaacactctcaaccacaggacattcaaccaattttgtggtaaccgtcctgttaccctccaagcggtccaaagactactggattgccaagggatcagctttgctctgccagctgagcgaatgaaaaggtgccacctcagccctgaaaaagaaccaggccagagatctttcctaatgggagcaaaaggtttgaataatttatatgtgagcaaaacggtgttaattctgatttgacttaaacgtattgtgacttttatttctcttatgaccttaaaataaagtgtttgagttctttctgttggcaa

SEQ ID NO: 8999 - DNA, 12795 bp, Homo sapiens
  source 1..12795: mol_type = unassigned DNA
gcttccgtagaggccagctggttgctacgcagcaacaggaaacattccgcgctaccgagtactttctactcccgaccaggcattgctctctctggagaccctcggcggtggttgctgtattttgacttggagtaaggatgacttttcgggccacagatagtgaatttgacctgacaaatattgaagagtatgccgaaaattctgcactttcaagactgaataatataaaagccaaacaaagagtgagttatgtgacatccacagaaaatgaatctgatacacaaatcctaacgtttaggcacattacaaaagctcaggagaagacaagaaaacgacagcagcctataaaactagagcctttgccagtgctaaaagtctaccaagatcataagcagccagaatacatacatgaacagaaccgatttcagttaatgactgcaggaatcattaaacgtccagtaagcatagcaaaaaaaagttttgccacatcatctactcagtttcttgagcatcaagatgctgtgaaaaaaatgcagattcatcggccctatgttgaggtgttctctccctctcctcctaaactgccacatactggtattggaaaaagaggtctctttgggactagatcttcagcttaccctaagtacacttttcacgaccgagaagaagttgttaaagccaacattcgtgatcccttgcaaatcattaaaataatacgtgaaaatgaacatcttggatttctttatatgatccctgcagtgccaagatcatccattgaatatgatacatataatctaaaagttgtaagttatgagaacatcaataaaaatgactactatactattagccaaagggcagtaacacacatttataatgaagacattgaatttatcgaaattgatcgatgggaacaggaatatctgtatcacagagaactcactaagattcccatattttcactgttccggaaatggaaggcttttagtgtatggaggaagaatgtccgctccaagaaaatcactggatgtcaaaaatctctacaaaaaaatttgttcattgttaatcctcatttgcgaccagctcttcttaaaataaatgaattgtgttatcatttgagttttatgggactttgttatattgaaaagtgtcacacctacaccctgcaggaatttaaggccgcacaagtcatacggctagcagaggtgacagaacgcctaggagaatttcgaaatgaggcaaaatatgtagtcaggagggcttgtcgatttgctttgcgtgctgcaggatttgttcctgatgactgtgcatttggaccttttgaggattatcataaagtgcagagcagtggaagtttcattaatacaccacatgagttgcccacttatggagactctgagaaaatgacatatacagaacaggccagcaaaaggcattattgcatgaggctgacgtgctttattcgtctaaacgactatctaattgagaacacaatgcacatcttaacggtaaatgctgttaattcgcttttgaaccatctcactgacaagctaaaacgaacaccttcagcagatgtcattcagaaatggattactgaagagaagcctgaagtccctgataaaaaggggacccttatggtggaaaagcaagaagaagatgaatctctcatccccatgtttctcacagaactaatgttgacagtccagtcactgctctttgagccttctctggaagactttctggatggtattttgggtgcagttaatcactgtcaaaacactgtgttatcagttcctaatctcgtgcctgattcgtattttgatgctttcaccagcccttatattaacaacaaacttgaaggaaaaacctgtggaactgggccaagtttagcagcagtatttgaggatgataagaattttcacacaattatttctcaaataaaggaaaccattcaggccgcatttgaatcagcccgcatctatgcagctacctttgaaaagttccagatattcttcaaggaaaatgaaagtcttgatttacaagctcttaaacttcaggaacctgatattaacttttttagtgaacaactggaaaaatatcacaaacagcacaaggacgcagtagcgctcagacccaccagaaatgtaggattgctgctcattgatactaggcttctaagagaaaaattaattccatcacctttgcgatgcttagaggtgctaaattttatgcttcctcgtcaaagcaagaaaaaagtggatgccattatctttgaggcacaagatgcagagtataaacttgagtttgttccaactactaccacagaatatgttcatagcttattatttcttgatgaaattcaggaacggattgaaagccttgaagatgaggggaatatagtgactcaaatgtacaagcttatggaacaatatcaggtgcccacacctcctgaagactttgctgtttttgcaactatgaagccatccattgttgctgttcggaatgccattgataaatcagtgggtgatagagaatcaagcattaagcaattttgtgtgcatttgggtagtgatcttgaagaattaaacaacgaagtgaatgaagtaaaactgcaagcacaggatccacagattttagatatctctgctgaccaagacaaaataaggctcatattgaataatctgcaatctgttctggctgatcttcagaaacgtgcatttcagtataagtcctatcagaagaattttaaggtagaagtgtccaagtttgaagctttggaagaagtcagtgctgaactgaagctcaaacaattgctctgggattctttctctgaatgggataaactccaacaagaatggttaaagtccaaatttgattgcctggatccagaagtcctaaacggtcaagtttctaaatatgctaaatttgtgactcaactggaaaaaggcttgccacccaacagtgtagtgccccagctcaaatacaaggtggaaaaaatgaaagaaaagcttccagttatcattgacttgaggaacccgactttgaaggcaagacattgggcagctattgaacaaacagttgatgccactctagtggatgctgaaattccattaaccttggagaggctctcccagttgcatgtttttgactttggtcaagaaatccaggacatatctggacaggcttctggagaagctgccttagaagcaattcttaaaaaggtggaggactcttggaaaacaactgaatttgtcattctgcctcaccgtgactccaaagatgtgtttatactgggcggcacagatgacatacaggtccttcttgatgatagcaccatcaatgttgcaactcttgcctcatcacgttaccttggtccactgaaaactcgagtggatgaatggcaaaaacaacttgctttatttaatcaaacactggaagagtggctgacctgccagagaaactggctctacctagaaagtattttcaatgctccagacattcagaggcaattgcctgcagaggccaagatgttccttcaggtggataagtcatggaaagaaatcatgagaaaggtgaatcggctgcctaatgctcttcgagccgctactcagccaggacttctggaaacttttcaaaacaataatgcattacttgaccaaattcagaagtgcctagaggcatacttagaatcaaaaagagttatctttccaaggttttacttcttgtcaaatgatgaacttctggagattttggcccagacacgaaatccacaggccgtgcagccacacttaaggaaatgcttcgactccatttcaaagctcgaatttgctctcatgcctcctgccgaaggaaagattcctggtattgatggagaaccagaaaaggtttatactaatgatattttagcaatgctgtcaccagagggagaaagggttagcttggggaaaggcctcaaggcccgaggcaatgtagaggaatggcttggtaaagtggaagaagccatgttcacatctctgcgtcgcctgtgcaaagctgccatcgctgactatcaggggaaactgaggacagactgggtggttgctggccacccttctcaagttatcctgactgtttctcaaattatgtggtgccgtgatttgactgaatgtctggaaacagaacacagtaatcatatacaggccctgaagaattttgaaaaagtaaattttgagagattaaatgccctagctgcaatagttcaaggcagtcttcctaaattacacagaaacatcctaactgcattgattactattgatgtgcatgcaagagatatagtcactgaacttgttcaatccaaggtggagacagttgaatcttttgactggcagagacaactgcgctattactgggatatagacctggataattgtgtggctagaatggcgctctctcagtacacttatggctatgaatatttgggtgcatgcccaagattggttattactccactcacagatcgctgctatctttgcctcatgggagctttgcagcttgaccttgggggtgcaccagctggtcctgctggcactgggaaaacagagactaccaaagatctggcaaaagctcttgccatccagtgtgtggtctttaactgttcagatggtttggactacaagatgatggggcgcttcttcagtggcttggcacagtcaggggcctggtgctgctttgatgaatttaatcgaattgacatagaagttctgtccgtcatcgcgcagcaactcattaccattaggaacgccaaagcggcaaagctctctagattcatgtttgaggggcgggaaataaagttggtgatgacttgtgcagccttcatcacaatgaatcctggctatgcagggagaactgaattgccagataatttgaaagccctgtttagaccatttgcgatgatggttccaaattatgccttgattgcagaggtaattctatattctgaaggatttgaatccagtaaaatattagcaagaaaaatgactcagatgtataagctttgcagtgagcagctgtctcagcaggatcactacgactttggcatgagagctgtgaagtctgtcctggtcatggctggatctttaaaaagagaaaacccagacctaaatgaagatgtggtgttgataagagctttacaagactccaatttgccaaaatttctaacagatgatgctcttctgttcagtggaatcatatctgacctttttcctggagtccaaattccagaacatgattatggtattttacaatcaacaattgtggatgtcatgaatagacaaaatcttcagcctgagatgtgtatggttagaaaggtgatacagttttatgaaactatgctagtaaggcatggtgttatgttagtcgggccaacaggaggcggcaagaccacagtttaccgaatactagcagaaactttagggaatttacaaaaacttgggatagaaaattccttttaccaagcagttaaaacatatgttctcaaccctaaatcaattaccatgggtgaattatatggagaggttaataacttaaccttggaatggaaagatggtttgatggcactaagtgtccgagcagctgtgaatgatacttcagaagaccataaatggatcatcagtgatgggccagtagatgctctttggattgaaaacatgaatacagtgctggatgataacaagatgctttgcctggctaacagtgagaggattaaactcacacctcaaattcacatgctttttgaggtgcaagatctgcgggttgcctcccctgcaacagtcagtcgatgtggaatggtgtttgtggatcctgaagaactgaaatggatgccttatgttaaaacttggatgaagggtatttctaaaaaactgactgaggaaacccaagaatatatattgaatcttttccaacgttatgttgatgaaggtttacattttatcaataaaaagtgcagccaagcaattccacaagtggacatcagcaaagttactacactctgttgcttattggagtccttgatacttgggaaagatggagttaacttggcaatggaacaaacaaaattgaacactatactatgtcagacttttgtattctgttatttgtggtctttgggtggaaacctaactgaaaactactatgattcttttgatacatttattagaacacaatttgatgataatcctgatgccaggcttcccaattctggtgatctgtggagcattcatatggactttgacaccaaacggctggatccctgggaacgaatcatacctactttcaaatacaaccgagatgttccattttttgaaatgcttgtccccacaactgacacagtgcgctatgggtatctaatggaaaaactactggcagtcaagcattccgtgttgtttactggaataactggagtgggcaagtctgtgattgcaaaaggattgctaaataaaattcaagaatcagctggctatgtccctgtttatctaaatttttctgctcaaacttcatctgcaaggacacaagagatcattgagtcaaaactggagagaaaaagaaaaaatattctaggagcaccgggaaacaaacgaattgtgatttttgttgatgatttaaacatgcccagactggatcgctatggctctcagcctccgattgaattacttcggcagtatcaagattttgggggattttatgacagaaacaaactgttttggaaagaaatacaggatgtaacaatcatatcggcatgtgcacctccaggcggtggccgcaaccctgtgactccccgcttcatcagacacttcagcatgctgtgcctcccaatgccctcagagcacagtctgaaacagatttttcaggccatcttaaatggtttcctgagtgactttccaccagctgtaaagcaaactgcatcaagcattgtagaagcctcagttgagatttataacaaaatgagtgttgacctcctgccaacacccgccaagtcccattatgtctttaacttgagggacttatccaaatgtgtgcaaggtatcctccaatgtgatccaggaacaataagagaagaaattcagatatttagactcttttgccatgagtgccaaagggtcttccatgatcgcttgattaataatgaagataagcactatttccatgttattctgacagaaatggccaacaaacattttggaattgcaattgacctggaatattttttgaataagcccatcatatttggagatttcattaagtttggagcagataaagctgatcggatttatgatgacatgcctgatatagagaaaactgcaaatgttctacaggactatcttgatgattataatctcacaaatcccaaagaagtaaagttggtgttcttccaggatgctatagaacatgtttcaaggattgctcggatgatacgtcaagaaagaggcaatgccctgcttgttggagtaggaggcacaggaaagcagtcactcacgagacttgcagctcatatatgcggttacaaatgtttgcagattgaactcagccggggatataattatgatagttttcatgaagacctgaggaagttgtacaaaatggctggtgtagaagacaagaatatggttttccttttcactgacacccagattgtagtggaggagttcctagaagatataaataacatcctgaactcaggtgaagtgcctaatttatttgaaaaggatgaactggagcaggttttagcggccaccagaccaagagcaaaagaagtaggaatttctgaggggaacagagacgaggtgtttcaatactttatcagcaaagtgcgtcagaagctgcacattgttctctgcatgagcccagttggggaggcctttcggtcccgatgcaggatgtttccatcccttgtgaattgctgcaccattgactggtttgtgcagtggcccagagaagcacttctttctgtgtcaaagacatttttctcacaagtcgatgctggaaatgaagaactgaaagaaaagcttcccttgatgtgcgtgaacgttcacttgagtgtctccagcatggcagagcgctattacaatgagctgcgcaggcggtactacacgacacccacctcctacctggagcttatcaatctttacctgtctatgctgtctgaaaaaaggaagcagattatttcagcacgagatcgggtgaagaatggtctcaccaagctactagaaacaaacatactagtagataaaatgaaactagatctttcagctttagagcctgtacttttagcaaaatcagaagatgttgaagccctgatggaaaaattggcagtggatcaagaaagtgccgatcaggtccgtaacactgtgcaggaggatgaagcaacagcaaaagtcaaagctgaagaaacccaagcaatagctgatgatgctcaaagagatcttgacgaggcactacctgcactagatgctgccaataaagcactggattccttagataaggcagatatatctgaaatcagagtttttacaaagcccccagatttggtcatgacagtaatggaagcaatctccattcttttgaatgccaagcctgattggccatcagcaaagcaacttcttggtgactctaactttctaaaaaggcttttagaatatgataaggagaacataaagcctcagatattggcaaagcttcaaaagtatattaataatcctgattttgtgcctgaaaaagtggagaaagtgtccaaagcatgtaaatctatgtgcatgtgggtaagagctatggatttgtactctcgagtggtcaaggtcgtcgaaccaaaaagacaaaagctccgcgccgcacaggctgaacttgacattaccatggctaccctgagagaaaagcaagcattactaagacaagtagaagatcaaatacaggccttacaagatgaatatgacaaaggtgtaaatgaaaaagaaagcctggcaaagaccatggccctgacaaaagcacgtctagtacgtgctggaaagctgacagcagcattagaagatgagcaggttcgatgggaagaaagcatacagaagtttgaggaagaaatatcaaatatcactgggaacgtgttcatagcagcagcttgtgtggcctactatggggctttcacagcccagtacaggcagtcacttatagagtgttggatccaggactgtcagtctctggagatcccaatcgatccttccttcagtctcattaacattcttggagatccctacgagatacggcagtggaacactgatgggctgccccgtgacttgatatcaacagaaaatggcattttggttactcaaggcagaagatggcctttgatgattgatccccaagatcaggcaaaccgttggataaggaacaaggaaagcaaaagtggtttaaagatcattaagcttacagatagtaatttcttacgaatactcgagaattcaatccgacttggtttacctgtcttactggaagagcttaaggaaaccttggatccagctctagaacccattcttttgaaacaaatttttatcagtggtggccgactactcatccgtcttggagactcagacattgattatgacaaaaactttaggttctatatgacaaccaaaatgccaaatccccactatctgcctgaggtatgcattaaagttaccattatcaatttcactgtaacaaaatcaggcctggaggatcagttgttaagtgatgtggtgcgacttgaaaaacccaggttggaagaacaaagaattaagctcatcgtgaggatcaacactgataaaaaccagttgaaaactatcgaagagaaaatcctgagaatgctctttacctctgaaggaaatattctggacaatgaagaacttattgacacactccaggattcaaagatcacttctggtgccattaaaaccaggctggaagaagcagagtccactgagcagatgatcaatgtggctcgtgagaagtatcgtccagtggccactcaaggctctgtaatgtactttgtcattgcaagcctctcagaaatagatcctatgtaccagtactcattaaaatactttaaacagttgttcaataccaccattgaaacttctgtaaagacagaaaatctacaacagcgcctggacgtactactagaacaaactctcctaactgcttatgtcaatgtttcaagaggactttttgagcaacataaactcatctacagctttatgctttgtgttgagatgatgcgtcagcaaggaaccctatctgatgctgaatggaatttctttctccgaggttctgcaggattggaaaaggaacgcccacctaagcctgaagctccctggctacctactgctacatggttcgcatgctgtgacttggaagaatcatttccagtttttcacggacttacccaaaatatattgtcacatcctatttccatacgcttaggatcttttgagacttatattaacccacagaaatgggaaggctattctaaaatgaaacacgaagataaacacatgagacaggaaaaggaggcagcacaccaagatccatggagtgcaggattgagttctttccataagctaattcttattaaatgttgtaaagaagaaaaggtggtttttgctcttacagactttgtgatagaaaatcttggaaaacagtttatagagacaccacctgtggacctgcctaccctgtatcaagacatgtcatgcaacactcccctggtattcatcctaagcacaggctcagatcccatgggtgcatttcagaggtttgccagggaaagtggatattcagaacgggtgcagtcaatttcactggggcaaggacaaggacctattgctgaaaaaatggtcaaggatgcaatgaaatcaggaaactgggtatttttgcaaaattgccatcttgctgtttcttggatgttggcaatggaagagctcattaaaaccttcacagatccagatagtgctatcaaggacacttttcgactttttttaagctccatgcctagtaatacatttcctgttacagttcttcaaaattctgtcaaggtgaccaatgagcctccaaaaggcttacgtgcaaatatcagacgagcatttactgaaatgacaccttcgttttttgaagaaaatatacttggaaaaaaatggagacaaataatatttggcatttgtttcttccatgcaattattcaggagagaaagaagtttggcccccttggttggaatatctgctatgaatttaatgacagtgacagggaatgtgctttactgaatctcaaactctattgtaaagaaggaaagattccctgggatgcactaatttacattactggtgaaattacttatggtggtagagtcacagacagctgggaccaaagatgccttcgtactatcttgaaaagatttttttctcctgaaacattagaagaagattataaatactctgaatcaggcatctattttgcacccatggctgacagcctacaagagtttaaggactacattgaaaatctgcctttgatcgatgacccagaaatttttggaatgcatgaaaatgctaatctagtcttccagtacaaagagaccagcactttaatcaacaccatacttgaggttcagccaaggtcatctactggtggagagggaaaaagcaatgacgaaattgttcaagaacttgttgcttctgtccagaccagagttccagaaaaactggaaatggagggtgcttctgagagcctttttgtcaaggatcttcaaggacgtctgaactccttgaccaccgttcttggacaggaagtggaccggtttaacaacctgctgaagttaattcatacttctctggaaacactcaacaaagccatcgctggatttgtggtgatgtctgaagaaatggaaaaagtgtataacagtttcctcaacaaccaggttcccgctctgtggtccaacacagcctacccatccctgaagccactaggatcatgggtcaaagaccttatcctgaggacctcatttgtggatctgtggctcaaaagaggacagcctaagtcctactggatctctggtttcttctttcctcaaggatttctaacaggaactcttcaaaatcatgctcgaaaatacaatttgcctatagatgagctgagtttcaaatacagcgtaattcccacctatcgggatcaagctgcagtgatagaagctgccaagacagtgcaatttggacaagaactgcccatggacatggagttgccctctcctgaggatggtgttcttgttcatgggatgttcatggatgcttctcgatgggatgataaggagatggtgatagaagatgcattgcccggacagatgaatccagtgctgcctgtggtgcattttgaaccacaacaaaactataagccaagcccaacactttaccactgcccactttataaaacaggagcccgggcaggaacactctcaaccacaggacattcaaccaattttgtggtaaccgtcctgttaccctccaagcggtccaaagactactggattgccaagggatcagctttgctctgccagctgagcgaatgaaaaggtgccacctcagccctgaaaaagaaccaggccagagatctttcctaatgggagcaaaaggtttgaataatttatatgtgagcaaaacggtgttaattctgatttgacttaaacgtattgtgacttttatttctcttatgaccttaaaataaagtgtttgagttctttctgttggcaa

SEQ ID NO: 9000 - DNA, 7730 bp, Homo sapiens
  source 1..7730: mol_type = unassigned DNA
gcttccgtagaggccagctggttgctacgcagcaacaggaaacattccgcgctaccgagtactttctactcccgaccaggcattgctctctctggagaccctcggcggtggttgctgtattttgacttggagtaaggatgacttttcgggccacagatagtgaatttgacctgacaaatattgaagagtatgccgaaaattctgcactttcaagactgaataatataaaagccaaacaaagagtgagttatgtgacatccacagaaaatgaatctgatacacaaatcctaacgtttaggcacattacaaaagctcaggagaagacaagaaaacgacagcagcctataaaactagagcctttgccagtgctaaaagtctaccaagatcataagcagccagaatacatacatgaacagaaccgatttcagttaatgactgcaggaatcattaaacgtccagtaagcatagcaaaaaaaagttttgccacatcatctactcagtttcttgagcatcaagatgctgtgaaaaaaatgcagattcatcggccctatgttgaggtgttctctccctctcctcctaaactgccacatactggtattggaaaaagaggtctctttgggactagatcttcagcttaccctaagtacacttttcacgaccgagaagaagttgttaaagccaacattcgtgatcccttgcaaatcattaaaataatacgtgaaaatgaacatcttggatttctttatatgatccctgcagtgccaagatcatccattgaatatgatacatataatctaaaagttgtaagttatgagaacatcaataaaaatgactactatactattagccaaagggcagtaacacacatttataatgaagacattgaatttatcgaaattgatcgatgggaacaggaatatctgtatcacagagaactcactaagattcccatattttcactgttccggaaatggaaggcttttagtgtatggaggaagaatgtccgctccaagaaaatcactggatgtcaaaaatctctacaaaaaaatttgttcattgttaatcctcatttgcgaccagctcttcttaaaataaatgaattgtgttatcatttgagttttatgggactttgttatattgaaaagtgtcacacctacaccctgcaggaatttaaggccgcacaagtcatacggctagcagaggtgacagaacgcctaggagaatttcgaaatgaggcaaaatatgtagtcaggagggcttgtcgatttgctttgcgtgctgcaggatttgttcctgatgactgtgcatttggaccttttgaggattatcataaagtgcagagcagtggaagtttcattaatacaccacatgagttgcccacttatggagactctgagaaaatgacatatacagaacaggccagcaaaaggcattattgcatgaggctgacgtgctttattcgtctaaacgactatctaattgagaacacaatgcacatcttaacggtaaatgctgttaattcgcttttgaaccatctcactgacaagctaaaacgaacaccttcagcagatgtcattcagaaatggattactgaagagaagcctgaagtccctgataaaaaggggacccttatggtggaaaagcaagaagaagatgaatctctcatccccatgtttctcacagaactaatgttgacagtccagtcactgctctttgagccttctctggaagactttctggatggtattttgggtgcagttaatcactgtcaaaacactgtgttatcagttcctaatctcgtgcctgattcgtattttgatgctttcaccagcccttatattaacaacaaacttgaaggaaaaacctgtggaactgggccaagtttagcagcagtatttgaggatgataagaattttcacacaattatttctcaaataaaggaaaccattcaggccgcatttgaatcagcccgcatctatgcagctacctttgaaaagttccagatattcttcaaggaaaatgaaagtcttgatttacaagctcttaaacttcaggaacctgatattaacttttttagtgaacaactggaaaaatatcacaaacagcacaaggacgcagtagcgctcagacccaccagaaatgtaggattgctgctcattgatactaggcttctaagagaaaaattaattccatcacctttgcgatgcttagaggtgctaaattttatgcttcctcgtcaaagcaagaaaaaagtggatgccattatctttgaggcacaagatgcagagtataaacttgagtttgttccaactactaccacagaatatgttcatagcttattatttcttgatgaaattcaggaacggattgaaagccttgaagatgaggggaatatagtgactcaaatgtacaagcttatggaacaatatcaggtgcccacacctcctgaagactttgctgtttttgcaactatgaagccatccattgttgctgttcggaatgccattgataaatcagtgggtgatagagaatcaagcattaagcaattttgtgtgcatttgggtagtgatcttgaagaattaaacaacgaagtgaatgaagtaaaactgcaagcacaggatccacagattttagatatctctgctgaccaagacaaaataaggctcatattgaataatctgcaatctgttctggctgatcttcagaaacgtgcatttcagtataagtcctatcagaagaattttaaggtagaagtgtccaagtttgaagctttggaagaagtcagtgctgaactgaagctcaaacaattgctctgggattctttctctgaatgggataaactccaacaagaatggttaaagtccaaatttgattgcctggatccagaagtcctaaacggtcaagtttctaaatatgctaaatttgtgactcaactggaaaaaggcttgccacccaacagtgtagtgccccagctcaaatacaaggtggaaaaaatgaaagaaaagcttccagttatcattgacttgaggaacccgactttgaaggcaagacattgggcagctattgaacaaacagttgatgccactctagtggatgctgaaattccattaaccttggagaggctctcccagttgcatgtttttgactttggtcaagaaatccaggacatatctggacaggcttctggagaagctgccttagaagcaattcttaaaaaggtggaggactcttggaaaacaactgaatttgtcattctgcctcaccgtgactccaaagatgtgtttatactgggcggcacagatgacatacaggtccttcttgatgatagcaccatcaatgttgcaactcttgcctcatcacgttaccttggtccactgaaaactcgagtggatgaatggcaaaaacaacttgctttatttaatcaaacactggaagagtggctgacctgccagagaaactggctctacctagaaagtattttcaatgctccagacattcagaggcaattgcctgcagaggccaagatgttccttcaggtggataagtcatggaaagaaatcatgagaaaggtgaatcggctgcctaatgctcttcgagccgctactcagccaggacttctggaaacttttcaaaacaataatgcattacttgaccaaattcagaagtgcctagaggcatacttagaatcaaaaagagttatctttccaaggttttacttcttgtcaaatgatgaacttctggagattttggcccagacacgaaatccacaggccgtgcagccacacttaaggaaatgcttcgactccatttcaaagctcgaatttgctctcatgcctcctgccgaaggaaagattcctggtattgatggagaaccagaaaaggtttatactaatgatattttagcaatgctgtcaccagagggagaaagggttagcttggggaaaggcctcaaggcccgaggcaatgtagaggaatggcttggtaaagtggaagaagccatgttcacatctctgcgtcgcctgtgcaaagctgccatcgctgactatcaggggaaactgaggacagactgggtggttgctggccacccttctcaagttatcctgactgtttctcaaattatgtggtgccgtgatttgactgaatgtctggaaacagaacacagtaatcatatacaggccctgaagaattttgaaaaagtaaattttgagagattaaatgccctagctgcaatagttcaaggcagtcttcctaaattacacagaaacatcctaactgcattgattactattgatgtgcatgcaagagatatagtcactgaacttgttcaatccaaggtggagacagttgaatcttttgactggcagagacaactgcgctattactgggatatagacctggataattgtgtggctagaatggcgctctctcagtacacttatggctatgaatatttgggtgcatgcccaagattggttattactccactcacagatcgctgctatctttgcctcatgggagctttgcagcttgaccttgggggtgcaccagctggtcctgctggcactgggaaaacagagactaccaaagatctggcaaaagctcttgccatccagtgtgtggtctttaactgttcagatggtttggactacaagatgatggggcgcttcttcagtggcttggcacagtcaggggcctggtgctgctttgatgaatttaatcgaattgacatagaagttctgtccgtcatcgcgcagcaactcattaccattaggaacgccaaagcggcaaagctctctagattcatgtttgaggggcgggaaataaagttggtgatgacttgtgcagccttcatcacaatgaatcctggctatgcagggagaactgaattgccagataatttgaaagccctgtttagaccatttgcgatgatggttccaaattatgccttgattgcagaggtaattctatattctgaaggatttgaatccagtaaaatattagcaagaaaaatgactcagatgtataagctttgcagtgagcagctgtctcagcaggatcactacgactttggcatgagagctgtgaagtctgtcctggtcatggctggatctttaaaaagagaaaacccagacctaaatgaagatgtggtgttgataagagctttacaagactccaatttgccaaaatttctaacagatgatgctcttctgttcagtggaatcatatctgacctttttcctggagtccaaattccagaacatgattatggtattttacaatcaacaattgtggatgtcatgaatagacaaaatcttcagcctgagatgtgtatggttagaaaggtgatacagttttatgaaactatgctagtaaggcatggtgttatgttagtcgggccaacaggaggcggcaagaccacagtttaccgaatactagcagaaactttagggaatttacaaaaacttgggatagaaaattccttttaccaagcagttaaaacatatgttctcaaccctaaatcaattaccatgggtgaattatatggagaggttaataacttaaccttggaatggaaagatggtttgatggcactaagtgtccgagcagctgtgaatgatacttcagaagaccataaatggatcatcagtgatgggccagtagatgctctttggattgaaaacatgaatacagtgctggatgataacaagatgctttgcctggctaacagtgagaggattaaactcacacctcaaattcacatgctttttgaggtgcaagatctgcgggttgcctcccctgcaacagtcagtcgatgtggaatggtgtttgtggatcctgaagaactgaaatggatgccttatgttaaaacttggatgaagggtatttctaaaaaactgactgaggaaacccaagaatatatattgaatcttttccaacgttatgttgatgaaggtttacattttatcaataaaaagtgcagccaagcaattccacaagtggacatcagcaaagttactacactctgttgcttattggagtccttgatacttgggaaagatggagttaacttggcaatggaacaaacaaaattgaacactatactatgtcagacttttgtattctgttatttgtggtctttgggtggaaacctaactgaaaactactatgattcttttgatacatttattagaacacaatttgatgataatcctgatgccaggcttcccaattctggtgatctgtggagcattcatatggactttgacaccaaacggctggatccctgggaacgaatcatacctactttcaaatacaaccgagatgttccattttttgaaatgcttgtccccacaactgacacagtgcgctatgggtatctaatggaaaaactactggcagtcaagcattccgtgttgtttactggaataactggagtgggcaagtctgtgattgcaaaaggattgctaaataaaattcaagaatcagctggctatgtccctgtttatctaaatttttctgctcaaacttcatctgcaaggacacaagagatcattgagtcaaaactggagagaaaaagaaaaaatattctaggagcaccgggaaacaaacgaattgtgatttttgttgatgatttaaacatgcccagactggatcgctatggctctcagcctccgattgaattacttcggcagtatcaagattttgggggattttatgacagaaacaaactgttttggaaagaaatacaggatgtaacaatcatatcggcatgtgcacctccaggcggtggccgcaaccctgtgactccccgcttcatcagacacttcagcatgctgtgcctcccaatgccctcagagcacagtctgaaacagatttttcaggccatcttaaatggtttcctgagtgactttccaccagctgtaaagcaaactgcatcaagcattgtagaagcctcagttgagatttataacaaaatgagtgttgacctcctgccaacacccgccaagtcccattatgtctttaacttgagggacttatccaaatgtgtgcaagacaaacattttggaattgcaattgacctggaatattttttgaataagcccatcatatttggagatttcattaagtttggagcagataaagctgatcggatttatgatgacatgcctgatatagagaaaactgcaaatgttctacaggactatcttgatgattataatctcacaaatcccaaagaagtaaagttggtgttcttccaggatgctatagaacatgtttcaaggattgctcggatgatacgtcaagaaagaggcaatgccctgcttgttggagtaggaggcacaggaaagcagtcactcacgagacttgcagctcatatatgcggttacaaatgtttgcagattgaactcagccggggatataattatgatagttttcatgaagacctgaggaagttgtacaaaatggctggtgtagaagacaagaatatggttttccttttcactgacacccagattgtagtggaggagttcctagaagatataaataacatcctgaactcaggtgaagtgcctaatttatttgaaaaggatgaactggagcaggttttagcggccaccagaccaagagcaaaagaagtaggaatttctgaggggaacagagacgaggtaggatgtgccagagtagttatgtggctttatcacaaaaacgtttcttcaccttttatttaa

SEQ ID NO: 9001 - DNA, 14215 bp, Homo sapiens
  source 1..14215: mol_type = unassigned DNA
ggagcagaggctcctccctctacggaagaggctgcccctccccgttcagaagaggaagaggccccgcgccctccgacagtggaggccccggcagaagatggtttctctccttccgcagaagatgctgtttcttctgtggtggattatcgggatctcattccttctgaagaagggatagttcttccagatgatcatgaagcggatctgaatagagttcgacagaggcttgcaccgcgaccggttcagtcagtgatttcggaagtgctgtccttgccgtcttcccggaggtcctccagataccgccggagtatgagtggccttcccaatctacaggaaacattaaaagagagacaggcaagatttagagaggcaagggaaagccgaagactgaaaattgacccttcatacaaatatatatttgaaattctagcagaaaatcttggcctggacatagtaactgttgaagaattaattttggattgcccatctctggaagcatttactaatttttttgcgaaagatggttgtaagacactgaaatttttgtaccaagaaggagatgtacctggtattgaatgtggtcgaactattgctggagcaactaaaggggcaaaaatgatgaaattgtatatagacaatgcagccccggataaactaaaaggactgtgcatattttttgttcgttgccgtaatgatgttgctataaatgttaaaactattcaagaggaagcgctctttactgttctggatgcgtcgaaaggactcttaaatggaattagggatatgttggcaaatatatttctaccagctgttcttgcaacaaacaactggggtgctttaaaccagtccaagcagggagaatctgaaaaacatattttcactgaaaccatcaacagatatctttcatttttagatggtgctagaataagtattgagggaacagtgaagttaaagacaatagacaatgttaatttttccaaactgcacacctttgaagaagtaactgctgcagccagcaactcagaaactgttcatcagctggaggaagtgctgatggtatggtacaaacagatcgaacaggtacttattgagagtgagcagatgagaaaagaagctggtgattcaggtccactcactgaattggaacactggaaacgcatgtcagccaagttcaactatatcattgagcagattaaagggccaagttgtaaggctgtcataaatgtgctaaatgttgcacactccaaactgctaaagaattggcgtgatttggatgcaagaatcactgatacagcaaatgaatccaaagataatgtcagatatttgtatactttggaaaaagtgtgtcaacctctctataaccatgacctagtttccatggcacatggaatacaaaatttgattaatgccatcagaatgattcacggtgtgtcaaggtattataatacctcagagagaatgacctcattgtttatcaaggtaacaaatcaaatggtaacagcatgtaaagcatatattactgatggaggattaaaccatgtatgggatcaggaaacgccagttgtactaaagaaaattcaggactgcatttttctattcaaggaatatcaggcatcttttcataaaacaaggaaactgatttcagaatcctcaggggaaaaatcttttgaggtttcagaaatgtatatatttggaaaatttgaagctttttgcaaaagactggagaagattacagaaatgataactgttgtgcaaacatattcaaccttgagtaattctaccatagaaggaatagatattatggcaataaaattcagaaatatataccaaggggttaagaaaaagcaatatgacattctggatccaagaaggacagaatttgacacagatttcttagatttcatgacaaaaatcaatggtttagaggtacaaatacaggcatttatgaacagtagttttgggaaaatcttatcttctcagcaggctcttcagctacttcaaaggtttcagaagctgaacattccctgtctgggattagaaataaaccacacaatagagcgtattcttcagtactatgtggctgaacttgatgctactaagaagctttatcattctcagaaagatgacccccctcttgctcgcaacatgccccctatagcaggaaaaatactctgggtgaggcagctctatcgccggataagtgagcccatcaattatttctttaaaaactcagacattttatcaagtccggacggtaaagctgtcatccgtcagtataacaagatctcctatgtgctggtggaattcgaggtggtctatcacacagcctggatcagagagatttcacagttgcattacgctttacaagccacgctttttgtgcgacatccagaaacagggaagttgctggttaatttcgatcccaaaattttggaagttgttcgggaaactaagtgtatgataaaaatgaagttggatgtaccagaacaggcaaagagattgctaaaattggaaagtaaattgaaagcagacaaactgtatttgcagggtcttctgcaatattatgatgagttatgtcaggaagtgccttctgtgtttgtcaatctgatgaccccaaaaatgaaaaaggtggaatctgtgttgaggcaaggactcacagtgttaacatggtcgtctttaacactggaaagcttctttcaagaagtcgaattagttttggatatgttcaatcaacttttaaagaagatcagtgacttgtgtgaaatgcatattgatacagttctgaaggagatagccaaaactgtgttgatttctctgcctgaaagtggtgctaccaaagtagaagatatgttgaccctcaatgagacatacacaaaagaatgggctgacattctaaaccacaaaagtaagcatgtggaagaagctgtcagagaacttatatcaatatttgagcagatttatgaagtgaaatacactgggaaagtaggaaaacagtcagaacagcggaaacacgttgtttttggaagtgaaacaggagagggtgaaaacaatgactatgaagctaatattgtgaatgagtttgatactcatgataaagaagatgaatttaaaaaggagtgtaaagaggtctttgcttttttctctcatcaattactagacagtcttcaaaaagctacacggttatctctggacacaatgaaaagaagaatatttgttgcaagcctttatgggcgaaagcagtcagaagatattatttcctttataaaaagtgaagtacatcttgcaattcctaatgtggtgatgattcctagtttggatgacattcaacaagccattaaccgtatgatccagttaaccctggaggtcagcagaggagtggctcactgggggcaacagcaaatccgtcccatcaagtctgtcattcccagccccaccactactgacgtgacccatcaaaacacaggaaaactgctgaagaaggaagaaagatcttttgaagaagctattcctgcgaggaagctgaagaatttttacccgggggtagcggagcacaaggatatttctaagttggtcctgctcctttcttcctctgtaaattccctaagaaaggcagctcatgaggccctgcaggactttcagaagtacaagactctctggacagaggaccgcgatgtgaaagtgaaggaatttttggctaacaacccctctctgactgaaatcagatcagaaattctacactatgctacttttgaacaggagattgatgagttgaagcctattattgttgtaggagcacttgaattacatacagagccgatgaaattggccttatccatcgaggccaaggcatggaagatgttactctgtcgatatctgaatgaagaatacaaaaagaaaatgtcatacatgatagcatttattaatgaatacttgaaaaagttatctagacctattcgtgatttagatgatgtcagatttgcaatggaagccttgtcttgcatacgtgataatgaaattcaaatggacatgactttgggaccaattgaagaagcctatgctattttaaacagatttgaagttgaagtaaccaaagaagaatcagaagcagttgataccttaagatattctttcaacaaattgcagagcaaagctgtttcagtacaagaggacctagttcaagtgcagccaaagtttaaaagcaatctacttgagtctgtggaagtttttcgtgaggacgtgataaactttgcagaagcatatgaattggaaggacctatggttccaaatataccaccccaagaagctagcaacaggctacagatatttcaggccagtttcgatgatctgtggaggaaatttgttacgtattcatctggtgaacaactttttggattgcctgtgactgattatgaggttttacacaaaaccagaaaagaactcaacttgctgcagaagctgtatggattgtatgacaccgtaatgagcagtattagtggttattatgaaatactttggggagatgtagatattgaaaaaattaatgcagaactgctggaatttcaaaacagatgtcgtaaacttccaaaaggacttaaagattggcaagcttttttggatctcaaaaagagaattgatgatttcagtgagtcatgtcctctactggaaatgatgaccaataaggccatgaaacagagacactgggatagaatctccgagttaactggaaccccatttgatgtggaatctgattctttttgccttagaaatatcatggaagcaccactccttaaacataaggatgatattgaggatatttgcatatctgccattaaggagaaggatatcgaagccaagctgactcaggtgattgagaattggaccaaccaaaatctgagttttgcagcatttaagggaaaaggagagctcctgctcaaaggaaccgaatcgggagaaattatcactttgatggaggatagtttaatggtcttagggtctttactcagcaacagatacaatgctccatttaaaaaaaatatccagaattgggtgtataaattgtccacttcctcagatataattgaagagtggctcgtagtacagaacctttgggtttatcttgaagccgtctttgtaggtggagatattgccaaacagctgcctcaggaagcaaaacgttttcagaatattgacaagtcttggataaaaataatgcagcgagctcatgagaatcccaatgtgattaattgctgtgttggagatgaaaccatgggacaacttttacctcatttacatgagcagttggaagtatgtcagaagtcactcacagggtatttggagaagaaacgattactgtttccaagattcttctttgtatctgatccagttctcctggaaattcttggacaagccagtgattcccacaccatacagccgcatctccctgcagtatctgacaacatcaatgaggtgacatttcatgcaaaagactatgatcgcatcatggccgtcatatcaagagaaggagaaaaaattgttttggataattctgttatggccaaaggtcctgtggagatttggctactggatttgttaaaaatgcagatgtcatcattacataatataattagatccgctttctatcaaatcagtgattcaggatttcaactcttaccattcctcagccactttccagcacaggttggacttctgggaattcagatgttgtggacacacgattcagaagaggctttacgtaatgcaaaagatgacaggaaaatcatgcaagtgaccaatcagaaatttttggatattctaaatactctcattagtcagacaacacatgatctaagcaagtttgatagagtgaagttcgagactctaattaccatccatgtgcatcagagagatatttttgatgacttggtaaaaatgcatatcaaatcacctactgactttgaatggctaaaacagagtagattttattttaaggaagatttggatcaaactgtggtgtctattacagatgttgattttatttaccaaaatgaatttctgggatgtactgatcgtcttgttatcactccattaacagatagatgctatatcacgttagctcaggccttgggcatgaacatgggaggtgctcccgcaggacctgctggcactggcaaaacagaaaccacaaaagacatgggaaggtgtttgggaaaatatgtggtcgtgttcaattgctcagatcaaatggatttcagaggcctaggaaggattttcaaaggtcttgcacagtcgggttcctggggctgttttgatgagtttaacagaattgaattgcctgtattatcagtggcagcacaacaaatttatattgttttgacagcaagaaaagaaagaaagaaacagttcattttttctgatggtgattgtgttgatttaaatccagaatttggaatcttcttaacgatgaaccctggatatgctgggcgccaggaactaccagaaaacctaaaaatccagtttagaactgttgctatgatggttcctgatagacagatcattatgagagttaaacttgcaagctgtggttttcttgaaaatgttatcttggctcaaaaattttacgttctttacaaactctgtgaagagcaacttactaaacaggttcattatgactttggattgagaaatattctgtctgtattgaggactcttggatctcaaaaaagagccagaccagaagatagtgaattaagcattgtcatgagaggactaagagatatgaacctttccaaactggttgatgaagatgaacccctgttcctcagcttaatcaatgacctgttcccaggactgcaactggatagtaatacttatgcagaactgcaaaacgcagtagcccatcaggttcagatagagggtttgattaaccatccaccctggaacctgaaactcgtgcagttatatgagacgtctttggtacggcatggcttgatgactcttgggcccagtggttctggaaagacaaccgttatcacgattctaatgaaggcgcaaacagaatgcggaaggcctcatagagaaatgcgaatgaatccaaaagccattactgcacctcagatgtttggcagactggacactgctaccaatgactggacagatgggattttttctactctgtggagaaaaacattaaaagctaaaaaaggtgaaaacattttcctcattttagatggtcctgtggatgccatctggattgagaacttaaattccgttttggatgacaataaaactctgacgttagctaatggagatcgcattcccatggcccctagttgtaagcttctgtttgaagtccacaatatcgagaacgcctctcctgccacggtttctaggatgggcatggtctatatcagcagctctgctctcagctggaggccaatcttacaggcatggttgaagaaacgcactgcacaggaagctgctgtattcctgacactgtatgagaaagtctttgaagatacatacacatatatgaagctaaatctcaatcccaaaatgcagctcttggagtgcaactatattgtgcaatctctcaatcttctggaagggttaattccctccaaagaagaaggcggtgtttcctgtgtcgaacatcttcataaattatttgtgtttggcctaatgtggagtttaggagcccttctggaattagaaagcagagaaaagcttgaagccttcttacggcagcatgaaagcaagttggacttaccagaaatacctaaaggctcaaatcaaaccatgtatgagttttatgttactgattatggtgattgggagcactggaataagaaacttcagccttattattatccaactgacagtattccggaatattcatcaattttggttccaaatgttgacaatattagaacaaattttttgatagacaccattgcaaaacaacataaagctgttttgctcacaggagagcagggaactgcaaaaactgtcatggttaaggcctatttgaaaaaatatgatcctgaagtacagctatccaaaagtctaaacttttcatctgccacagaaccaatgatgtttcagagaacaattgaaagctacgtggataagcgaattggaagcacatatgggccaccaggagggagaaaaatgactgtatttattgatgatattaatatgcctgtgattaatgagtggggagatcagataactaatgagattgtgcgacagatgatggaaatggaaggaatgtacagcttggacaagcctggagacttcactactattgttgatgtgcagctcatagcagcaatgatccaccctggaggtggtcgaaatgatattccacaacgtttaaaaagacaatttactgtgtttaattgtacattgccttcaaatgcttcaatagacaaaatttttggaattattggatgtggatactttgatccttgtagaagtttcaagcctcaaatatgtgagatgattgtgaatttagtctcagtgggtagagtgctgtggcaatggactaaggtgaagatgctgccaactccttctaaatttcattacatcttcaatcttcgagatctttccagaatttggcaaggaatgttgaccataaaagctgaggagtgcgcttcaatccctactctcctgtcccttttcaaacacgagtgcagcagagtaattgcagacagatttataactcctgaagatgagcagtggtttaatgcacatcttactcgtgcagttgaagaaaatattggctctgatgcagcgtcgtgtattcttcctgaaccatactttgtggattttcttcgtgagatgccagaaccaactggtgatgaacctgaagactctgtgtttgaagtacccaaaatatatgaattgatgccatcctttgactttctggctgaaaaactccagttttaccagagacagttcaatgaaatcattagaggaacatctcttgatctggtgttttttaaagatgcaatgactcatcttattaagatttcacgaataattcgaacgtcgtgtggaaatgcattgctggtgggtgttggtggttccggaaaacaaagtctttcaagattggcctcttttattgctggctatcaaatattccagataacattaaccaggtcttacaatgtgactaatctaacagatgatttaaaagctttgtacaaagttgctggtgctgatggaaaaggcatcactttcatctttactgacagtgaaataaaagatgaggcatttctagaataccttaacaacttgctatcttcaggggagatctccaacttgtttgcacgagatgagatggatgaaatcacccaaggtctgatttcagtgatgaagagggagctacctcgccatcctcctacctttgataatttgtatgaatacttcatttcaagatcaaggaagaacttacatgttgttctctgcttttctccagttggtgagaagttccgtgcccgttctttgaaatttcctggcttgatatcaggttgcactatggactggttcagccgctggccaagggaggctctgattgctgtggcctcctacttcctttcagactataatattgtctgctctagtgaaattaaaagacaagttgtagaaacaatgggcctgtttcatgacatggtttcagagagctgtgaaagttatttccaaagataccgccgaagagcacatgtgactcccaaatcttacctctcatttataaatggttataaaaacatttatgctgaaaaggtgaagttcattaatgaacaggctgaacgtatgaatattggtcttgataaactaatggaggcaagtgaatctgttgctaaactctctcaggatcttgcagtcaaggagaaggagttggcagtggcttccataaaagcagacgaagtattagcagaagtcacagtaagcgctcaggcttcagccaaaattaaaaatgaagtacaggaggtaaaggacaaagcccaaaaaattgtggatgaaattgatagtgaaaaagtgaaagctgaaagcaagcttgaggcagctaaacctgcactggaagaagcagaagcagccctgaatactatcaagccaaatgatattgccacagtcaggaaacttgcaaaaccaccacatcttattatgagaatcatggactgtgttctgttactatttcaaaagaaaattgaccctgttactatggatccagaaaaatcttgctgtaagccatcatggggagagtcattaaagttgatgagtgcaacaggattcctgtggagccttcagcagttccctaaggacactataaatgaagagactgttgagttactacagccatattttaatatggatgattatacttttgaaagtgccaaaaaagtctgtgggaatgtggctggtctcctgtcttggacacttgctatggcaatattttatggcatcaatagagaagtgttgcctctgaaggccaacctggccaagcaggaaggccggttagcagttgctaatgctgagttagggaaggcacaagccctgctggatgagaagcaagctgagctggataaagtacaggcaaaatttgatgcagcaatgaatgagaaaatggatttgcttaatgacgctgatacgtgccggaaaaagatgcaggccgcctccactctcatcgatgggctgagtggagaaaaaatccggtggacccagcaaagtaaagaattcaaagctcagattaatagacttgtaggtgatattctgctgtgcacgggattcctttcctaccttggtcctttcaatcagatatttaggaactatttgcttaaagatcaatgggaaatggagttgagagcacggaaaattcctttcacagaaaacctgaatcttatttcaatgttggtggatcctccaactattggtgagtgggggctacagggattaccaggagatgatctctcaattcagaatggcattattgtgacaaaggccaccagatacccactcctcatagacccacaaactcaaggcaaaacttggattaaatcaaaggaaaaagaaaatgatttacaggtgacatctctgaaccataaatattttcgcacacacttggaggacagcctttccttgggccgaccccttctcattgaggacattcatgaagagctggatccagccttggataatgtattagaaaagaattttattaaatctggcaccactttcaaggtgaaagtcggtgataaggaatgtgatatcatggatacatttaaactttacattactacgaagttaccaaatcctgcctttaccccagagattaatgctaaaacgtcagtcattgatttcactgttacaatgaaaggacttgagaatcagttactaaggagagtcattctaacagagaaacaggagttagaggctgagagggttaaacttttggaggatgttacttttaataagcggaagatgaaagaacttgaagataacctcctctataaattaagtgctacaaaaggctcattggtagatgacgaatctctcattggtgtacttcgaactaccaagcagacagcagctgaggtaagtgaaaagttgcatgtggctgcagaaactgagatcaagatcaacgcggctcaggaggagttccggcccgcagccacccgcggaagcatcctctacttcctcatcacagagatgagcatggtcaacatcatgtatcagacgtcattggcccagttcttgaagttatttgaccagtccatggccagatctgaaaagtcaccactacctcaaaagagaattacaaatattatcgagtacctgacatatgaagtttttacatactctgtcagaggcctatacgaaaaccacaaattcctgtttgtactcctcatgaccttaaagattgaccttcagagagggacagttaagcacagagagtttcaagctctcattaaagggggagcagctctggacctgaaagcctgtcctcccaaaccctatcgctggatccttgacatgacttggctgaatcttgtggagctgagtaaacttccacaatttgcagaaattatgaaccagatatctcgtaatgagaaggggtggaaaagctggtttgataaagatgctccagaggaggaaattatccctgatggatataatgattcactagatacctgccataaacttttacttatcaggtcttggtgcccagaccgtactgtttttcaagcaagaaagtatattgcagattctttggaggagaagtacacagaaccagttatcttaaatctggagaaaacttgggaagaaagtgatacccggacacctctgatatgcttcctgtccatgggatctgaccccaccaatcaaattgatgcattggccaagaaactgaaactggaatgtagaactatctcaatggggcaaggacaagaagtacatgctcgaaagctgattcagatgtcaatgcagcagggtggttgggtattactacaaaattgccaccttggcctggaattcatggaagaattactagagacgctaattaccactgaagccagtgatgattctttccgagtatggataactacggagccccatgatcgatttccaattacattgcttcagacctctctcaaattcactaatgagccaccccaaggtgtacgcgcaggtttgaaaagaacatttgctggaattaatcaagaccttctggacatcagtaatttacccatgtggaagccgatgctttacacagtagcatttttacactccactgtgcaggagcgacgaaaatttggccccttaggatggaatattccctacgaattcaattctgctgacttttcagccagtgttcagtttattcagaatcaccttgatgaatgcgatattaagaaaggtgtatcatggaatacggttcggtacatgatcggagaagtacaatatggaggcagagtgacagatgactttgacaaacgtctacttaattgctttgccagagtctggttcagtgagaagatgtttgaaccgtcattctgcttttatactggatataaaatccccttatgcaaaaccttagaccagtattttgaatacatccagtcactgccatccctagataaccctgaagtctttgggcttcaccctaatgctgatatcacgtatcagagtaacactgcttctgctgttcttgaaacaattaccaacattcaacccaaagagagtggaggtggtgtgggagagacccgggaggctattgtttatagattatctgaagatatgctgagtaaactccctcctgattacattcctcatgaggtgaaatctcgtttgataaagatgggccatcttaattcaatgaacatatttcttagacaagaaattgacagaatgcaaagagtcatttcaatactccgcagtagcctgagtgatctaaaattggccattgaaggaacaatcattatgagtgagaatctgagagatgctctggacaacatgtatgatgctcgtatacctcagctctggaaaagagtgtcttgggattcgtccacactgggcttctggttcactgaacttttggaaagaaatgctcagttttctacgtggatatttgaagggaggcctaatgtgttttggatgactggtttctttaatccccaaggcttcctcacagcaatgaggcaagaagtgacccgtgcccacaaaggctgggcactggacactgtgaccatccacaatgaagttctgagacagaccaaggaggagatcacgtcaccccctggggaaggtgtgtatatttatgggctctacatggatggagcagcctgggacagacggaatgggaagctcatggaatccacccccaaggtactcttcacgcagttacccgtgctccacatctttgccattaactccacggcacccaaggaccccaagctgtatgtgtgtcctatttacaagaaacccaggcgaactgatttgaccttcatcactgtggtatatttacgaacagtgttgtccccggatcactggatcctgagaggagtggcccttttgtgtgacatcaagtaagttcatttccatctgctcagggcaccagaacccacatagacagcctgtgctattgagggactcagtgatgtgtgtgtcttttctccccagtaattccttaattactctttctacattaaaaagttga

SEQ ID NO: 9002 - DNA, 13860 bp, Homo sapiens
  source 1..13860: mol_type = unassigned DNA
tcttcccggaggtcctccagataccgccggagtatgagtggccttcccaatctacaggaaacattaaaagagagacaggcaagatttagagaggcaagggaaagccgaagactgaaaattgacccttcatacaaatatatatttgaaattctagcagaaaatcttggcctggacatagtaactgttgaagaattaattttggattgcccatctaatgtggtcgaactattgctggagcaactaaaggggcaaaaatgatgaaattgtatatagacaatgcagccccggataaactaaaaggactgtgcatattttttgttcgttgccgtaatgatgttgctataaatgttaaaactattcaagaggaagcgctctttactgttctggatgcgtcgaaaggactcttaaatggaattagggatatgttggcaaatatatttctaccagctgttcttgcaacaaacaactggggtgctttaaaccagtccaagcagggagaatctgaaaaacatattttcactgaaaccatcaacagatatctttcatttttagatggtgctagaataagtattgagggaacagtgaagttaaagacaatagacaatgttaatttttccaaactgcacacctttgaagaagtaactgctgcagccagcaactcagaaactgttcatcagctggaggaagtgctgatggtatggtacaaacagatcgaacaggtacttattgagagtgagcagatgagaaaagaagctggtgattcaggtccactcactgaattggaacactggaaacgcatgtcagccaagttcaactatatcattgagcagattaaagggccaagttgtaaggctgtcataaatgtgctaaatgttgcacactccaaactgctaaagaattggcgtgatttggatgcaagaatcactgatacagcaaatgaatccaaagataatgtcagatatttgtatactttggaaaaagtgtgtcaacctctctataaccatgacctagtttccatggcacatggaatacaaaatttgattaatgccatcagaatgattcacggtgtgtcaaggtattataatacctcagagagaatgacctcattgtttatcaaggtaacaaatcaaatggtaacagcatgtaaagcatatattactgatggaggattaaaccatgtatgggatcaggaaacgccagttgtactaaagaaaattcaggactgcatttttctattcaaggaatatcaggcatcttttcataaaacaaggaaactgatttcagaatcctcaggggaaaaatcttttgaggtttcagaaatgtatatatttggaaaatttgaagctttttgcaaaagactggagaagattacagaaatgataactgttgtgcaaacatattcaaccttgagtaattctaccatagaaggaatagatattatggcaataaaattcagaaatatataccaaggggttaagaaaaagcaatatgacattctggatccaagaaggacagaatttgacacagatttcttagatttcatgacaaaaatcaatggtttagaggtacaaatacaggcatttatgaacagtagttttgggaaaatcttatcttctcagcaggctcttcagctacttcaaaggtttcagaagctgaacattccctgtctgggattagaaataaaccacacaatagagcgtattcttcagtactatgtggctgaacttgatgctactaagaagctttatcattctcagaaagatgacccccctcttgctcgcaacatgccccctatagcaggaaaaatactctgggtgaggcagctctatcgccggataagtgagcccatcaattatttctttaaaaactcagacattttatcaagtccggacggtaaagctgtcatccgtcagtataacaagatctcctatgtgctggtggaattcgaggtggtctatcacacagcctggatcagagagatttcacagttgcattacgctttacaagccacgctttttgtgcgacatccagaaacagggaagttgctggttaatttcgatcccaaaattttggaagttgttcgggaaactaagtgtatgataaaaatgaagttggatgtaccagaacaggcaaagagattgctaaaattggaaagtaaattgaaagcagacaaactgtatttgcagggtcttctgcaatattatgatgagttatgtcaggaagtgccttctgtgtttgtcaatctgatgaccccaaaaatgaaaaaggtggaatctgtgttgaggcaaggactcacagtgttaacatggtcgtctttaacactggaaagcttctttcaagaagtcgaattagttttggatatgttcaatcaacttttaaagaagatcagtgacttgtgtgaaatgcatattgatacagttctgaaggagatagccaaaactgtgttgatttctctgcctgaaagtggtgctaccaaagtagaagatatgttgaccctcaatgagacatacacaaaagaatgggctgacattctaaaccacaaaagtaagcatgtggaagaagctgtcagagaacttatatcaatatttgagcagatttatgaagtgaaatacactgggaaagtaggaaaacagtcagaacagcggaaacacgttgtttttggaagtgaaacaggagagggtgaaaacaatgactatgaagctaatattgtgaatgagtttgatactcatgataaagaagatgaatttaaaaaggagtgtaaagaggtctttgcttttttctctcatcaattactagacagtcttcaaaaagctacacggttatctctggacacaatgaaaagaagaatatttgttgcaagcctttatgggcgaaagcagtcagaagatattatttcctttataaaaagtgaagtacatcttgcaattcctaatgtggtgatgattcctagtttggatgacattcaacaagccattaaccgtatgatccagttaaccctggaggtcagcagaggagtggctcactgggggcaacagcaaatccgtcccatcaagtctgtcattcccagccccaccactactgacgtgacccatcaaaacacaggaaaactgctgaagaaggaagaaagatcttttgaagaagctattcctgcgaggaagctgaagaatttttacccgggggtagcggagcacaaggatatttctaagttggtcctgctcctttcttcctctgtaaattccctaagaaaggcagctcatgaggccctgcaggactttcagaagtacaagactctctggacagaggaccgcgatgtgaaagtgaaggaatttttggctaacaacccctctctgactgaaatcagatcagaaattctacactatgctacttttgaacaggagattgatgagttgaagcctattattgttgtaggagcacttgaattacatacagagccgatgaaattggccttatccatcgaggccaaggcatggaagatgttactctgtcgatatctgaatgaagaatacaaaaagaaaatgtcatacatgatagcatttattaatgaatacttgaaaaagttatctagacctattcgtgatttagatgatgtcagatttgcaatggaagccttgtcttgcatacgtgataatgaaattcaaatggacatgactttgggaccaattgaagaagcctatgctattttaaacagatttgaagttgaagtaaccaaagaagaatcagaagcagttgataccttaagatattctttcaacaaattgcagagcaaagctgtttcagtacaagaggacctagttcaagtgcagccaaagtttaaaagcaatctacttgagtctgtggaagtttttcgtgaggacgtgataaactttgcagaagcatatgaattggaaggacctatggttccaaatataccaccccaagaagctagcaacaggctacagatatttcaggccagtttcgatgatctgtggaggaaatttgttacgtattcatctggtgaacaactttttggattgcctgtgactgattatgaggttttacacaaaaccagaaaagaactcaacttgctgcagaagctgtatggattgtatgacaccgtaatgagcagtattagtggttattatgaaatactttggggagatgtagatattgaaaaaattaatgcagaactgctggaatttcaaaacagatgtcgtaaacttccaaaaggacttaaagattggcaagcttttttggatctcaaaaagagaattgatgatttcagtgagtcatgtcctctactggaaatgatgaccaataaggccatgaaacagagacactgggatagaatctccgagttaactggaaccccatttgatgtggaatctgattctttttgccttagaaatatcatggaagcaccactccttaaacataaggatgatattgaggatatttgcatatctgccattaaggagaaggatatcgaagccaagctgactcaggtgattgagaattggaccaaccaaaatctgagttttgcagcatttaagggaaaaggagagctcctgctcaaaggaaccgaatcgggagaaattatcactttgatggaggatagtttaatggtcttagggtctttactcagcaacagatacaatgctccatttaaaaaaaatatccagaattgggtgtataaattgtccacttcctcagatataattgaagagtggctcgtagtacagaacctttgggtttatcttgaagccgtctttgtaggtggagatattgccaaacagctgcctcaggaagcaaaacgttttcagaatattgacaagtcttggataaaaataatgcagcgagctcatgagaatcccaatgtgattaattgctgtgttggagatgaaaccatgggacaacttttacctcatttacatgagcagttggaagtatgtcagaagtcactcacagggtatttggagaagaaacgattactgtttccaagattcttctttgtatctgatccagttctcctggaaattcttggacaagccagtgattcccacaccatacagccgcatctccctgcagtatctgacaacatcaatgaggtgacatttcatgcaaaagactatgatcgcatcatggccgtcatatcaagagaaggagaaaaaattgttttggataattctgttatggccaaaggtcctgtggagatttggctactggatttgttaaaaatgcagatgtcatcattacataatataattagatccgctttctatcaaatcagtgattcaggatttcaactcttaccattcctcagccactttccagcacaggttggacttctgggaattcagatgttgtggacacacgattcagaagaggctttacgtaatgcaaaagatgacaggaaaatcatgcaagtgaccaatcagaaatttttggatattctaaatactctcattagtcagacaacacatgatctaagcaagtttgatagagtgaagttcgagactctaattaccatccatgtgcatcagagagatatttttgatgacttggtaaaaatgcatatcaaatcacctactgactttgaatggctaaaacagagtagattttattttaaggaagatttggatcaaactgtggtgtctattacagatgttgattttatttaccaaaatgaatttctgggatgtactgatcgtcttgttatcactccattaacagatagatgctatatcacgttagctcaggccttgggcatgaacatgggaggtgctcccgcaggacctgctggcactggcaaaacagaaaccacaaaagacatgggaaggtgtttgggaaaatatgtggtcgtgttcaattgctcagatcaaatggatttcagaggcctaggaaggattttcaaaggtcttgcacagtcgggttcctggggctgttttgatgagtttaacagaattgaattgcctgtattatcagtggcagcacaacaaatttatattgttttgacagcaagaaaagaaagaaagaaacagttcattttttctgatggtgattgtgttgatttaaatccagaatttggaatcttcttaacgatgaaccctggatatgctgggcgccaggaactaccagaaaacctaaaaatccagtttagaactgttgctatgatggttcctgatagacagatcattatgagagttaaacttgcaagctgtggttttcttgaaaatgttatcttggctcaaaaattttacgttctttacaaactctgtgaagagcaacttactaaacaggttcattatgactttggattgagaaatattctgtctgtattgaggactcttggatctcaaaaaagagccagaccagaagatagtgaattaagcattgtcatgagaggactaagagatatgaacctttccaaactggttgatgaagatgaacccctgttcctcagcttaatcaatgacctgttcccaggactgcaactggatagtaatacttatgcagaactgcaaaacgcagtagcccatcaggttcagatagagggtttgattaaccatccaccctggaacctgaaactcgtgcagttatatgagacgtctttggtacggcatggcttgatgactcttgggcccagtggttctggaaagacaaccgttatcacgattctaatgaaggcgcaaacagaatgcggaaggcctcatagagaaatgcgaatgaatccaaaagccattactgcacctcagatgtttggcagactggacactgctaccaatgactggacagatgggattttttctactctgtggagaaaaacattaaaagctaaaaaaggtgaaaacattttcctcattttagatggtcctgtggatgccatctggattgagaacttaaattccgttttggatgacaataaaactctgacgttagctaatggagatcgcattcccatggcccctagttgtaagcttctgtttgaagtccacaatatcgagaacgcctctcctgccacggtttctaggatgggcatggtctatatcagcagctctgctctcagctggaggccaatcttacaggcatggttgaagaaacgcactgcacaggaagctgctgtattcctgacactgtatgagaaagtctttgaagatacatacacatatatgaagctaaatctcaatcccaaaatgcagctcttggagtgcaactatattgtgcaatctctcaatcttctggaagggttaattccctccaaagaagaaggcggtgtttcctgtgtcgaacatcttcataaattatttgtgtttggcctaatgtggagtttaggagcccttctggaattagaaagcagagaaaagcttgaagccttcttacggcagcatgaaagcaagttggacttaccagaaatacctaaaggctcaaatcaaaccatgtatgagttttatgttactgattatggtgattgggagcactggaataagaaacttcagccttattattatccaactgacagtattccggaatattcatcaattttggttccaaatgttgacaatattagaacaaattttttgatagacaccattgcaaaacaacataaagctgttttgctcacaggagagcagggaactgcaaaaactgtcatggttaaggcctatttgaaaaaatatgatcctgaagtacagctatccaaaagtctaaacttttcatctgccacagaaccaatgatgtttcagagaacaattgaaagctacgtggataagcgaattggaagcacatatgggccaccaggagggagaaaaatgactgtatttattgatgatattaatatgcctgtgattaatgagtggggagatcagataactaatgagattgtgcgacagatgatggaaatggaaggaatgtacagcttggacaagcctggagacttcactactattgttgatgtgcagctcatagcagcaatgatccaccctggaggtggtcgaaatgatattccacaacgtttaaaaagacaatttactgtgtttaattgtacattgccttcaaatgcttcaatagacaaaatttttggaattattggatgtggatactttgatccttgtagaagtttcaagcctcaaatatgtgagatgattgtgaatttagtctcagtgggtagagtgctgtggcaatggactaaggtgaagatgctgccaactccttctaaatttcattacatcttcaatcttcgagatctttccagaatttggcaaggaatgttgaccataaaagctgaggagtgcgcttcaatccctactctcctgtcccttttcaaacacgagtgcagcagagtaattgcagacagatttataactcctgaagatgagcagtggtttaatgcacatcttactcgtgcagttgaagaaaatattggctctgatgcagcgtcgtgtattcttcctgaaccatactttgtggattttcttcgtgagatgccagaaccaactggtgatgaacctgaagactctgtgtttgaagtacccaaaatatatgaattgatgccatcctttgactttctggctgaaaaactccagttttaccagagacagttcaatgaaatcattagaggaacatctcttgatctggtgttttttaaagatgcaatgactcatcttattaagatttcacgaataattcgaacgtcgtgtggaaatgcattgctggtgggtgttggtggttccggaaaacaaagtctttcaagattggcctcttttattgctggctatcaaatattccagataacattaaccaggtcttacaatgtgactaatctaacagatgatttaaaagctttgtacaaagttgctggtgctgatggaaaaggcatcactttcatctttactgacagtgaaataaaagatgaggcatttctagaataccttaacaacttgctatcttcaggggagatctccaacttgtttgcacgagatgagatggatgaaatcacccaaggtctgatttcagtgatgaagagggagctacctcgccatcctcctacctttgataatttgtatgaatacttcatttcaagatcaaggaagaacttacatgttgttctctgcttttctccagttggtgagaagttccgtgcccgttctttgaaatttcctggcttgatatcaggttgcactatggactggttcagccgctggccaagggaggctctgattgctgtggcctcctacttcctttcagactataatattgtctgctctagtgaaattaaaagacaagttgtagaaacaatgggcctgtttcatgacatggtttcagagagctgtgaaagttatttccaaagataccgccgaagagcacatgtgactcccaaatcttacctctcatttataaatggttataaaaacatttatgctgaaaaggtgaagttcattaatgaacaggctgaacgtatgaatattggtcttgataaactaatggaggcaagtgaatctgttgctaaactctctcaggatcttgcagtcaaggagaaggagttggcagtggcttccataaaagcagacgaagtattagcagaagtcacagtaagcgctcaggcttcagccaaaattaaaaatgaagtacaggaggtaaaggacaaagcccaaaaaattgtggatgaaattgatagtgaaaaagtgaaagctgaaagcaagcttgaggcagctaaacctgcactggaagaagcagaagcagccctgaatactatcaagccaaatgatattgccacagtcaggaaacttgcaaaaccaccacatcttattatgagaatcatggactgtgttctgttactatttcaaaagaaaattgaccctgttactatggatccagaaaaatcttgctgtaagccatcatggggagagtcattaaagttgatgagtgcaacaggattcctgtggagccttcagcagttccctaaggacactataaatgaagagactgttgagttactacagccatattttaatatggatgattatacttttgaaagtgccaaaaaagtctgtgggaatgtggctggtctcctgtcttggacacttgctatggcaatattttatggcatcaatagagaagtgttgcctctgaaggccaacctggccaagcaggaaggccggttagcagttgctaatgctgagttagggaaggcacaagccctgctggatgagaagcaagctgagctggataaagtacaggcaaaatttgatgcagcaatgaatgagaaaatggatttgcttaatgacgctgatacgtgccggaaaaagatgcaggccgcctccactctcatcgatgggctgagtggagaaaaaatccggtggacccagcaaagtaaagaattcaaagctcagattaatagacttgtaggtgatattctgctgtgcacgggattcctttcctaccttggtcctttcaatcagatatttaggaactatttgcttaaagatcaatgggaaatggagttgagagcacggaaaattcctttcacagaaaacctgaatcttatttcaatgttggtggatcctccaactattggtgagtgggggctacagggattaccaggagatgatctctcaattcagaatggcattattgtgacaaaggccaccagatacccactcctcatagacccacaaactcaaggcaaaacttggattaaatcaaaggaaaaagaaaatgatttacaggtgacatctctgaaccataaatattttcgcacacacttggaggacagcctttccttgggccgaccccttctcattgaggacattcatgaagagctggatccagccttggataatgtattagaaaagaattttattaaatctggcaccactttcaaggtgaaagtcggtgataaggaatgtgatatcatggatacatttaaactttacattactacgaagttaccaaatcctgcctttaccccagagattaatgctaaaacgtcagtcattgatttcactgttacaatgaaaggacttgagaatcagttactaaggagagtcattctaacagagaaacaggagttagaggctgagagggttaaacttttggaggatgttacttttaataagcggaagatgaaagaacttgaagataacctcctctataaattaagtgctacaaaaggctcattggtagatgacgaatctctcattggtgtacttcgaactaccaagcagacagcagctgaggtaagtgaaaagttgcatgtggctgcagaaactgagatcaagatcaacgcggctcaggaggagttccggcccgcagccacccgcggaagcatcctctacttcctcatcacagagatgagcatggtcaacatcatgtatcagacgtcattggcccagttcttgaagttatttgaccagtccatggccagatctgaaaagtcaccactacctcaaaagagaattacaaatattatcgagtacctgacatatgaagtttttacatactctgtcagaggcctatacgaaaaccacaaattcctgtttgtactcctcatgaccttaaagattgaccttcagagagggacagttaagcacagagagtttcaagctctcattaaagggggagcagctctggacctgaaagcctgtcctcccaaaccctatcgctggatccttgacatgacttggctgaatcttgtggagctgagtaaacttccacaatttgcagaaattatgaaccagatatctcgtaatgagaaggggtggaaaagctggtttgataaagatgctccagaggaggaaattatccctgatggatataatgattcactagatacctgccataaacttttacttatcaggtcttggtgcccagaccgtactgtttttcaagcaagaaagtatattgcagattctttggaggagaagtacacagaaccagttatcttaaatctggagaaaacttgggaagaaagtgatacccggacacctctgatatgcttcctgtccatgggatctgaccccaccaatcaaattgatgcattggccaagaaactgaaactggaatgtagaactatctcaatggggcaaggacaagaagtacatgctcgaaagctgattcagatgtcaatgcagcagggtggttgggtattactacaaaattgccaccttggcctggaattcatggaagaattactagagacgctaattaccactgaagccagtgatgattctttccgagtatggataactacggagccccatgatcgatttccaattacattgcttcagacctctctcaaattcactaatgagccaccccaaggtgtacgcgcaggtttgaaaagaacatttgctggaattaatcaagaccttctggacatcagtaatttacccatgtggaagccgatgctttacacagtagcatttttacactccactgtgcaggagcgacgaaaatttggccccttaggatggaatattccctacgaattcaattctgctgacttttcagccagtgttcagtttattcagaatcaccttgatgaatgcgatattaagaaaggtgtatcatggaatacggttcggtacatgatcggagaagtacaatatggaggcagagtgacagatgactttgacaaacgtctacttaattgctttgccagagtctggttcagtgagaagatgtttgaaccgtcattctgcttttatactggatataaaatccccttatgcaaaaccttagaccagtattttgaatacatccagtcactgccatccctagataaccctgaagtctttgggcttcaccctaatgctgatatcacgtatcagagtaacactgcttctgctgttcttgaaacaattaccaacattcaacccaaagagagtggaggtggtgtgggagagacccgggaggctattgtttatagattatctgaagatatgctgagtaaactccctcctgattacattcctcatgaggtgaaatctcgtttgataaagatgggccatcttaattcaatgaacatatttcttagacaagaaattgacagaatgcaaagagtcatttcaatactccgcagtagcctgagtgatctaaaattggccattgaaggaacaatcattatgagtgagaatctgagagatgctctggacaacatgtatgatgctcgtatacctcagctctggaaaagagtgtcttgggattcgtccacactgggcttctggttcactgaacttttggaaagaaatgctcagttttctacgtggatatttgaagggaggcctaatgtgttttggatgactggtttctttaatccccaaggcttcctcacagcaatgaggcaagaagtgacccgtgcccacaaaggctgggcactggacactgtgaccatccacaatgaagttctgagacagaccaaggaggagatcacgtcaccccctggggaaggtgtgtatatttatgggctctacatggatggagcagcctgggacagacggaatgggaagctcatggaatccacccccaaggtactcttcacgcagttacccgtgctccacatctttgccattaactccacggcacccaaggaccccaagctgtatgtgtgtcctatttacaagaaacccaggcgaactgatttgaccttcatcactgtggtatatttacgaacagtgttgtccccggatcactggatcctgagaggagtggcccttttgtgtgacatcaagtaagttcatttccatctgctcagggcaccagaacccacatagacagcctgtgctattgagggactcagtgatgtgtgtgtcttttctccccagtaattccttaattactctttctacattaaaaagttgatgttct

SEQ ID NO: 9003 - DNA, 13365 bp, Homo sapiens
  source 1..13365: mol_type = unassigned DNA
atgatgaaattgtatatagacaatgcagccccggataaactaaaaggactgtgcatattttttgttcgttgccgtaatgatgttgctataaatgttaaaactattcaagaggaagcgctctttactgttctggatgcgtcgaaaggactcttaaatggaattagggatatgttggcaaatatatttctaccagctgttcttgcaacaaacaactggggtgctttaaaccagtccaagcagggagaatctgaaaaacatattttcactgaaaccatcaacagatatctttcatttttagatggtgctagaataagtattgagggaacagtgaagttaaagacaatagacaatgttaatttttccaaactgcacacctttgaagaagtaactgctgcagccagcaactcagaaactgttcatcagctggaggaagtgctgatggtatggtacaaacagatcgaacaggtacttattgagagtgagcagatgagaaaagaagctggtgattcaggtccactcactgaattggaacactggaaacgcatgtcagccaagttcaactatatcattgagcagattaaagggccaagttgtaaggctgtcataaatgtgctaaatgttgcacactccaaactgctaaagaattggcgtgatttggatgcaagaatcactgatacagcaaatgaatccaaagataatgtcagatatttgtatactttggaaaaagtgtgtcaacctctctataaccatgacctagtttccatggcacatggaatacaaaatttgattaatgccatcagaatgattcacggtgtgtcaaggtattataatacctcagagagaatgacctcattgtttatcaaggtaacaaatcaaatggtaacagcatgtaaagcatatattactgatggaggattaaaccatgtatgggatcaggaaacgccagttgtactaaagaaaattcaggactgcatttttctattcaaggaatatcaggcatcttttcataaaacaaggaaactgatttcagaatcctcaggggaaaaatcttttgaggtttcagaaatgtatatatttggaaaatttgaagctttttgcaaaagactggagaagattacagaaatgataactgttgtgcaaacatattcaaccttgagtaattctaccatagaaggaatagatattatggcaataaaattcagaaatatataccaaggggttaagaaaaagcaatatgacattctggatccaagaaggacagaatttgacacagatttcttagatttcatgacaaaaatcaatggtttagaggtacaaatacaggcatttatgaacagtagttttgggaaaatcttatcttctcagcaggctcttcagctacttcaaaggtttcagaagctgaacattccctgtctgggattagaaataaaccacacaatagagcgtattcttcagtactatgtggctgaacttgatgctactaagaagctttatcattctcagaaagatgacccccctcttgctcgcaacatgccccctatagcaggaaaaatactctgggtgaggcagctctatcgccggataagtgagcccatcaattatttctttaaaaactcagacattttatcaagtccggacggtaaagctgtcatccgtcagtataacaagatctcctatgtgctggtggaattcgaggtggtctatcacacagcctggatcagagagatttcacagttgcattacgctttacaagccacgctttttgtgcgacatccagaaacagggaagttgctggttaatttcgatcccaaaattttggaagttgttcgggaaactaagtgtatgataaaaatgaagttggatgtaccagaacaggcaaagagattgctaaaattggaaagtaaattgaaagcagacaaactgtatttgcagggtcttctgcaatattatgatgagttatgtcaggaagtgccttctgtgtttgtcaatctgatgaccccaaaaatgaaaaaggtggaatctgtgttgaggcaaggactcacagtgttaacatggtcgtctttaacactggaaagcttctttcaagaagtcgaattagttttggatatgttcaatcaacttttaaagaagatcagtgacttgtgtgaaatgcatattgatacagttctgaaggagatagccaaaactgtgttgatttctctgcctgaaagtggtgctaccaaagtagaagatatgttgaccctcaatgagacatacacaaaagaatgggctgacattctaaaccacaaaagtaagcatgtggaagaagctgtcagagaacttatatcaatatttgagcagatttatgaagtgaaatacactgggaaagtaggaaaacagtcagaacagcggaaacacgttgtttttggaagtgaaacaggagagggtgaaaacaatgactatgaagctaatattgtgaatgagtttgatactcatgataaagaagatgaatttaaaaaggagtgtaaagaggtctttgcttttttctctcatcaattactagacagtcttcaaaaagctacacggttatctctggacacaatgaaaagaagaatatttgttgcaagcctttatgggcgaaagcagtcagaagatattatttcctttataaaaagtgaagtacatcttgcaattcctaatgtggtgatgattcctagtttggatgacattcaacaagccattaaccgtatgatccagttaaccctggaggtcagcagaggagtggctcactgggggcaacagcaaatccgtcccatcaagtctgtcattcccagccccaccactactgacgtgacccatcaaaacacaggaaaactgctgaagaaggaagaaagatcttttgaagaagctattcctgcgaggaagctgaagaatttttacccgggggtagcggagcacaaggatatttctaagttggtcctgctcctttcttcctctgtaaattccctaagaaaggcagctcatgaggccctgcaggactttcagaagtacaagactctctggacagaggaccgcgatgtgaaagtgaaggaatttttggctaacaacccctctctgactgaaatcagatcagaaattctacactatgctacttttgaacaggagattgatgagttgaagcctattattgttgtaggagcacttgaattacatacagagccgatgaaattggccttatccatcgaggccaaggcatggaagatgttactctgtcgatatctgaatgaagaatacaaaaagaaaatgtcatacatgatagcatttattaatgaatacttgaaaaagttatctagacctattcgtgatttagatgatgtcagatttgcaatggaagccttgtcttgcatacgtgataatgaaattcaaatggacatgactttgggaccaattgaagaagcctatgctattttaaacagatttgaagttgaagtaaccaaagaagaatcagaagcagttgataccttaagatattctttcaacaaattgcagagcaaagctgtttcagtacaagaggacctagttcaagtgcagccaaagtttaaaagcaatctacttgagtctgtggaagtttttcgtgaggacgtgataaactttgcagaagcatatgaattggaaggacctatggttccaaatataccaccccaagaagctagcaacaggctacagatatttcaggccagtttcgatgatctgtggaggaaatttgttacgtattcatctggtgaacaactttttggattgcctgtgactgattatgaggttttacacaaaaccagaaaagaactcaacttgctgcagaagctgtatggattgtatgacaccgtaatgagcagtattagtggttattatgaaatactttggggagatgtagatattgaaaaaattaatgcagaactgctggaatttcaaaacagatgtcgtaaacttccaaaaggacttaaagattggcaagcttttttggatctcaaaaagagaattgatgatttcagtgagtcatgtcctctactggaaatgatgaccaataaggccatgaaacagagacactgggatagaatctccgagttaactggaaccccatttgatgtggaatctgattctttttgccttagaaatatcatggaagcaccactccttaaacataaggatgatattgaggatatttgcatatctgccattaaggagaaggatatcgaagccaagctgactcaggtgattgagaattggaccaaccaaaatctgagttttgcagcatttaagggaaaaggagagctcctgctcaaaggaaccgaatcgggagaaattatcactttgatggaggatagtttaatggtcttagggtctttactcagcaacagatacaatgctccatttaaaaaaaatatccagaattgggtgtataaattgtccacttcctcagatataattgaagagtggctcgtagtacagaacctttgggtttatcttgaagccgtctttgtaggtggagatattgccaaacagctgcctcaggaagcaaaacgttttcagaatattgacaagtcttggataaaaataatgcagcgagctcatgagaatcccaatgtgattaattgctgtgttggagatgaaaccatgggacaacttttacctcatttacatgagcagttggaagtatgtcagaagtcactcacagggtatttggagaagaaacgattactgtttccaagattcttctttgtatctgatccagttctcctggaaattcttggacaagccagtgattcccacaccatacagccgcatctccctgcagtatctgacaacatcaatgaggtgacatttcatgcaaaagactatgatcgcatcatggccgtcatatcaagagaaggagaaaaaattgttttggataattctgttatggccaaaggtcctgtggagatttggctactggatttgttaaaaatgcagatgtcatcattacataatataattagatccgctttctatcaaatcagtgattcaggatttcaactcttaccattcctcagccactttccagcacaggttggacttctgggaattcagatgttgtggacacacgattcagaagaggctttacgtaatgcaaaagatgacaggaaaatcatgcaagtgaccaatcagaaatttttggatattctaaatactctcattagtcagacaacacatgatctaagcaagtttgatagagtgaagttcgagactctaattaccatccatgtgcatcagagagatatttttgatgacttggtaaaaatgcatatcaaatcacctactgactttgaatggctaaaacagagtagattttattttaaggaagatttggatcaaactgtggtgtctattacagatgttgattttatttaccaaaatgaatttctgggatgtactgatcgtcttgttatcactccattaacagatagatgctatatcacgttagctcaggccttgggcatgaacatgggaggtgctcccgcaggacctgctggcactggcaaaacagaaaccacaaaagacatgggaaggtgtttgggaaaatatgtggtcgtgttcaattgctcagatcaaatggatttcagaggcctaggaaggattttcaaaggtcttgcacagtcgggttcctggggctgttttgatgagtttaacagaattgaattgcctgtattatcagtggcagcacaacaaatttatattgttttgacagcaagaaaagaaagaaagaaacagttcattttttctgatggtgattgtgttgatttaaatccagaatttggaatcttcttaacgatgaaccctggatatgctgggcgccaggaactaccagaaaacctaaaaatccagtttagaactgttgctatgatggttcctgatagacaggttcattatgactttggattgagaaatattctgtctgtattgaggactcttggatctcaaaaaagagccagaccagaagatagtgaattaagcattgtcatgagaggactaagagatatgaacctttccaaactggttgatgaagatgaacccctgttcctcagcttaatcaatgacctgttcccaggactgcaactggatagtaatacttatgcagaactgcaaaacgcagtagcccatcaggttcagatagagggtttgattaaccatccaccctggaacctgaaactcgtgcagttatatgagacgtctttggtacggcatggcttgatgactcttgggcccagtggttctggaaagacaaccgttatcacgattctaatgaaggcgcaaacagaatgcggaaggcctcatagagaaatgcgaatgaatccaaaagccattactgcacctcagatgtttggcagactggacactgctaccaatgactggacagatgggattttttctactctgtggagaaaaacattaaaagctaaaaaaggtgaaaacattttcctcattttagatggtcctgtggatgccatctggattgagaacttaaattccgttttggatgacaataaaactctgacgttagctaatggagatcgcattcccatggcccctagttgtaagcttctgtttgaagtccacaatatcgagaacgcctctcctgccacggtttctaggatgggcatggtctatatcagcagctctgctctcagctggaggccaatcttacaggcatggttgaagaaacgcactgcacaggaagctgctgtattcctgacactgtatgagaaagtctttgaagatacatacacatatatgaagctaaatctcaatcccaaaatgcagctcttggagtgcaactatattgtgcaatctctcaatcttctggaagggttaattccctccaaagaagaaggcggtgtttcctgtgtcgaacatcttcataaattatttgtgtttggcctaatgtggagtttaggagcccttctggaattagaaagcagagaaaagcttgaagccttcttacggcagcatgaaagcaagttggacttaccagaaatacctaaaggctcaaatcaaaccatgtatgagttttatgttactgattatggtgattgggagcactggaataagaaacttcagccttattattatccaactgacagtattccggaatattcatcaattttggttccaaatgttgacaatattagaacaaattttttgatagacaccattgcaaaacaacataaagctgttttgctcacaggagagcagggaactgcaaaaactgtcatggttaaggcctatttgaaaaaatatgatcctgaagtacagctatccaaaagtctaaacttttcatctgccacagaaccaatgatgtttcagagaacaattgaaagctacgtggataagcgaattggaagcacatatgggccaccaggagggagaaaaatgactgtatttattgatgatattaatatgcctgtgattaatgagtggggagatcagataactaatgagattgtgcgacagatgatggaaatggaaggaatgtacagcttggacaagcctggagacttcactactattgttgatgtgcagctcatagcagcaatgatccaccctggaggtggtcgaaatgatattccacaacgtttaaaaagacaatttactgtgtttaattgtacattgccttcaaatgcttcaatagacaaaatttttggaattattggatgtggatactttgatccttgtagaagtttcaagcctcaaatatgtgagatgattgtgaatttagtctcagtgggtagagtgctgtggcaatggactaaggtgaagatgctgccaactccttctaaatttcattacatcttcaatcttcgagatctttccagaatttggcaaggaatgttgaccataaaagctgaggagtgcgcttcaatccctactctcctgtcccttttcaaacacgagtgcagcagagtaattgcagacagatttataactcctgaagatgagcagtggtttaatgcacatcttactcgtgcagttgaagaaaatattggctctgatgcagcgtcgtgtattcttcctgaaccatactttgtggattttcttcgtgagatgccagaaccaactggtgatgaacctgaagactctgtgtttgaagtacccaaaatatatgaattgatgccatcctttgactttctggctgaaaaactccagttttaccagagacagttcaatgaaatcattagaggaacatctcttgatctggtgttttttaaagatgcaatgactcatcttattaagatttcacgaataattcgaacgtcgtgtggaaatgcattgctggtgggtgttggtggttccggaaaacaaagtctttcaagattggcctcttttattgctggctatcaaatattccagataacattaaccaggtcttacaatgtgactaatctaacagatgatttaaaagctttgtacaaagttgctggtgctgatggaaaaggcatcactttcatctttactgacagtgaaataaaagatgaggcatttctagaataccttaacaacttgctatcttcaggggagatctccaacttgtttgcacgagatgagatggatgaaatcacccaaggtctgatttcagtgatgaagagggagctacctcgccatcctcctacctttgataatttgtatgaatacttcatttcaagatcaaggaagaacttacatgttgttctctgcttttctccagttggtgagaagttccgtgcccgttctttgaaatttcctggcttgatatcaggttgcactatggactggttcagccgctggccaagggaggctctgattgctgtggcctcctacttcctttcagactataatattgtctgctctagtgaaattaaaagacaagttgtagaaacaatgggcctgtttcatgacatggtttcagagagctgtgaaagttatttccaaagataccgccgaagagcacatgtgactcccaaatcttacctctcatttataaatggttataaaaacatttatgctgaaaaggtgaagttcattaatgaacaggctgaacgtatgaatattggtcttgataaactaatggaggcaagtgaatctgttgctaaactctctcaggatcttgcagtcaaggagaaggagttggcagtggcttccataaaagcagacgaagtattagcagaagtcacagtaagcgctcaggcttcagccaaaattaaaaatgaagtacaggaggtaaaggacaaagcccaaaaaattgtggatgaaattgatagtgaaaaagtgaaagctgaaagcaagcttgaggcagctaaacctgcactggaagaagcagaagcagccctgaatactatcaagccaaatgatattgccacagtcaggaaacttgcaaaaccaccacatcttattatgagaatcatggactgtgttctgttactatttcaaaagaaaattgaccctgttactatggatccagaaaaatcttgctgtaagccatcatggggagagtcattaaagttgatgagtgcaacaggattcctgtggagccttcagcagttccctaaggacactataaatgaagagactgttgagttactacagccatattttaatatggatgattatacttttgaaagtgccaaaaaagtctgtgggaatgtggctggtctcctgtcttggacacttgctatggcaatattttatggcatcaatagagaagtgttgcctctgaaggccaacctggccaagcaggaaggccggttagcagttgctaatgctgagttagggaaggcacaagccctgctggatgagaagcaagctgagctggataaagtacaggcaaaatttgatgcagcaatgaatgagaaaatggatttgcttaatgacgctgatacgtgccggaaaaagatgcaggccgcctccactctcatcgatgggctgagtggagaaaaaatccggtggacccagcaaagtaaagaattcaaagctcagattaatagacttgtaggtgatattctgctgtgcacgggattcctttcctaccttggtcctttcaatcagatatttaggaactatttgcttaaagatcaatgggaaatggagttgagagcacggaaaattcctttcacagaaaacctgaatcttatttcaatgttggtggatcctccaactattggtgagtgggggctacagggattaccaggagatgatctctcaattcagaatggcattattgtgacaaaggccaccagatacccactcctcatagacccacaaactcaaggcaaaacttggattaaatcaaaggaaaaagaaaatgatttacaggtgacatctctgaaccataaatattttcgcacacacttggaggacagcctttccttgggccgaccccttctcattgaggacattcatgaagagctggatccagccttggataatgtattagaaaagaattttattaaatctggcaccactttcaaggtgaaagtcggtgataaggaatgtgatatcatggatacatttaaactttacattactacgaagttaccaaatcctgcctttaccccagagattaatgctaaaacgtcagtcattgatttcactgttacaatgaaaggacttgagaatcagttactaaggagagtcattctaacagagaaacaggagttagaggctgagagggttaaacttttggaggatgttacttttaataagcggaagatgaaagaacttgaagataacctcctctataaattaagtgctacaaaaggctcattggtagatgacgaatctctcattggtgtacttcgaactaccaagcagacagcagctgaggtaagtgaaaagttgcatgtggctgcagaaactgagatcaagatcaacgcggctcaggaggagttccggcccgcagccacccgcggaagcatcctctacttcctcatcacagagatgagcatggtcaacatcatgtatcagacgtcattggcccagttcttgaagttatttgaccagtccatggccagatctgaaaagtcaccactacctcaaaagagaattacaaatattatcgagtacctgacatatgaagtttttacatactctgtcagaggcctatacgaaaaccacaaattcctgtttgtactcctcatgaccttaaagattgaccttcagagagggacagttaagcacagagagtttcaagctctcattaaagggggagcagctctggacctgaaagcctgtcctcccaaaccctatcgctggatccttgacatgacttggctgaatcttgtggagctgagtaaacttccacaatttgcagaaattatgaaccagatatctcgtaatgagaaggggtggaaaagctggtttgataaagatgctccagaggaggaaattatccctgatggatataatgattcactagatacctgccataaacttttacttatcaggtcttggtgcccagaccgtactgtttttcaagcaagaaagtatattgcagattctttggaggagaagtacacagaaccagttatcttaaatctggagaaaacttgggaagaaagtgatacccggacacctctgatatgcttcctgtccatgggatctgaccccaccaatcaaattgatgcattggccaagaaactgaaactggaatgtagaactatctcaatggggcaaggacaagaagtacatgctcgaaagctgattcagatgtcaatgcagcagggtggttgggtattactacaaaattgccaccttggcctggaattcatggaagaattactagagacgctaattaccactgaagccagtgatgattctttccgagtatggataactacggagccccatgatcgatttccaattacattgcttcagacctctctcaaattcactaatgagccaccccaaggtgtacgcgcaggtttgaaaagaacatttgctggaattaatcaagaccttctggacatcagtaatttacccatgtggaagccgatgctttacacagtagcatttttacactccactgtgcaggagcgacgaaaatttggccccttaggatggaatattccctacgaattcaattctgctgacttttcagccagtgttcagtttattcagaatcaccttgatgaatgcgatattaagaaaggtgtatcatggaatacggttcggtacatgatcggagaagtacaatatggaggcagagtgacagatgactttgacaaacgtctacttaattgctttgccagagtctggttcagtgagaagatgtttgaaccgtcattctgcttttatactggatataaaatccccttatgcaaaaccttagaccagtattttgaatacatccagtcactgccatccctagataaccctgaagtctttgggcttcaccctaatgctgatatcacgtatcagagtaacactgcttctgctgttcttgaaacaattaccaacattcaacccaaagagagtggaggtggtgtgggagagacccgggaggctattgtttatagattatctgaagatatgctgagtaaactccctcctgattacattcctcatgaggtgaaatctcgtttgataaagatgggccatcttaattcaatgaacatatttcttagacaagaaattgacagaatgcaaagagtcatttcaatactccgcagtagcctgagtgatctaaaattggccattgaaggaacaatcattatgagtgagaatctgagagatgctctggacaacatgtatgatgctcgtatacctcagctctggaaaagagtgtcttgggattcgtccacactgggcttctggttcactgaacttttggaaagaaatgctcagttttctacgtggatatttgaagggaggcctaatgtgttttggatgactggtttctttaatccccaaggcttcctcacagcaatgaggcaagaagtgacccgtgcccacaaaggctgggcactggacactgtgaccatccacaatgaagttctgagacagaccaaggaggagatcacgtcaccccctggggaaggtgtgtatatttatgggctctacatggatggagcagcctgggacagacggaatgggaagctcatggaatccacccccaaggtactcttcacgcagttacccgtgctccacatctttgccattaactccacggcacccaaggaccccaagctgtatgtgtgtcctatttacaagaaacccaggcgaactgatttgaccttcatcactgtggtatatttacgaacagtgttgtccccggatcactggatcctgagaggagtggcccttttgtgtgacatcaagtaa

SEQ ID NO: 9004 - DNA, 13049 bp, Homo sapiens
  source 1..13049: mol_type = unassigned DNA
cccggggcagcgcaaccgctggggccggcctcagtgggctgagtggtcggggcatcggggcccagagagcggctggtttcgaagtataaagcattccgcacgacgggggatggagaaggatgctgaagatggcgccccttctgagggagcagaggctcctccctctacggaagaggctgcccctccccgttcagaagaggaagaggccccgcgccctccgacagtggaggccccggcagaagatggtttctctccttccgcagaagatgctgtttcttctgtggtggattatcgggatctcattccttctgaagaagggatagttcttccagatgatcatgaagcggatctgaatagagttcgacagaggcttgcaccgcgaccggttcagtcagtgatttcggaagtgctgtccttgccgtcttcccggaggtcctccagataccgccggagtatgagtggccttcccaatctacaggaaacattaaaagagagacaggcaagatttagagaggcaagggaaagccgaagactgaaaattgacccttcatacaaatatatatttgaaattctagcagaaaatcttggcctggacatagtaactgttgaagaattaattttggattgcccatctctggaagcatttactaatttttttgcgaaagatggttgtaagacactgaaatttttgtaccaagaaggagatgtacctggtattgaatgtggtcgaactattgctggagcaactaaaggggcaaaaatgatgaaattgtatatagacaatgcagccccggataaactaaaaggactgtgcatattttttgttcgttgccgtaatgatgttgctataaatgttaaaactattcaagaggaagcgctctttactgttctggatgcgtcgaaaggactcttaaatggaattagggatatgttggcaaatatatttctaccagctgttcttgcaacaaacaactggggtgctttaaaccagtccaagcagggagaatctgaaaaacatattttcactgaaaccatcaacagatatctttcatttttagatggtgctagaataagtattgagggaacagtgaagttaaagacaatagacaatgttaatttttccaaactgcacacctttgaagaagtaactgctgcagccagcaactcagaaactgttcatcagctggaggaagtgctgatggtatggtacaaacagatcgaacaggtacttattgagagtgagcagatgagaaaagaagctggtgattcaggtccactcactgaattggaacactggaaacgcatgtcagccaagttcaactatatcattgagcagattaaagggccaagttgtaaggctgtcataaatgtgctaaatgttgcacactccaaactgctaaagaattggcgtgatttggatgcaagaatcactgatacagcaaatgaatccaaagataatgtcagatatttgtatactttggaaaaagtgtgtcaacctctctataaccatgacctagtttccatggcacatggaatacaaaatttgattaatgccatcagaatgattcacggtgtgtcaaggtattataatacctcagagagaatgacctcattgtttatcaaggtaacaaatcaaatggtaacagcatgtaaagcatatattactgatggaggattaaaccatgtatgggatcaggaaacgccagttgtactaaagaaaattcaggactgcatttttctattcaaggaatatcaggcatcttttcataaaacaaggaaactgatttcagaatcctcaggggaaaaatcttttgaggtttcagaaatgtatatatttggaaaatttgaagctttttgcaaaagactggagaagattacagaaatgataactgttgtgcaaacatattcaaccttgagtaattctaccatagaaggaatagatattatggcaataaaattcagaaatatataccaaggggttaagaaaaagcaatatgacattctggatccaagaaggacagaatttgacacagatttcttagatttcatgacaaaaatcaatggtttagaggtacaaatacaggcatttatgaacagtagttttgggaaaatcttatcttctcagcaggctcttcagctacttcaaaggtttcagaagctgaacattccctgtctgggattagaaataaaccacacaatagagcgtattcttcagtactatgtggctgaacttgatgctactaagaagctttatcattctcagaaagatgacccccctcttgctcgcaacatgccccctatagcaggaaaaatactctgggtgaggcagctctatcgccggataagtgagcccatcaattatttctttaaaaactcagacattttatcaagtccggacggtaaagctgtcatccgtcagtataacaagatctcctatgtgctggtggaattcgaggtggtctatcacacagcctggatcagagagatttcacagttgcattacgctttacaagccacgctttttgtgcgacatccagaaacagggaagttgctggttaatttcgatcccaaaattttggaagttgttcgggaaactaagtgtatgataaaaatgaagttggatgtaccagaacaggcaaagagattgctaaaattggaaagtaaattgaaagcagacaaactgtatttgcagggtcttctgcaatattatgatgagttatgtcaggaagtgccttctgtgtttgtcaatctgatgaccccaaaaatgaaaaaggtggaatctgtgttgaggcaaggactcacagtgttaacatggtcgtctttaacactggaaagcttctttcaagaagtcgaattagttttggatatgttcaatcaacttttaaagaagatcagtgacttgtgtgaaatgcatattgatacagttctgaaggagatagccaaaactgtgttgatttctctgcctgaaagtggtgctaccaaagtagaagatatgttgaccctcaatgagacatacacaaaagaatgggctgacattctaaaccacaaaagtaagcatgtggaagaagctgtcagagaacttatatcaatatttgagcagatttatgaagtgaaatacactgggaaagtaggaaaacagtcagaacagcggaaacacgttgtttttggaagtgaaacaggagagggtgaaaacaatgactatgaagctaatattgtgaatgagtttgatactcatgataaagaagatgaatttaaaaaggagtgtaaagaggtctttgcttttttctctcatcaattactagacagtcttcaaaaagctacacggttatctctggacacaatgaaaagaagaatatttgttgcaagcctttatgggcgaaagcagtcagaagatattatttcctttataaaaagtgaagtacatcttgcaattcctaatgtggtgatgattcctagtttggatgacattcaacaagccattaaccgtatgatccagttaaccctggaggtcagcagaggagtggctcactgggggcaacagcaaatccgtcccatcaagtctgtcattcccagccccaccactactgacgtgacccatcaaaacacaggaaaactgctgaagaaggaagaaagatcttttgaagaagctattcctgcgaggaagctgaagaatttttacccgggggtagcggagcacaaggatatttctaagttggtcctgctcctttcttcctctgtaaattccctaagaaaggcagctcatgaggccctgcaggactttcagaagtacaagactctctggacagaggaccgcgatgtgaaagtgaaggaatttttggctaacaacccctctctgactgaaatcagatcagaaattctacactatgctacttttgaacaggagattgatgagttgaagcctattattgttgtaggagcacttgaattacatacagagccgatgaaattggccttatccatcgaggccaaggcatggaagatgttactctgtcgatatctgaatgaagaatacaaaaagaaaatgtcatacatgatagcatttattaatgaatacttgaaaaagttatctagacctattcgtgatttagatgatgtcagatttgcaatggaagccttgtcttgcatacgtgataatgaaattcaaatggacatgactttgggaccaattgaagaagcctatgctattttaaacagatttgaagttgaagtaaccaaagaagaatcagaagcagttgataccttaagatattctttcaacaaattgcagagcaaagctgtttcagtacaagaggacctagttcaagtgcagccaaagtttaaaagcaatctacttgagtctgtggaagtttttcgtgaggacgtgataaactttgcagaagcatatgaattggaaggacctatggttccaaatataccaccccaagaagctagcaacaggctacagatatttcaggccagtttcgatgatctgtggaggaaatttgttacgtattcatctggtgaacaactttttggattgcctgtgactgattatgaggttttacacaaaaccagaaaagaactcaacttgctgcagaagctgtatggattgtatgacaccgtaatgagcagtattagtggttattatgaaatactttggggagatgtagatattgaaaaaattaatgcagaactgctggaatttcaaaacagatgtcgtaaacttccaaaaggacttaaagattggcaagcttttttggatctcaaaaagagaattgatgatttcagtgagtcatgtcctctactggaaatgatgaccaataaggccatgaaacagagacactgggatagaatctccgagttaactggaaccccatttgatgtggaatctgattctttttgccttagaaatatcatggaagcaccactccttaaacataaggatgatattgaggatatttgcatatctgccattaaggagaaggatatcgaagccaagctgactcaggtgattgagaattggaccaaccaaaatctgagttttgcagcatttaagggaaaaggagagctcctgctcaaaggaaccgaatcgggagaaattatcactttgatggaggatagtttaatggtcttagggtctttactcagcaacagatacaatgctccatttaaaaaaaatatccagaattgggtgtataaattgtccacttcctcagatataattgaagagtggctcgtagtacagaacctttgggtttatcttgaagccgtctttgtaggtggagatattgccaaacagctgcctcaggaagcaaaacgttttcagaatattgacaagtcttggataaaaataatgcagcgagctcatgagaatcccaatgtgattaattgctgtgttggagatgaaaccatgggacaacttttacctcatttacatgagcagttggaagtatgtcagaagtcactcacagggtatttggagaagaaacgattactgtttccaagattcttctttgtatctgatccagttctcctggaaattcttggacaagccagtgattcccacaccatacagccgcatctccctgcagtatctgacaacatcaatgaggtgacatttcatgcaaaagactatgatcgcatcatggccgtcatatcaagagaaggagaaaaaattgttttggataattctgttatggccaaaggtcctgtggagatttggctactggatttgttaaaaatgcagatgtcatcattacataatataattagatccgctttctatcaaatcagtgattcaggatttcaactcttaccattcctcagccactttccagcacaggttggacttctgggaattcagatgttgtggacacacgattcagaagaggctttacgtaatgcaaaagatgacaggaaaatcatgcaagtgaccaatcagaaatttttggatattctaaatactctcattagtcagacaacacatgatctaagcaagtttgatagagtgaagttcgagactctaattaccatccatgtgcatcagagagatatttttgatgacttggtaaaaatgcatatcaaatcacctactgactttgaatggctaaaacagagtagattttattttaaggaagatttggatcaaactgtggtgtctattacagatgttgattttatttaccaaaatgaatttctgggatgtactgatcgtcttgttatcactccattaacagatagatgctatatcacgttagctcaggccttgggcatgaacatgggaggtgctcccgcaggacctgctggcactggcaaaacagaaaccacaaaagacatgggaaggtgtttgggaaaatatgtggtcgtgttcaattgctcagatcaaatggatttcagaggcctaggaaggattttcaaaggtcttgcacagtcgggttcctggggctgttttgatgagtttaacagaattgaattgcctgtattatcagtggcagcacaacaaatttatattgttttgacagcaagaaaagaaagaaagaaacagttcattttttctgatggtgattgtgttgatttaaatccagaatttggaatcttcttaacgatgaaccctggatatgctgggcgccaggaactaccagaaaacctaaaaatccagtttagaactgttgctatgatggttcctgatagacagatcattatgagagttaaacttgcaagctgtggttttcttgaaaatgttatcttggctcaaaaattttacgttctttacaaactctgtgaagagcaacttactaaacaggttcattatgactttggattgagaaatattctgtctgtattgaggactcttggatctcaaaaaagagccagaccagaagatagtgaattaagcattgtcatgagaggactaagagatatgaacctttccaaactggttgatgaagatgaacccctgttcctcagcttaatcaatgacctgttcccaggactgcaactggatagtaatacttatgcagaactgcaaaacgcagtagcccatcaggttcagatagagggtttgattaaccatccaccctggaacctgaaactcgtgcagttatatgagacgtctttggtacggcatggcttgatgactcttgggcccagtggttctggaaagacaaccgttatcacgattctaatgaaggcgcaaacagaatgcggaaggcctcatagagaaatgcgaatgaatccaaaagccattactgcacctcagatgtttggcagactggacactgctaccaatgactggacagatgggattttttctactctgtggagaaaaacattaaaagctaaaaaaggtgaaaacattttcctcattttagatggtcctgtggatgccatctggattgagaacttaaattccgttttggatgacaataaaactctgacgttagctaatggagatcgcattcccatggcccctagttgtaagcttctgtttgaagtccacaatatcgagaacgcctctcctgccacggtttctaggatgggcatggtctatatcagcagctctgctctcagctggaggccaatcttacaggcatggttgaagaaacgcactgcacaggaagctgctgtattcctgacactgtatgagaaagtctttgaagatacatacacatatatgaagctaaatctcaatcccaaaatgcagctcttggagtgcaactatattgtgcaatctctcaatcttctggaagggttaattccctccaaagaagaaggcggtgtttcctgtgtcgaacatcttcataaattatttgtgtttggcctaatgtggagtttaggagcccttctggaattagaaagcagagaaaagcttgaagccttcttacggcagcatgaaagcaagttggacttaccagaaatacctaaaggctcaaatcaaaccatgtatgagttttatgttactgattatggtgattgggagcactggaataagaaacttcagccttattattatccaactgacagtattccggaatattcatcaattttggttccaaatgttgacaatattagaacaaattttttgatagacaccattgcaaaacaacataaagctgttttgctcacaggagagcagggaactgcaaaaactgtcatggttaaggcctatttgaaaaaatatgatcctgaagtacagctatccaaaagtctaaacttttcatctgccacagaaccaatgatgtttcagagaacaattgaaagctacgtggataagcgaattggaagcacatatgggccaccaggagggagaaaaatgactgtatttattgatgatattaatatgcctgtgattaatgagtggggagatcagataactaatgagattgtgcgacagatgatggaaatggaaggaatgtacagcttggacaagcctggagacttcactactattgttgatgtgcagctcatagcagcaatgatccaccctggaggtggtcgaaatgatattccacaacgtttaaaaagacaatttactgtgtttaattgtacattgccttcaaatgcttcaatagacaaaatttttggaattattggatgtggatactttgatccttgtagaagtttcaagcctcaaatatgtgagatgattgtgaatttagtctcagtgggtagagtgctgtggcaatggactaaggtgaagatgctgccaactccttctaaatttcattacatcttcaatcttcgagatctttccagaatttggcaaggaatgttgaccataaaagctgaggagtgcgcttcaatccctactctcctgtcccttttcaaacacgagtgcagcagagtaattgcagacagatttataactcctgaagatgagcagtggtttaatgcacatcttactcgtgcagttgaagaaaatattggctctgatgcagcgtcgtgtattcttcctgaaccatactttgtggattttcttcgtgagatgccagaaccaactggtgatgaacctgaagactctgtgtttgaagtacccaaaatatatgaattgatgccatcctttgactttctggctgaaaaactccagttttaccagagacagttcaatgaaatcattagaggaacatctcttgatctggtgttttttaaagatgcaatgactcatcttattaagatttcacgaataattcgaacgtcgtgtggaaatgcattgctggtgggtgttggtggttccggaaaacaaagtctttcaagattggcctcttttattgctggctatcaaatattccagataacattaaccaggtcttacaatgtgactaatctaacagatgatttaaaagctttgtacaaagttgctggtgctgatggaaaaggcatcactttcatctttactgacagtgaaataaaagatgaggcatttctagaataccttaacaacttgctatcttcaggggagatctccaacttgtttgcacgagatgagatggatgaaatcacccaaggtctgatttcagtgatgaagagggagctacctcgccatcctcctacctttgataatttgtatgaatacttcatttcaagatcaaggaagaacttacatgttgttctctgcttttctccagttggtgagaagttccgtgcccgttctttgaaatttcctggcttgatatcaggttgcactatggactggttcagccgctggccaagggaggctctgattgctgtggcctcctacttcctttcagactataatattgtctgctctagtgaaattaaaagacaagttgtagaaacaatgggcctgtttcatgacatggtttcagagagctgtgaaagttatttccaaagataccgccgaagagcacatgtgactcccaaatcttacctctcatttataaatggttataaaaacatttatgctgaaaaggtgaagttcattaatgaacaggctgaacgtatgaatattggtcttgataaactaatggaggcaagtgaatctgttgctaaactctctcaggatcttgcagtcaaggagaaggagttggcagtggcttccataaaagcagacgaagtattagcagaagtcacagtaagcgctcaggcttcagccaaaattaaaaatgaagtacaggaggtaaaggacaaagcccaaaaaattgtggatgaaattgatagtgaaaaagtgaaagctgaaagcaagcttgaggcagctaaacctgcactggaagaagcagaagcagccctgaatactatcaagccaaatgatattgccacagtcaggaaacttgcaaaaccaccacatcttattatgagaatcatggactgtgttctgttactatttcaaaagaaaattgaccctgttactatggatccagaaaaatcttgctgtaagccatcatggggagagtcattaaagttgatgagtgcaacaggattcctgtggagccttcagcagttccctaaggacactataaatgaagagactgttgagttactacagccatattttaatatggatgattatacttttgaaagtgccaaaaaagtctgtgggaatgtggctggtctcctgtcttggacacttgctatggcaatattttatggcatcaatagagaagtgttgcctctgaaggccaacctggccaagcaggaaggccggttagcagttgctaatgctgagttagggaaggcacaagccctgctggatgagaagcaagctgagctggataaagtacaggcaaaatttgatgcagcaatgaatgagaaaatggatttgcttaatgacgctgatacgtgccggaaaaagatgcaggccgcctccactctcatcgatgggctgagtggagaaaaaatccggtggacccagcaaagtaaagaattcaaagctcagattaatagacttgtaggtgatattctgctgtgcacgggattcctttcctaccttggtcctttcaatcagatatttaggaactatttgcttaaagatcaatgggaaatggagttgagagcacggaaaattcctttcacagaaaacctgaatcttatttcaatgttggtggatcctccaactattggtgagtgggggctacagggattaccaggagatgatctctcaattcagaatggcattattgtgacaaaggccaccagatacccactcctcatagacccacaaactcaaggcaaaacttggattaaatcaaaggaaaaagaaaatgatttacaggtgacatctctgaaccataaatattttcgcacacacttggaggacagcctttccttgggccgaccccttctcattgaggacattcatgaagagctggatccagccttggataatgtattagaaaagaattttattaaatctggcaccactttcaaggtgaaagtcggtgataaggaatgtgatatcatggatacatttaaactttacattactacgaagttaccaaatcctgcctttaccccagagattaatgctaaaacgtcagtcattgatttcactgttacaatgaaaggacttgagaatcagttactaaggagagtcattctaacagagaaacaggagttagaggctgagagggttaaacttttggaggatgttacttttaataagcggaagatgaaagaacttgaagataacctcctctataaattaagtgctacaaaaggctcattggtagatgacgaatctctcattggtgtacttcgaactaccaagcagacagcagctgaggtaagtgaaaagttgcatgtggctgcagaaactgagatcaagatcaacgcggctcaggaggagttccggcccgcagccacccgcggaagcatcctctacttcctcatcacagagatgagcatggtcaacatcatgtatcagacgtcattggcccagttcttgaagttatttgaccagtccatggccagatctgaaaagtcaccactacctcaaaagagaattacaaatattatcgagtacctgacatatgaagtttttacatactctgtcagaggcctatacgaaaaccacaaattcctgtttgtactcctcatgaccttaaagattgaccttcagagagggacagttaagcacagagagtttcaagctctcattaaagggggagcagctctggacctgaaagcctgtcctcccaaaccctatcgctggatccttgacatgacttggctgaatcttgtggagctgagtaaacttccacaatttgcagaaattatgaaccagatatctcgtaatgagaaggggtggaaaagctggtttgataaagatgctccagaggaggaaattatccctgatggatataatgattcactagatacctgccataaacttttacttatcaggtcttggtgcccagaccgtactgtttttcaagcaagaaagtatattgcagattctttggaggagaagtacacagaaccagttatcttaaatctggagaaaacttgggaagaaagtgatacccggacacctctgatatgcttcctgtccatgggatctgaccccaccaatcaaattgatgcattggccaagaaactgaaactggaatgtagaactatctcaatggggcaaggacaagaagtacatgctcgaaagctgattcagatgtcaatgcagcaggtatgtgacaagagactgctcctgctgcaacattattgctagaaaccccacaatcatggatgttaccacattcttctcgtgatgctcaatcctggtttttccatttttgtttatcattacctgtgaattttaaacctcagtctagtttcctcctgatattcgcatggaaagcttattccattttctatagtatatgctccattttaccttcaccaattttttgttcgttttatgatttgggagacacaccttctgatttctaagaatgcatctctagcagtcttggaatttcatgatcaatatgaataggtagtacttaaggagtgacagattgagacagttaaatttccattttcagttaaaggcagactttcatttttcattaacggatcatttcaggcaaagaaggaatatt

SEQ ID NO: 9005 - DNA, 14170 bp, Homo sapiens
  source 1..14170: mol_type = unassigned DNA
agcagaggagtgagtcctggccgcgtccccgtcgctagggaaaccgatgcagctggaggccgcgcgcgatgcggctcgcggaggagcgggccgcgctcgcggcggagaacgcggatggggaacccggcgccgaccgacgactgcgactcctggggacctacgtggccatgagcctgcggccggctgcgggcgcctgggagcgttgcgcggggagtgctgaggcggagcagctgctccaggccttcctgggccgcgatgctgccgaggggccgcggccgctgctggtggtgcggcccgggcccaggggcctggcaatacgccccgggctggaggtgggacctgagtcgggcctggctggcgctaaggcgctttttttccttcgcaccgggcccgagcctccagggcccgacagcttccgcggcgcagtggtctgcggggacctgcccgcggcacctctggagcacctagccgcgctgttctcggaggttgttctacccgtcctggccaatgagaagaatcgcctaaactggccccacatgatatgtgaggatgtcaggcggcacgcccacagcctccaatgtgacctctcagttatacttgagcaagtgaagggaaaaactttgctgcctcttccagcaggctcagaaaaaatggagtttgcggattccaaaagtgagacagtcttggattctatagataagtcagtcatctatgccattgagtctgcagtgatcaaatggagctaccaagtccaggtggtactcaagagagagtcttcccagccactcttacaaggggagaatcccacccctaaggtggagttggagttctggaagagcaggtatgaagatctgaaatacatctataatcaactgagaacaataacggtgaggggcatggccaagctcctggacaagcttcagagtagctactttccagctttcaaagccatgtacagagatgttgttgcagctctagcagaggcacaggacatccatgtgcacctgataccgctccagcgccacctggaagctctggagaatgcagaatttccggaggtgaagccccagctgcggcccctgctccacgtggtctgtctgatttgggccacatgcaagtcctaccgctccccgggaaggctgactgtgctgctccaggagatttgcaaccttctcatccagcaggcctctaattatctcagcccagaagacctgctgagaagtgaggtagaagaaagtcagagaaaactgcaagtggtctcagacactttgagcttcttcaagcaagagtttcaggacagaagggagaatctccacacttacttcaaagagaaccaggaagtcaaggaatgggatttccagtcttctttggtctttgtgcgattggatggcttcctgggacaactgcacgtggtggagggtcttctgaagacggccctggatttccacaaactgggaaaggtggagttcagcggcgtcagagggaatgctctgagtcagcaggtccagcaaatgcatgaagaatttcaagagatgtacaggcttctctcaggatcctcctccgactgcctgtacctccaaagcacggactttgaaaatgacgtctctgaatttaaccagaaagtagaagatcttgaccgaagattggggactatctttattcaagcttttgatgatgcacctggcttggagcatgcctttaagctgctagacatagcaggaaacctccttgaaagaccgctggtagcgagggatacatctgataaatacctggtcctcatccaaatgttcaacaaagatctggatgcagtgaggatgatctacagtcagcacgtccaggaggaagcagaacttgggttctccccggtgcacaagaacatgcccaccgtggctggcggcctccgctgggcacaggagctgaggcagcgcatccagggtcctttcagcaactttggacgcatcacacacccttgcatggaatctgcagaaggaaagcgaatgcaacaaaaatatgaagatatgctgtcattgctagaaaagtatgagacaagactttatgaggattggtgccggacagtatcagagaagtcacagtacaatctttcccaaccacttctaaaacgtgacccagagacgaaggagatcactatcaactttaacccacagctgatttcagtgctgaaagaaatgagctatcttgaacccagagagatgaaacacatgcctgagacagcagcagccatgttctcctccagggatttctatcggcagcttgtggctaatttagagttgatggcaaattggtacaacaaggttatgaaaactctgctggaggtggaatttccattagtggaggaagagctgcaaaatattgatctccgcctcagagcagcagaggagactttgaactggaaaacagaaggcatttgcgattatgtcactgaaatcaccagtagtattcatgatcttgaacaaagaattcagaaaactaaagacaatgtggaagagatccaaaacatcatgaaaacatgggtgactccaatatttaagacaaaagatggaaaaagggaatcccttctttctctggatgatcggcatgatcgaatggaaaaatattacaatctcatcaaggaatctggccttaagatccacgcccttgttcaggaaaacctgggtctattttcagcagacccaacctccaatatctggaagacttatgttaactctattgacaatttgttgctgaatggattctttcttgccattgagtgctccctcaagtatcttctggaaaatactgagtgtaaggcaggacttaccccaatatttgaagcacaactgagtctagccatcccagagctagttttctatccgtctctggagtctggagtgaaggggggtttctgtgacattgttgagggtctcatcaccagcatttttaggataccatctctggtgccacggctttccccacaaaatggctctcctcactatcaggtcgacctggacggtataccagatttggcaaacatgcggcgcacactcatggagagagtccagagaatgatgggcctctgctgtggctatcagagcaccttcagccagtattcgtacctctatgtggaggaccggaaggaggttctgggtcagtttctgctgtacgggcacatcctcactccggaagaaattgaagaccatgtggaagatggcatcccagagaaccctcccctcctttctcagtttaaagtgcaaatcgactcctatgaaacgctctatgaagaggtgtgcaggctggaacccatcaaggtgtttgacggctggatgaaaattgatattcgaccctttaaggcatctctgctgaatattattaagaggtggagcctcctgttcaaacagcatcttgtggaccacgtcactcacagcttggccaacctggatgcgtttataaagaagagtgagagcggcttactcaagaaagttgaaaaaggagatttccaaggcttggttgagatcatgggacaccttatggctgttaaagaacggcagagtaacactgatgagatgtttgagcccttaaagcagactattgaattgctgaagacctatgaacaagaattgccagaaacagtgtttaagcagctggaggagctgcctgagaaatggaacaacataaaaaaggtggccattactgtgaagcagcaggtggccccactgcaggcaaatgaagtgacactcctccgccagaggtgcacagccttcgatgcagaacagcagcaattctgggagcaattccacaaagaagccccgttcaggtttgatagcatccaccctcatcaaatgctggatgccaggcacatcgagatccagcagatggaatccactatggcctccatttctgagtctgccagcttatttgaagtcaatgtccctgactataagcagctgaggcagtgcaggaaggaggtctgccagctgaaggagctctgggacaccattggaatggtgacctccagcatccatgcctgggagaccacaccctggaggaatatcaacgtggaagccatggagttggagtgcaaacagtttgcccggcatatccgaaacctggacaaggaggtcagggcctgggatgcattcacaggcctggaaagcactgtgtggaacacgctgagctccctgagggcagtagctgagctgcagaatccagccatccgggagcggcactggaggcagctgatgcaggccaccggtgtgagcttcactatggaccaggacaccaccctagcgcacctgctgcagctccagctgcaccactatgaggatgaggtccggggcattgtggacaaagctgcaaaagagatgggtatggagaaaaccttaaaggagctgcagactacctgggctggcatggaattccagtatgagccccacccacggaccaatgtccccctcctgtgctctgatgaggacctcatagaggttctggaggataatcaagttcaacttcagaacctggtgatgtccaagtatgttgctttcttcttggaggaggtgtcgggctggcagaagaagctgtccacagtggacgctgtcatctctatctggtttgaagtgcagcgaacatggactcacctggaaagcatattcactggatctgaagatattcgggcacagctaccccaggattctaaaaggtttgaaggcatcgacattgactttaaagagctagcttatgatgcccagaaaattccaaatgtagtgcaaaccaccaacaagccaggcctgtatgaaaagctggaggatattcagggcagattgtgcctgtgtgagaaggccctggcagagtacctcgacaccaagaggcttgccttcccgcggttttactttctctcctcctccgatctgttagacatcctttccaacggcacagctccacaacaggttcaacgtcacctttccaaactctttgacaacatggccaagatgcgattccagctagatgccagtggggaaccaaccaagacaagcctcggcatgtacagcaaagaagaggagtatgtggctttcagtgagccctgtgactgcagcgggcaggtagaaatatggctgaaccatgtccttggtcacatgaaggccactgtgaggcatgagatgacagaaggtgtaactgcctatgaagaaaagccgagggagcagtggctttttgaccacccagctcaggtggccctgacctgtactcagatctggtggacaacagaagtgggcatggcatttgccaggctggaggaaggctatgagagtgccatgaaggactattataagaagcaagtggcccagctcaaaacccttatcaccatgctgattggccagctctccaagggagaccggcagaagattatgactatatgcaccatcgatgtgcatgcccgggatgtggtagccaagatgattgctcagaaggtagacaatgcccaggctttcctctggctgtctcagctgcgccatcgttgggatgacgaggtcaaacactgctttgccaacatctgtgatgcccagtttttgtattcctatgagtacctgggaaacacacctcgcttggtgatcacacctttgactgacaggtgctacatcaccctcacccagtccctgcacctgaccatgagtggggctcccgcaggacctgcaggcacaggcaagaccgagaccaccaaggacctgggccgcgcactgggcatcctggtctatgtgttcaactgctcggagcagatggattacaagtcttgtggcaacatctacaaaggccttgctcagactggtgcctggggctgctttgatgagtttaatcgaatctccgtggaggtcttgtcagtggtggcagtgcaggtaaaaagcattcaagatgcgattagagataagaagcagtggttcagcttccttggggaggagatcagcctgaatccttctgtcggtatcttcatcaccatgaacccaggctatgctggccgcacagagctgccagagaatctcaagtctctcttcaggccttgtgcaatggtggttccagactttgaattgatctgtgaaatcatgctggtggcagaaggattcattgaagcccagtcattagccagaaagttcatcactctttaccagttgtgcaaagagcttctctccaaacaggatcactacgactggggcctacgggccatcaagtccgtgctggtggtggcaggatccctgaagagaggagaccctgaccggcctgaggaccaggtcctgatgcgctccttgcgggatttcaacatccccaagattgtgactgatgacatgcccatcttcatgggcctgatcggggacctctttcccgccctggatgtcccccggaggagagaccccaacttcgaagctttggttaggaaggcgatagtggatctgaagctccaggctgaggacaactttgtgctcaaggtggtccagctggaggagctcctggctgtgcggcactctgtatttgtggtgggtggcgctggtaccggcaagtcacaggtgctgaggtccttgcacaagacctatcagatcatgaaacggcgccccgtctggactgacctcaatcccaaagcagtcacaaatgatgagctctttggcatcatcaatccagccacaggagaatggaaggatggattgttctcttccatcatgcgggagcttgccaacatcacccatgatgggcccaagtggattttactggatggcgacatagatccaatgtggattgaatccctgaatactgtcatggatgataacaaggtgctgacattggccagcaatgagaggattcctctgaaccccaccatgaagctcctctttgagatcagccacctgcgcacagccactccagcaactgtctctagagcagggatcttgtacatcaacccggcagacttgggatggaaccctccagtgagcagctggattgagaagagggaaatccagacagagagagccaacttaaccattttgttcgacaagtatcttccaacctgcctagacacactcagaaccaggtttaagaagatcattcccatcccagagcagagcatggttcagatggtgtgtcaccttctggaatgtctcctgaccacggaggacatccctgcagactgccctaaggaaatttatgagcattattttgtgtttgctgccatctgggctttcggcggagcaatggtccaagatcagcttgtggactaccgggcagagttcagcaaatggtggctgactgagttcaaaacagtcaagtttccttcccaaggaaccatctttgactattacatcgacccagagaccaagaaattcgagccttggtccaagctcgtcccccagttcgaatttgaccccgagatgcccttgcaggcgtgtttggtgcacacgagtgagaccatccgtgtgtgctacttcatggagcggttgatggcgcggcagcggcctgtcatgctggtgggcacggctggcactggcaagtcggtgctggtgggagctaagctggccagccttgaccccgaggcatacctggtgaaaaacgtgccattcaactactacaccacgtcagcaatgctgcaggctgtcctggagaagcctctggaaaagaaggctggcagaaactatggccctccagggaacaagaaactcatctatttcattgatgacatgaacatgcctgaggtggatgcctacgggacggtgcagccccacaccatcatccggcagcatctggactatggccactggtatgatcggagcaagctgtccctaaaggagatcacaaatgtacagtatgtttcctgtatgaaccccacggcaggcagcttcaccatcaacccccggcttcagcgtcacttcagcgtgtttgtcctctccttcccgggggcagatgccctgtcctctatctacagcatcatcctcactcagcatctgaagctcggaaacttcccggcgtccctgcagaaatccatccccccactgatcgatctggccctcgccttccaccagaaaattgctaccaccttcctacccacaggaatcaaattccactacatcttcaacctcagagattttgccaacattttccagggcattctcttctcctcagtggaatgtgtgaaatccacatgggatcttataaggctctatctgcatgaatcaaatcgagtttatcgggataagatggtagaagaaaaggactttgatctttttgataaaatccagacagaagtgctcaagaaaacttttgatgatattgaagaccctgtggagcagacccaaagcccgaacctgtattgtcactttgcaaatggtattggggagcccaaatacatgcctgtacagtcttgggaacttttgacccagactctggtggaggccttggagaaccacaatgaagtcaacacagtgatggacctagttctctttgaggatgccatgcgccatgtctgccatatcaatcgcatcttggagtccccgcggggaaatgctctgctggttggtgtaggtgggagcggcaagcagagcctgacaaggctggcagctttcatcagctccatggatgtcttccagatcacactgcgcaaaggctaccagatccaggacttcaagatggacctggccagcctgtgtctgaaagctggagtgaagaatctcaacacagtgtttctcatgactgatgcccaagtggctgatgagaggttccttgtgctcatcaatgatcttttggcatctggggagatcccagatctctactctgatgatgaagttgaaaacatcataagcaatgtgaggaatgaagtcaagagccagggtctggttgacaacagagagaactgttggaagttctttatagatcggatccggcgacagctgaaggtgactctctgtttctcccctgtgggaaacaagctaagagtccgcagcaggaagttcccagccattgtgaactgcacagccatccactggttccacgagtggcctcagcaagcattggagtctgtcagcctccgcttcttgcagaacacagagggcattgagcccacagtaaagcagtcgattagcaaattcatggcctttgtccacacaagtgtcaaccaaacatcccagtcttatctgagcaatgaacagcgctacaactatacaactcccaagtcctttctggagttcatcagactctaccagagcttgttgcacaggcacagaaaagagctcaagtgcaagacagagcggttggagaacgggctgctgaagctgcatagcacctctgcccaggtggatgatctgaaagcaaagctggctgcccaggaagtagagctgaagcagaaaaatgaagatgcagacaaactgattcaggtcgtgggtgtggagactgacaaagtgagcagagagaaagccatggcagatgaagaggagcagaaggtggccgtcatcatgctagaggtgaaacagaagcagaaggactgtgaggaggacctggcaaaggctgagccagcactcacagcagcgcaggcagctctcaacaccctgaacaagaccaacctgacagagctgaagtcatttggctctccgcctctggccgtcagcaatgtcagcgctgcggtgatggtactgatggctcccaggggtagggtgcccaaggaccggagctggaaggctgctaaggtcaccatggccaaagtggatggcttcctggactcgctaataaacttcaacaaagagaacattcacgagaactgcctcaaagccatcaggccgtatctgcaagaccccgagttcaatcctgagtttgtggccaccaaatcctatgcggctgcaggcctctgctcctgggtcatcaatattgtgagattttatgaggtgttctgtgatgtggaacccaagcgccaggcactgaacaaagccaccgcggacctcacagctgcccaggagaagctggctgccatcaaagccaagatcgctcaccttaatgaaaacctggcaaagctcacagccaggtttgagaaagcaacagcagacaaactcaaatgtcagcaagaagccgaagtgaccgcagtcaccatctcccttgccaaccgcctggttggaggactcgcttctgaaaacgtgaggtgggcagatgccgtgcagaacttcaaacagcaggaaaggacgttatgtggagacattttacttataacggctttcatttcctaccttggcttcttcacaaagaaataccggcagagcctcctggacagaacttggaggccctacctgagccagctgaaaactcccattccagtcaccccagccctggatcccctgaggatgctgatggatgatgctgacgtggctgcctggcagaacgagggcctcccagccgaccgcatgtccgtggagaatgccaccattctcatcaactgtgagcgctggccactcatggttgaccctcagctacaaggcatcaaatggatcaagaataaatatggtgaagatctccgggtcacgcagattggtcagaaaggctaccttcaaatcatagagcaggccctggaagctggagctgtggtgctgattgaaaatctagaggagtccattgatcctgttctgggacccctgcttgggagagaagtcattaaaaaaggacgattcattaaaattggagacaaagaatgtgaatacaatcccaagttccggctcatcctccacaccaagctggctaatcctcactaccagcctgagctgcaggctcaggccaccctgatcaacttcaccgtgaccagggatggcctggaggaccagttgctggccgctgtggtcagcatggagaggccagacttggagcagctgaagtccgatctcacaaagcagcagaatggattcaaaattaccctgaaaacgttggaagacagtcttctctctcgcctctcctccgcctctgggaacttcctgggagaaacagtgctggtggaaaacctagagatcaccaagcagactgctgccgaagttgagaaaaaggtccaggaggccaaggtgactgaagtgaaaatcaacgaggcccgagagcactaccggccagcagctgccagggcctcactgctctacttcatcatgaacgacctcagcaagatccatccaatgtaccagttttctctcaaggccttcagtatcgtcttccagaaggctgtggagagggctgctcctgacgaaagcctcagggagcgggtggccaacctaatagacagcataaccttctctgtgtaccagtacaccatccgcgggctctttgagtgtgataagctgacctaccttgcccagctcacctttcagattctcctcatgaaccgagaagtcaatgcagtggagttggatttcctgcttcgatctccagtgcagacgggcaccgccagccccgtggagttcctctcccatcaggcgtggggagctgtcaaggtactttcatcaatggaagaattctctaatctggatcgggacatagagggatctgctaagagctggaaaaagtttgtggagtccgaatgtcctgagaaagagaagctcccacaggagtggaagaacaagacagccctgcagcgcctctgcatgctgagagccatgcggcccgaccggatgacctatgctttgcgagattttgttgaagagaagttaggaagcaaatacgtggtgggaagagccctagattttgcaacctcatttgaagaatcgggaccagccactcctatgtttttcatcctgtctccaggggtggacccactgaaggatgtagaaagtcaaggaagaaaacttggatacaccttcaacaatcagaactttcacaacgtgtctttggggcaaggacaggaagtggtggctgaggctgcgctggacctcgctgccaagaaaggtcactgggttattttgcagaacattcacctggtggccaagtggctcagcaccctggagaagaagctggaggagcacagtgagaacagccacccagagttcagggtcttcatgagtgcagagccagcaccctcccctgagggccacatcatcccccagggcatcctggagaactccattaagatcaccaatgagccccccacgggcatgcatgccaacctgcacaaggccctggacaacttcactcaggacactctggagatgtgttctcgggagacggagtttaagagcatcctctttgctctttgttacttccatgcggtggtggcagaaagacgaaaatttgggccccagggatggaatcgctcatacccctttaacactggagacctcactatctctgtgaatgtcctctacaacttcctggaggccaacgcaaaggtcccctatgatgatttgcgctacctgtttggagagatcatgtatggaggccatatcacagatgactgggacagaagactctgcagaacctacctgggggaattcattcgaccagaaatgttagaaggagaactgtctttggccccagggttcccactcccaggcaacatggactacaatggttatcatcagtacatcgatgctgagctgcccccagaatccccctacctctatggcctccacccgaacgcagagattggcttcctgacccaaacctcagaaaagctcttccgcactgtgctggagctgcagcctcgggacagccaggccagagacggagcgggcgccacaagagaagaaaaggtcaaggcacttctggaagaaatattggagcgggtgacagacgagtttaacatcccagaactgatggccaaagtggaggagcgcaccccttacattgtagttgccttccaggagtgtggccggatgaatatcctcaccagagagattcagcgctcactgagggagctggagctcggcttaaagggggagctgactatgaccagccacatggagaacttacagaatgccctgtacttcgatatggtgccagagtcctgggctagacgagcctacccttccacagcaggcctggcagcctggtttccagacctcctcaacagaatcaaggagctagaggcttggacgggtgactttacaatgccctccactgtgtggctgacaggcttcttcaacccccagtcgttcctgactgccatcatgcagtccacggctcgcaagaatgagtggccactggaccagatggccctgcaatgtgacatgacgaagaagaacagagaagagtttaggagtcctcctcgggaaggggcctacatccatggcctcttcatggaaggtgcctgctgggacacacaggctgggatcattacagaggcaaagctgaaggatctgacaccccctatgcctgtgatgttcatcaaggccattcctgcagataagcaggactgccgcagtgtctattcctgtcctgtgtacaagactagtcagcggggacccacctacgtgtggactttcaacctgaagactaaggaaaacccatccaagtgggttctggctggagtagccttgcttctccagatttagcatcctgcagagccaccgagaaaataaaaaagctgggcttggaggctgcctagagggacaggtgggtgaagggtcaccacagacacttagaacggtaagaaaccatgagcactcacaattctgtagaattcctctagggaacttggagaggtgtgcctaaggtgaggctgagctgaaggaatgtgggcccaggtttcttaataaaatgatttactcttcaactgtgtctggcccaggatttgagagctgctgaatcataaatgatcatgtagagaccaagagaaacaaaccacaagggccctgaccttgttacacaacactatcctaggtgctcttcttccaggctaccccacgcagtccttggaccagtggtattggcatcacccatgaaccagaatctccattttaacaatctctctggaaaatctgtatgcacattatagtttgagaaacactatcctggagcaggggtcaccaacatttttccataaagagccagttagtgaatacttttagtgatttacaggccacaatgcctctgtttgaactttgcaactttgccgtggtagaccaacagtaaccataaatgatgagtaaatgaaggggtgtgattgcattctaacaaattttatttacaaaaa

SEQ ID NO: 9006 - DNA, 1460 bp, Homo sapiens
  source 1..1460: mol_type = unassigned DNA
agaagacggggtgtgatgggaaaggggcccaacccctgctctgttccagcataccaccaaacctccaacaaggccttttgcagtctcagtctcgcgcttgcatcagaagggcattggagatattggccctgagcaggacagagcatatctgtaacagtgtccaggaacaatatacctttgacggaagatgcttattgccagattattgggatttctccaaatatgaaagacttcgttctaggtagagacaaggtccaggaggccaaggtgactgaagtgaaaatcaacgaggcccgagagcactaccggccagcagctgccagggcctcactgctctacttcatcatgaacgacctcagcaagatccatccaatgtaccagttttctctcaaggccttcagtatcgtcttccagaaggctgtggagagggctgctcctgacgaaagcctcagggagcgggtggccaacctaatagacagcataaccttctctgtgtaccagtacaccatccgcgggctctttgagtgtgataagctgacctaccttgcccagctcacctttcagattctcctcatgaaccgagaagtcaatgcagtggagttggatttcctgcttcgatctccagtgcagacgggcaccgccagccccgtggagttcctctcccatcaggcgtggggagctgtcaaggtactttcatcaatggaagaattctctaatctggatcgggacatagagggatctgctaagagctggaaaaagtttgtggagtccgaatgtcctgagaaagagaagctcccacaggagtggaagaacaagacagccctgcagcgcctctgcatgctgagagccatgcggcccgaccggatgacctatgctttgcgagattttgttgaagagaagttaggaagcaaatacgtggtgggaagagccctagattttgcaacctcatttgaagaatcgggaccagccactcctatgtttttcatcctgtctccaggggtggacccactgaaggatgtagaaagtcaaggaagaaaacttggatacaccttcaacaatcagaactttcacaacgtgtctttggggcaaggacaggaagtggtggctgaggctgcgctggacctcgctgccaagaaaggtcactgggttattttgcaggtaaagagatgttccttctttaccttttatcacccagcccactgccttgaacatagcagacactgaaacaaaaggccggtgggtcaaggaatccatgaagaaattaaagaaagaataaatgcaaaagccagtcactcccattcttcccggctttcactaccatgaacctcccccatctcctgattactggtgacatcacatcttgctgctgggtctttgtccttaattattcagttatttatttggagcctagcaactgagagatctgcccctcccagggcctccttttccagaaacatcag

SEQ ID NO: 9007 - DNA, 3145 bp, Homo sapiens
  source 1..3145: mol_type = unassigned DNA
gttttaagaaacaagaaaggtcagggtggctgtggttggaacctccaacaggaaggttgttcttcccacgaatccaaaggctgtacaagggcaaagacactacagctgcctgaagttagtgctttaggatatggagcataaagagaggaagagatgagatccacttggataccagcaccccactccagcctcgaggaagcttttacacagtctgccatggttttacacagtttaaaactggaagacagattctgctgatttttttttaatccgatctcacaaagcagcagaatggattcaaaattaccctgaaaacgttggaagacagtcttctctctcgcctctcctccgcctctgggaacttcctgggagaaacagtgctggtggaaaacctagagatcaccaagcagactgctgccgaagttgagaaaaaggtccaggaggccaaggtgactgaagtgaaaatcaacgaggcccgagagcactaccggccagcagctgccagggcctcactgctctacttcatcatgaacgacctcagcaagatccatccaatgtaccagttttctctcaaggccttcagtatcgtcttccagaaggctgtggagagggctgctcctgacgaaagcctcagggagcgggtggccaacctaatagacagcataaccttctctgtgtaccagtacaccatccgcgggctctttgagtgtgataagctgacctaccttgcccagctcacctttcagattctcctcatgaaccgagaagtcaatgcagtggagttggatttcctgcttcgatctccagtgcagacgggcaccgccagccccgtggagttcctctcccatcaggcgtggggagctgtcaaggtactttcatcaatggaagaattctctaatctggatcgggacatagagggatctgctaagagctggaaaaagtttgtggagtccgaatgtcctgagaaagagaagctcccacaggagtggaagaacaagacagccctgcagcgcctctgcatgctgagagccatgcggcccgaccggatgacctatgctttgcgagattttgttgaagagaagttaggaagcaaatacgtggtgggaagagccctagattttgcaacctcatttgaagaatcgggaccagccactcctatgtttttcatcctgtctccaggggtggacccactgaaggatgtagaaagtcaaggaagaaaacttggatacaccttcaacaatcagaactttcacaacgtgtctttggggcaaggacaggaagtggtggctgaggctgcgctggacctcgctgccaagaaaggtcactgggttattttgcagaacattcacctggtggccaagtggctcagcaccctggagaagaagctggaggagcacagtgagaacagccacccagagttcagggtcttcatgagtgcagagccagcaccctcccctgagggccacatcatcccccagggcatcctggagaactccattaagatcaccaatgagccccccacgggcatgcatgccaacctgcacaaggccctggacaacttcactcaggacactctggagatgtgttctcgggagacggagtttaagagcatcctctttgctctttgttacttccatgcggtggtggcagaaagacgaaaatttgggccccagggatggaatcgctcatacccctttaacactggagacctcactatctctgtgaatgtcctctacaacttcctggaggccaacgcaaaggtcccctatgatgatttgcgctacctgtttggagagatcatgtatggaggccatatcacagatgactgggacagaagactctgcagaacctacctgggggaattcattcgaccagaaatgttagaaggagaactgtctttggccccagggttcccactcccaggcaacatggactacaatggttatcatcagtacatcgatgctgagctgcccccagaatccccctacctctatggcctccacccgaacgcagagattggcttcctgacccaaacctcagaaaagctcttccgcactgtgctggagctgcagcctcgggacagccaggccagagacggagcgggcgccacaagagaagaaaaggtcaaggcacttctggaagaaatattggagcgggtgacagacgagtttaacatcccagaactgatggccaaagtggaggagcgcaccccttacattgtagttgccttccaggagtgtggccggatgaatatcctcaccagagagattcagcgctcactgagggagctggagctcggcttaaagggggagctgactatgaccagccacatggagaacttacagaatgccctgtacttcgatatggtgccagagtcctgggctagacgagcctacccttccacagcaggcctggcagcctggtttccagacctcctcaacagaatcaaggagctagaggcttggacgggtgactttacaatgccctccactgtgtggctgacaggcttcttcaacccccagtcgttcctgactgccatcatgcagtccacggctcgcaagaatgagtggccactggaccagatggccctgcaatgtgacatgacgaagaagaacagagaagagtttaggagtcctcctcgggaaggggcctacatccatggcctcttcatggaaggtgcctgctgggacacacaggctgggatcattacagaggcaaagctgaaggatctgacaccccctatgcctgtgatgttcatcaaggccattcctgcagataagcaggactgccgcagtgtctattcctgtcctgtgtacaagactagtcagcggggacccacctacgtgtggactttcaacctgaagactaaggaaaacccatccaagtgggttctggctggagtagccttgcttctccagatttagcatcctgcagagccaccgagaaaataaaaaagctgggcttggaggctgcctagagggacaggtgggtgaagggtcaccacagacacttagaacggtaagaaaccatgagcactcacaattctgtagaattcctctagggaacttggagaggtgtgcctaaggtgaggctgagctgaaggaatgtgggcccaggtttcttaataaaatgatttactcttcaa

SEQ ID NO: 9008 - DNA, 9198 bp, Homo sapiens
  source 1..9198: mol_type = unassigned DNA
gaggtccggggcattgtggacaaagctgcaaaagagatgggtatggagaaaaccttaaaggagctgcagactacctgggctggcatggaattccagtatgagccccacccacggaccaatgtccccctcctgtgctctgatgaggacctcatagaggttctggaggataatcaagttcaacttcagaacctggtgatgtccaagtatgttgctttcttcttggaggaggtgtcgggctggcagaagaagctgtccacagtggacgctgtcatctctatctggtttgaagtgcagcgaacatggactcacctggaaagcatattcactggatctgaagatattcgggcacagctaccccaggattctaaaaggtttgaaggcatcgacattgactttaaagagctagcttatgatgcccagaaaattccaaatgtagtgcaaaccaccaacaagccaggcctgtatgaaaagctggaggatattcagggcagattgtgcctgtgtgagaaggccctggcagagtacctcgacaccaagaggcttgccttcccgcggttttactttctctcctcctccgatctgttagacatcctttccaacggcacagctccacaacaggttcaacgtcacctttccaaactctttgacaacatggccaagatgcgattccagctagatgccagtggggaaccaaccaagacaagcctcggcatgtacagcaaagaagaggagtatgtggctttcagtgagccctgtgactgcagcgggcaggtagaaatatggctgaaccatgtccttggtcacatgaaggccactgtgaggcatgagatgacagaaggtgtaactgcctatgaagaaaagccgagggagcagtggctttttgaccacccagctcaggtggccctgacctgtactcagatctggtggacaacagaagtgggcatggcatttgccaggctggaggaaggctatgagagtgccatgaaggactattataagaagcaagtggcccagctcaaaacccttatcaccatgctgattggccagctctccaagggagaccggcagaagattatgactatatgcaccatcgatgtgcatgcccgggatgtggtagccaagatgattgctcagaaggtagacaatgcccaggctttcctctggctgtctcagctgcgccatcgttgggatgacgaggtcaaacactgctttgccaacatctgtgatgcccagtttttgtattcctatgagtacctgggaaacacacctcgcttggtgatcacacctttgactgacaggtgctacatcaccctcacccagtccctgcacctgaccatgagtggggctcccgcaggacctgcaggcacaggcaagaccgagaccaccaaggacctgggccgcgcactgggcatcctggtctatgtgttcaactgctcggagcagatggattacaagtcttgtggcaacatctacaaaggccttgctcagactggtgcctggggctgctttgatgagtttaatcgaatctccgtggaggtcttgtcagtggtggcagtgcaggtaaaaagcattcaagatgcgattagagataagaagcagtggttcagcttccttggggaggagatcagcctgaatccttctgtcggtatcttcatcaccatgaacccaggctatgctggccgcacagagctgccagagaatctcaagtctctcttcaggccttgtgcaatggtggttccagactttgaattgatctgtgaaatcatgctggtggcagaaggattcattgaagcccagtcattagccagaaagttcatcactctttaccagttgtgcaaagagcttctctccaaacaggatcactacgactggggcctacgggccatcaagtccgtgctggtggtggcaggatccctgaagagaggagaccctgaccggcctgaggaccaggtcctgatgcgctccttgcgggatttcaacatccccaagattgtgactgatgacatgcccatcttcatgggcctgatcggggacctctttcccgccctggatgtcccccggaggagagaccccaacttcgaagctttggttaggaaggcgatagtggatctgaagctccaggctgaggacaactttgtgctcaaggtggtccagctggaggagctcctggctgtgcggcactctgtatttgtggtgggtggcgctggtaccggcaagtcacaggtgctgaggtccttgcacaagacctatcagatcatgaaacggcgccccgtctggactgacctcaatcccaaagcagtcacaaatgatgagctctttggcatcatcaatccagccacaggagaatggaaggatggattgttctcttccatcatgcgggagcttgccaacatcacccatgatgggcccaagtggattttactggatggcgacatagatccaatgtggattgaatccctgaatactgtcatggatgataacaaggtgctgacattggccagcaatgagaggattcctctgaaccccaccatgaagctcctctttgagatcagccacctgcgcacagccactccagcaactgtctctagagcagggatcttgtacatcaacccggcagacttgggatggaaccctccagtgagcagctggattgagaagagggaaatccagacagagagagccaacttaaccattttgttcgacaagtatcttccaacctgcctagacacactcagaaccaggtttaagaagatcattcccatcccagagcagagcatggttcagatggtgtgtcaccttctggaatgtctcctgaccacggaggacatccctgcagactgccctaaggaaatttatgagcattattttgtgtttgctgccatctgggctttcggcggagcaatggtccaagatcagcttgtggactaccgggcagagttcagcaaatggtggctgactgagttcaaaacagtcaagtttccttcccaaggaaccatctttgactattacatcgacccagagaccaagaaattcgagccttggtccaagctcgtcccccagttcgaatttgaccccgagatgcccttgcaggcgtgtttggtgcacacgagtgagaccatccgtgtgtgctacttcatggagcggttgatggcgcggcagcggcctgtcatgctggtgggcacggctggcactggcaagtcggtgctggtgggagctaagctggccagccttgaccccgaggcatacctggtgaaaaacgtgccattcaactactacaccacgtcagcaatgctgcaggctgtcctggagaagcctctggaaaagaaggctggcagaaactatggccctccagggaacaagaaactcatctatttcattgatgacatgaacatgcctgaggtggatgcctacgggacggtgcagccccacaccatcatccggcagcatctggactatggccactggtatgatcggagcaagctgtccctaaaggagatcacaaatgtacagtatgtttcctgtatgaaccccacggcaggcagcttcaccatcaacccccggcttcagcgtcacttcagcgtgtttgtcctctccttcccgggggcagatgccctgtcctctatctacagcatcatcctcactcagcatctgaagctcggaaacttcccggcgtccctgcagaaatccatccccccactgatcgatctggccctcgccttccaccagaaaattgctaccaccttcctacccacaggaatcaaattccactacatcttcaacctcagagattttgccaacattttccagggcattctcttctcctcagtggaatgtgtgaaatccacatgggatcttataaggctctatctgcatgaatcaaatcgagtttatcgggataagatggtagaagaaaaggactttgatctttttgataaaatccagacagaagtgctcaagaaaacttttgatgatattgaagaccctgtggagcagacccaaagcccgaacctgtattgtcactttgcaaatggtattggggagcccaaatacatgcctgtacagtcttgggaacttttgacccagactctggtggaggccttggagaaccacaatgaagtcaacacagtgatggacctagttctctttgaggatgccatgcgccatgtctgccatatcaatcgcatcttggagtccccgcggggaaatgctctgctggttggtgtaggtgggagcggcaagcagagcctgacaaggctggcagctttcatcagctccatggatgtcttccagatcacactgcgcaaaggctaccagatccaggacttcaagatggacctggccagcctgtgtctgaaagctggagtgaagaatctcaacacagtgtttctcatgactgatgcccaagtggctgatgagaggttccttgtgctcatcaatgatcttttggcatctggggagatcccagatctctactctgatgatgaagttgaaaacatcataagcaatgtgaggaatgaagtcaagagccagggtctggttgacaacagagagaactgttggaagttctttatagatcggatccggcgacagctgaaggtgactctctgtttctcccctgtgggaaacaagctaagagtccgcagcaggaagttcccagccattgtgaactgcacagccatccactggttccacgagtggcctcagcaagcattggagtctgtcagcctccgcttcttgcagaacacagagggcattgagcccacagtaaagcagtcgattagcaaattcatggcctttgtccacacaagtgtcaaccaaacatcccagtcttatctgagcaatgaacagcgctacaactatacaactcccaagtcctttctggagttcatcagactctaccagagcttgttgcacaggcacagaaaagagctcaagtgcaagacagagcggttggagaacgggctgctgaagctgcatagcacctctgcccaggtggatgatctgaaagcaaagctggctgcccaggaagtagagctgaagcagaaaaatgaagatgcagacaaactgattcaggtcgtgggtgtggagactgacaaagtgagcagagagaaagccatggcagatgaagaggagcagaaggtggccgtcatcatgctagaggtgaaacagaagcagaaggactgtgaggaggacctggcaaaggctgagccagcactcacagcagcgcaggcagctctcaacaccctgaacaagaccaacctgacagagctgaagtcatttggctctccgcctctggccgtcagcaatgtcagcgctgcggtgatggtactgatggctcccaggggtagggtgcccaaggaccggagctggaaggctgctaaggtcaccatggccaaagtggatggcttcctggactcgctaataaacttcaacaaagagaacattcacgagaactgcctcaaagccatcaggccgtatctgcaagaccccgagttcaatcctgagtttgtggccaccaaatcctatgcggctgcaggcctctgctcctgggtcatcaatattgtgagattttatgaggtgttctgtgatgtggaacccaagcgccaggcactgaacaaagccaccgcggacctcacagctgcccaggagaagctggctgccatcaaagccaagatcgctcaccttaatgaaaacctggcaaagctcacagccaggtttgagaaagcaacagcagacaaactcaaatgtcagcaagaagccgaagtgaccgcagtcaccatctcccttgccaaccgcctggttggaggactcgcttctgaaaacgtgaggtgggcagatgccgtgcagaacttcaaacagcaggaaaggacgttatgtggagacattttacttataacggctttcatttcctaccttggcttcttcacaaagaaataccggcagagcctcctggacagaacttggaggccctacctgagccagctgaaaactcccattccagtcaccccagccctggatcccctgaggatgctgatggatgatgctgacgtggctgcctggcagaacgagggcctcccagccgaccgcatgtccgtggagaatgccaccattctcatcaactgtgagcgctggccactcatggttgaccctcagctacaaggcatcaaatggatcaagaataaatatggtgaagatctccgggtcacgcagattggtcagaaaggctaccttcaaatcatagagcaggccctggaagctggagctgtggtgctgattgaaaatctagaggagtccattgatcctgttctgggacccctgcttgggagagaagtcattaaaaaaggacgattcattaaaattggagacaaagaatgtgaatacaatcccaagttccggctcatcctccacaccaagctggctaatcctcactaccagcctgagctgcaggctcaggccaccctgatcaacttcaccgtgaccagggatggcctggaggaccagttgctggccgctgtggtcagcatggagaggccagacttggagcagctgaagtccgatctcacaaagcagcagaatggattcaaaattaccctgaaaacgttggaagacagtcttctctctcgcctctcctccgcctctgggaacttcctgggagaaacagtgctggtggaaaacctagagatcaccaagcagactgctgccgaagttgagaaaaaggtccaggaggccaaggtgactgaagtgaaaatcaacgaggcccgagagcactaccggccagcagctgccagggcctcactgctctacttcatcatgaacgacctcagcaagatccatccaatgtaccagttttctctcaaggccttcagtatcgtcttccagaaggctgtggagagggctgctcctgacgaaagcctcagggagcgggtggccaacctaatagacagcataaccttctctgtgtaccagtacaccatccgcgggctctttgagtgtgataagctgacctaccttgcccagctcacctttcagattctcctcatgaaccgagaagtcaatgcagtggagttggatttcctgcttcgatctccagtgcagacgggcaccgccagccccgtggagttcctctcccatcaggcgtggggagctgtcaaggtactttcatcaatggaagaattctctaatctggatcgggacatagagggatctgctaagagctggaaaaagtttgtggagtccgaatgtcctgagaaagagaagctcccacaggagtggaagaacaagacagccctgcagcgcctctgcatgctgagagccatgcggcccgaccggatgacctatgctttgcgagattttgttgaagagaagttaggaagcaaatacgtggtgggaagagccctagattttgcaacctcatttgaagaatcgggaccagccactcctatgtttttcatcctgtctccaggggtggacccactgaaggatgtagaaagtcaaggaagaaaacttggatacaccttcaacaatcagaactttcacaacgtgtctttggggcaaggacaggaagtggtggctgaggctgcgctggacctcgctgccaagaaaggtcactgggttattttgcaggacactctggagatgtgttctcgggagacggagtttaagagcatcctctttgctctttgttacttccatgcggtggtggcagaaagacgaaaatttgggccccagggatggaatcgctcatacccctttaacactggagacctcactatctctgtgaatgtcctctacaacttcctggaggccaacgcaaaggtcccctatgatgatttgcgctacctgtttggagagatcatgtatggaggccatatcacagatgactgggacagaagactctgcagaacctacctgggggaattcattcgaccagaaatgttagaaggagaactgtctttggccccagggttcccactcccaggcaacatggactacaatggttatcatcagtacatcgatgctgagctgcccccagaatccccctacctctatggcctccacccgaacgcagagattggcttcctgacccaaacctcagaaaagctcttccgcactgtgctggagctgcagcctcgggacagccaggccagagacggagcgggcgccacaagagaagaaaaggtcaaggcacttctggaagaaatattggagcgggtgacagacgagtttaacatcccagaactgatggccaaagtggaggagcgcaccccttacattgtagttgccttccaggagtgtggccggatgaatatcctcaccagagagattcagcgctcactgagggagctggagctcggcttaaagggggagctgactatgaccagccacatggagaacttacagaatgccctgtacttcgatatggtgccagagtcctgggctagacgagcctacccttccacagcaggcctggcagcctggtttccagacctcctcaacagaatcaaggagctagaggcttggacgggtgactttacaatgccctccactgtgtggctgacaggcttcttcaacccccagtcgttcctgactgccatcatgcagtccacggctcgcaagaatgagtggccactggaccagatggccctgcaatgtgacatgacgaagaagaacagagaagagtttaggagtcctcctcgggaaggggcctacatccatggcctcttcatggaaggtgcctgctgggacacacaggctgggatcattacagaggcaaagctgaaggatctgacaccccctatgcctgtgatgttcatcaaggccattcctgcagataagcaggactgccgcagtgtctattcctgtcctgtgtacaagactagtcagcggggacccacctacgtgtggactttcaacctgaagactaaggaaaacccatccaagtgggttctggctggagtagccttgcttctccagatttagcatcctgcagagccaccgagaaaataaaaaagctgggcttggaggctgcctagagggacaggtgggtgaagggtcaccacagacacttagaacggtaagaaaccatgagcactcacaattctgtagaattcctctagggaacttggagaggtgtgcctaaggtgaggctgagctgaaggaatgtgggcccaggtttcttaataaaatgatttactcttc

SEQ ID NO: 9009 - DNA, 13588 bp, Homo sapiens
  source 1..13588: mol_type = unassigned DNA
agcagaggagtgagtcctggccgcgtccccgtcgctagggaaaccgatgcagctggaggccgcgcgcgatgcggctcgcggaggagcgggccgcgctcgcggcggagaacgcggatggggaacccggcgccgaccgacgactgcgactcctggggacctacgtggccatgagcctgcggccggctgcgggcgcctgggagcgttgcgcggggagtgctgaggcggagcagctgctccaggccttcctgggccgcgatgctgccgaggggccgcggccgctgctggtggtgcggcccgggcccaggggcctggcaatacgccccgggctggaggtgggacctgagtcgggcctggctggcgctaaggcgctttttttccttcgcaccgggcccgagcctccagggcccgacagcttccgcggcgcagtggtctgcggggacctgcccgcggcacctctggagcacctagccgcgctgttctcggaggttgttctacccgtcctggccaatgagaagaatcgcctaaactggccccacatgatatgtgaggatgtcaggcggcacgcccacagcctccaatgtgacctctcagttatacttgagcaagtgaagggaaaaactttgctgcctcttccagcaggctcagaaaaaatggagtttgcggattccaaaagtgagacagtcttggattctatagataagtcagtcatctatgccattgagtctgcagtgatcaaatggagctaccaagtccaggtggtactcaagagagagtcttcccagccactcttacaaggggagaatcccacccctaaggtggagttggagttctggaagagcaggtatgaagatctgaaatacatctataatcaactgagaacaataacggtgaggggcatggccaagctcctggacaagcttcagagtagctactttccagctttcaaagccatgtacagagatgttgttgcagctctagcagaggcacaggacatccatgtgcacctgataccgctccagcgccacctggaagctctggagaatgcagaatttccggaggtgaagccccagctgcggcccctgctccacgtggtctgtctgatttgggccacatgcaagtcctaccgctccccgggaaggctgactgtgctgctccaggagatttgcaaccttctcatccagcaggcctctaattatctcagcccagaagacctgctgagaagtgaggtagaagaaagtcagagaaaactgcaagtggtctcagacactttgagcttcttcaagcaagagtttcaggacagaagggagaatctccacacttacttcaaagagaaccaggaagtcaaggaatgggatttccagtcttctttggtctttgtgcgattggatggcttcctgggacaactgcacgtggtggagggtcttctgaagacggccctggatttccacaaactgggaaaggtggagttcagcggcgtcagagggaatgctctgagtcagcaggtccagcaaatgcatgaagaatttcaagagatgtacaggcttctctcaggatcctcctccgactgcctgtacctccaaagcacggactttgaaaatgacgtctctgaatttaaccagaaagtagaagatcttgaccgaagattggggactatctttattcaagcttttgatgatgcacctggcttggagcatgcctttaagctgctagacatagcaggaaacctccttgaaagaccgctggtagcgagggatacatctgataaatacctggtcctcatccaaatgttcaacaaagatctggatgcagtgaggatgatctacagtcagcacgtccaggaggaagcagaacttgggttctccccggtgcacaagaacatgcccaccgtggctggcggcctccgctgggcacaggagctgaggcagcgcatccagggtcctttcagcaactttggacgcatcacacacccttgcatggaatctgcagaaggaaagcgaatgcaacaaaaatatgaagatatgctgtcattgctagaaaagtatgagacaagactttatgaggattggtgccggacagtatcagagaagtcacagtacaatctttcccaaccacttctaaaacgtgacccagagacgaaggagatcactatcaactttaacccacagctgatttcagtgctgaaagaaatgagctatcttgaacccagagagatgaaacacatgcctgagacagcagcagccatgttctcctccagggatttctatcggcagcttgtggctaatttagagttgatggcaaattggtacaacaaggttatgaaaactctgctggaggtggaatttccattagtggaggaagagctgcaaaatattgatctccgcctcagagcagcagaggagactttgaactggaaaacagaaggcatttgcgattatgtcactgaaatcaccagtagtattcatgatcttgaacaaagaattcagaaaactaaagacaatgtggaagagatccaaaacatcatgaaaacatgggtgactccaatatttaagacaaaagatggaaaaagggaatcccttctttctctggatgatcggcatgatcgaatggaaaaatattacaatctcatcaaggaatctggccttaagatccacgcccttgttcaggaaaacctgggtctattttcagcagacccaacctccaatatctggaagacttatgttaactctattgacaatttgttgctgaatggattctttcttgccattgagtgctccctcaagtatcttctggaaaatactgagtgtaaggcaggacttaccccaatatttgaagcacaactgagtctagccatcccagagctagttttctatccgtctctggagtctggagtgaaggggggtttctgtgacattgttgagggtctcatcaccagcatttttaggataccatctctggtgccacggctttccccacaaaatggctctcctcactatcaggtcgacctggacggtataccagatttggcaaacatgcggcgcacactcatggagagagtccagagaatgatgggcctctgctgtggctatcagagcaccttcagccagtattcgtacctctatgtggaggaccggaaggaggttctgggtcagtttctgctgtacgggcacatcctcactccggaagaaattgaagaccatgtggaagatggcatcccagagaaccctcccctcctttctcagtttaaagtgcaaatcgactcctatgaaacgctctatgaagaggtgtgcaggctggaacccatcaaggtgtttgacggctggatgaaaattgatattcgaccctttaaggcatctctgctgaatattattaagaggtggagcctcctgttcaaacagcatcttgtggaccacgtcactcacagcttggccaacctggatgcgtttataaagaagagtgagagcggcttactcaagaaagttgaaaaaggagatttccaaggcttggttgagatcatgggacaccttatggctgttaaagaacggcagagtaacactgatgagatgtttgagcccttaaagcagactattgaattgctgaagacctatgaacaagaattgccagaaacagtgtttaagcagctggaggagctgcctgagaaatggaacaacataaaaaaggtggccattactgtgaagcagcaggtggccccactgcaggcaaatgaagtgacactcctccgccagaggtgcacagccttcgatgcagaacagcagcaattctgggagcaattccacaaagaagccccgttcaggtttgatagcatccaccctcatcaaatgctggatgccaggcacatcgagatccagcagatggaatccactatggcctccatttctgagtctgccagcttatttgaagtcaatgtccctgactataagcagctgaggcagtgcaggaaggaggtctgccagctgaaggagctctgggacaccattggaatggtgacctccagcatccatgcctgggagaccacaccctggaggaatatcaacgtggaagccatggagttggagtgcaaacagtttgcccggcatatccgaaacctggacaaggaggtcagggcctgggatgcattcacaggcctggaaagcactgtgtggaacacgctgagctccctgagggcagtagctgagctgcagaatccagccatccgggagcggcactggaggcagctgatgcaggccaccggtgtgagcttcactatggaccaggacaccaccctagcgcacctgctgcagctccagctgcaccactatgaggatgaggtccggggcattgtggacaaagctgcaaaagagatgggtatggagaaaaccttaaaggagctgcagactacctgggctggcatggaattccagtatgagccccacccacggaccaatgtccccctcctgtgctctgatgaggacctcatagaggttctggaggataatcaagttcaacttcagaacctggtgatgtccaagtatgttgctttcttcttggaggaggtgtcgggctggcagaagaagctgtccacagtggacgctgtcatctctatctggtttgaagtgcagcgaacatggactcacctggaaagcatattcactggatctgaagatattcgggcacagctaccccaggattctaaaaggtttgaaggcatcgacattgactttaaagagctagcttatgatgcccagaaaattccaaatgtagtgcaaaccaccaacaagccaggcctgtatgaaaagctggaggatattcagggcagattgtgcctgtgtgagaaggccctggcagagtacctcgacaccaagaggcttgccttcccgcggttttactttctctcctcctccgatctgttagacatcctttccaacggcacagctccacaacaggttcaacgtcacctttccaaactctttgacaacatggccaagatgcgattccagctagatgccagtggggaaccaaccaagacaagcctcggcatgtacagcaaagaagaggagtatgtggctttcagtgagccctgtgactgcagcgggcaggtagaaatatggctgaaccatgtccttggtcacatgaaggccactgtgaggcatgagatgacagaaggtgtaactgcctatgaagaaaagccgagggagcagtggctttttgaccacccagctcaggtggccctgacctgtactcagatctggtggacaacagaagtgggcatggcatttgccaggctggaggaaggctatgagagtgccatgaaggactattataagaagcaagtggcccagctcaaaacccttatcaccatgctgattggccagctctccaagggagaccggcagaagattatgactatatgcaccatcgatgtgcatgcccgggatgtggtagccaagatgattgctcagaaggtagacaatgcccaggctttcctctggctgtctcagctgcgccatcgttgggatgacgaggtcaaacactgctttgccaacatctgtgatgcccagtttttgtattcctatgagtacctgggaaacacacctcgcttggtgatcacacctttgactgacaggtgctacatcaccctcacccagtccctgcacctgaccatgagtggggctcccgcaggacctgcaggcacaggcaagaccgagaccaccaaggacctgggccgcgcactgggcatcctggtctatgtgttcaactgctcggagcagatggattacaagtcttgtggcaacatctacaaaggccttgctcagactggtgcctggggctgctttgatgagtttaatcgaatctccgtggaggtcttgtcagtggtggcagtgcaggtaaaaagcattcaagatgcgattagagataagaagcagtggttcagcttccttggggaggagatcagcctgaatccttctgtcggtatcttcatcaccatgaacccaggctatgctggccgcacagagctgccagagaatctcaagtctctcttcaggccttgtgcaatggtggttccagactttgaattgatctgtgaaatcatgctggtggcagaaggattcattgaagcccagtcattagccagaaagttcatcactctttaccagttgtgcaaagagcttctctccaaacaggatcactacgactggggcctacgggccatcaagtccgtgctggtggtggcaggatccctgaagagaggagaccctgaccggcctgaggaccaggtcctgatgcgctccttgcgggatttcaacatccccaagattgtgactgatgacatgcccatcttcatgggcctgatcggggacctctttcccgccctggatgtcccccggaggagagaccccaacttcgaagctttggttaggaaggcgatagtggatctgaagctccaggctgaggacaactttgtgctcaaggtggtccagctggaggagctcctggctgtgcggcactctgtatttgtggtgggtggcgctggtaccggcaagtcacaggtgctgaggtccttgcacaagacctatcagatcatgaaacggcgccccgtctggactgacctcaatcccaaagcagtcacaaatgatgagctctttggcatcatcaatccagccacaggagaatggaaggatggattgttctcttccatcatgcgggagcttgccaacatcacccatgatgggcccaagtggattttactggatggcgacatagatccaatgtggattgaatccctgaatactgtcatggatgataacaaggtgctgacattggccagcaatgagaggattcctctgaaccccaccatgaagctcctctttgagatcagccacctgcgcacagccactccagcaactgtctctagagcagggatcttgtacatcaacccggcagacttgggatggaaccctccagtgagcagctggattgagaagagggaaatccagacagagagagccaacttaaccattttgttcgacaagtatcttccaacctgcctagacacactcagaaccaggtttaagaagatcattcccatcccagagcagagcatggttcagatggtgtgtcaccttctggaatgtctcctgaccacggaggacatccctgcagactgccctaaggaaatttatgagcattattttgtgtttgctgccatctgggctttcggcggagcaatggtccaagatcagcttgtggactaccgggcagagttcagcaaatggtggctgactgagttcaaaacagtcaagtttccttcccaaggaaccatctttgactattacatcgacccagagaccaagaaattcgagccttggtccaagctcgtcccccagttcgaatttgaccccgagatgcccttgcaggcgtgtttggtgcacacgagtgagaccatccgtgtgtgctacttcatggagcggttgatggcgcggcagcggcctgtcatgctggtgggcacggctggcactggcaagtcggtgctggtgggagctaagctggccagccttgaccccgaggcatacctggtgaaaaacgtgccattcaactactacaccacgtcagcaatgctgcaggctgtcctggagaagcctctggaaaagaaggctggcagaaactatggccctccagggaacaagaaactcatctatttcattgatgacatgaacatgcctgaggtggatgcctacgggacggtgcagccccacaccatcatccggcagcatctggactatggccactggtatgatcggagcaagctgtccctaaaggagatcacaaatgtacagtatgtttcctgtatgaaccccacggcaggcagcttcaccatcaacccccggcttcagcgtcacttcagcgtgtttgtcctctccttcccgggggcagatgccctgtcctctatctacagcatcatcctcactcagcatctgaagctcggaaacttcccggcgtccctgcagaaatccatccccccactgatcgatctggccctcgccttccaccagaaaattgctaccaccttcctacccacaggaatcaaattccactacatcttcaacctcagagattttgccaacattttccagggcattctcttctcctcagtggaatgtgtgaaatccacatgggatcttataaggctctatctgcatgaatcaaatcgagtttatcgggataagatggtagaagaaaaggactttgatctttttgataaaatccagacagaagtgctcaagaaaacttttgatgatattgaagaccctgtggagcagacccaaagcccgaacctgtattgtcactttgcaaatggtattggggagcccaaatacatgcctgtacagtcttgggaacttttgacccagactctggtggaggccttggagaaccacaatgaagtcaacacagtgatggacctagttctctttgaggatgccatgcgccatgtctgccatatcaatcgcatcttggagtccccgcggggaaatgctctgctggttggtgtaggtgggagcggcaagcagagcctgacaaggctggcagctttcatcagctccatggatgtcttccagatcacactgcgcaaaggctaccagatccaggacttcaagatggacctggccagcctgtgtctgaaagctggagtgaagaatctcaacacagtgtttctcatgactgatgcccaagtggctgatgagaggttccttgtgctcatcaatgatcttttggcatctggggagatcccagatctctactctgatgatgaagttgaaaacatcataagcaatgtgaggaatgaagtcaagagccagggtctggttgacaacagagagaactgttggaagttctttatagatcggatccggcgacagctgaaggtgactctctgtttctcccctgtgggaaacaagctaagagtccgcagcaggaagttcccagccattgtgaactgcacagccatccactggttccacgagtggcctcagcaagcattggagtctgtcagcctccgcttcttgcagaacacagagggcattgagcccacagtaaagcagtcgattagcaaattcatggcctttgtccacacaagtgtcaaccaaacatcccagtcttatctgagcaatgaacagcgctacaactatacaactcccaagtcctttctggagttcatcagactctaccagagcttgttgcacaggcacagaaaagagctcaagtgcaagacagagcggttggagaacgggctgctgaagctgcatagcacctctgcccaggtggatgatctgaaagcaaagctggctgcccaggaagtagagctgaagcagaaaaatgaagatgcagacaaactgattcaggtcgtgggtgtggagactgacaaagtgagcagagagaaagccatggcagatgaagaggagcagaaggtggccgtcatcatgctagaggtgaaacagaagcagaaggactgtgaggaggacctggcaaaggctgagccagcactcacagcagcgcaggcagctctcaacaccctgaacaagaccaacctgacagagctgaagtcatttggctctccgcctctggccgtcagcaatgtcagcgctgcggtgatggtactgatggctcccaggggtagggtgcccaaggaccggagctggaaggctgctaaggtcaccatggccaaagtggatggcttcctggactcgctaataaacttcaacaaagagaacattcacgagaactgcctcaaagccatcaggccgtatctgcaagaccccgagttcaatcctgagtttgtggccaccaaatcctatgcggctgcaggcctctgctcctgggtcatcaatattgtgagattttatgaggtgttctgtgatgtggaacccaagcgccaggcactgaacaaagccaccgcggacctcacagctgcccaggagaagctggctgccatcaaagccaagatcgctcaccttaatgaaaacctggcaaagctcacagccaggtttgagaaagcaacagcagacaaactcaaatgtcagcaagaagccgaagtgaccgcagtcaccatctcccttgccaaccgcctggttggaggactcgcttctgaaaacgtgaggtgggcagatgccgtgcagaacttcaaacagcaggaaaggacgttatgtggagacattttacttataacggctttcatttcctaccttggcttcttcacaaagaaataccggcagagcctcctggacagaacttggaggccctacctgagccagctgaaaactcccattccagtcaccccagccctggatcccctgaggatgctgatggatgatgctgacgtggctgcctggcagaacgagggcctcccagccgaccgcatgtccgtggagaatgccaccattctcatcaactgtgagcgctggccactcatggttgaccctcagctacaaggcatcaaatggatcaagaataaatatggtgaagatctccgggtcacgcagattggtcagaaaggctaccttcaaatcatagagcaggccctggaagctggagctgtggtgctgattgaaaatctagaggagtccattgatcctgttctgggacccctgcttgggagagaagtcattaaaaaaggacgattcattaaaattggagacaaagaatgtgaatacaatcccaagttccggctcatcctccacaccaagctggctaatcctcactaccagcctgagctgcaggctcaggccaccctgatcaacttcaccgtgaccagggatggcctggaggaccagttgctggccgctgtggtcagcatggagaggccagacttggagcagctgaagtccgatctcacaaagcagcagaatggattcaaaattaccctgaaaacgttggaagacagtcttctctctcgcctctcctccgcctctgggaacttcctgggagaaacagtgctggtggaaaacctagagatcaccaagcagactgctgccgaagttgagaaaaaggtccaggaggccaaggtgactgaagtgaaaatcaacgaggcccgagagcactaccggccagcagctgccagggcctcactgctctacttcatcatgaacgacctcagcaagatccatccaatgtaccagttttctctcaaggccttcagtatcgtcttccagaaggctgtggagagggctgctcctgacgaaagcctcagggagcgggtggccaacctaatagacagcataaccttctctgtgtaccagtacaccatccgcgggctctttgagtgtgataagctgacctaccttgcccagctcacctttcagattctcctcatgaaccgagaagtcaatgcagtggagttggatttcctgcttcgatctccagtgcagacgggcaccgccagccccgtggagttcctctcccatcaggcgtggggagctgtcaaggtactttcatcaatggaagaattctctaatctggatcgggacatagagggatctgctaagagctggaaaaagtttgtggagtccgaatgtcctgagaaagagaagctcccacaggagtggaagaacaagacagccctgcagcgcctctgcatgctgagagccatgcggcccgaccggatgacctatgctttgcgagattttgttgaagagaagttaggaagcaaatacgtggtgggaagagccctagattttgcaacctcatttgaagaatcgggaccagccactcctatgtttttcatcctgtctccaggggtggacccactgaaggatgtagaaagtcaaggaagaaaacttggatacaccttcaacaatcagaactttcacaacgtgtctttggggcaaggacaggaagtggtggctgaggctgcgctggacctcgctgccaagaaaggtcactgggttattttgcaggacactctggagatgtgttctcgggagacggagtttaagagcatcctctttgctctttgttacttccatgcggtggtggcagaaagacgaaaatttgggccccagggatggaatcgctcatacccctttaacactggagacctcactatctctgtgaatgtcctctacaacttcctggaggccaacgcaaaggtcccctatgatgatttgcgctacctgtttggagagatcatgtatggaggccatatcacagatgactgggacagaagactctgcagaacctacctgggggaattcattcgaccagaaatgttagaaggagaactgtctttggccccagggttcccactcccaggcaacatggactacaatggttatcatcagtacatcgatgctgagctgcccccagaatccccctacctctatggcctccacccgaacgcagagattggcttcctgacccaaacctcagaaaagctcttccgcactgtgctggagctgcagcctcgggacagccaggccagagacggagcgggcgccacaagagaagaaaaggtcaaggcacttctggaagaaatattggagcgggtgacagacgagtttaacatcccagaactgatggccaaagtggaggagcgcaccccttacattgtagttgccttccaggagtgtggccggatgaatatcctcaccagagagattcagcgctcactgagggagctggagctcggcttaaagggggagctgactatgaccagccacatggagaacttacagaatgccctgtacttcgatatggtgccagagtcctgggctagacgagcctacccttccacagcaggcctggcagcctggtttccagacctcctcaacagaatcaaggagctagaggcttggacgggtgactttacaatgccctccactgtgtggctgacaggcttcttcaacccccagtcgttcctgactgccatcatgcagtccacggctcgcaagaatgagtggccactggaccagatggccctgcaatgtgacatgacgaagaagaacagagaagagtttaggagtcctcctcgggaaggggcctacatccatggcctcttcatggaaggtgcctgctgggacacacaggctgggatcattacagaggcaaagctgaaggatctgacaccccctatgcctgtgatgttcatcaaggccattcctgcagataagcaggactgccgcagtgtctattcctgtcctgtgtacaagactagtcagcggggacccacctacgtgtggactttcaacctgaagactaaggaaaacccatccaagtgggttctggctggagtagccttgcttctccagatttagcatcctgcagagccaccgagaaaataaaaaagctgggcttggaggctgcctagagggacaggtgggtgaagggtcaccacagacacttagaacggtaagaaaccatgagcactcacaattctgtagaattcctctagggaacttggagaggtgtgcctaaggtgaggctgagctgaaggaatgtgggcccaggtttcttaataaaatgatttactcttcaactgtgtctggcccaggatttgagagctgctgaatcataaatgatcatgtagagaccaagagaaaca

SEQ ID NO: 9010 - DNA, 2499 bp, Homo sapiens
  source 1..2499: mol_type = unassigned DNA
attctatcctgcaagggcacggggacccacaacgacggctgtccctaaagaaccgttgcgactggtaactgaagtggaagagagtccagatttcttgtgtgtggtcaaggagacggacaaactttttgtcttcagacgagggagcgttttgtaggctctccaggggttgagatgattcctgcttctgcgaaggctccccataaacagcctcataagcagagcatcagcataggcagaggaaccaggaagagagatgaagattcagggactgaagtgggagaaggcacagatgaatgggcccaatccaaagccacagttagaccccctgaccagctggagttgaccgatgcggagttaaaggaggagttcactcggattttgacagccaacaacccacacgcaccccagaacattgtcaggtacagcttcaaagaaggcacatataagcctattggctttgtgaaccaactggcagttcactacacccaggttgggaacctgatccccaaagactcagatgaaggacggcggcagcattaccgcgatgaattagtggcaggttctcaggagtctgtcaaggtgatttcagaaacaggaaacctcgaagaagacgaagagcccaaggagttagaaactgagcctgggagtcaaacagatgtgcctgcagctggggcagctgaaaaagtgactgaagaagaattgatgactcctaagcagcccaaggagagaaagctcactaaccagttcaacttcagtgagagggcctcacagacctacaacaaccctgtccgggatcgagaatgccagacggagcctcctcccaggacaaacttttcagccacagccaatcagtgggagatctatgatgcctatgtagaggaacttgagaagcaggaaaagaccaaagagaaggagaaggcaaagaccccagtggctaaaaaatcagggaagatggccatgaggaagctgacatctatggagtctcagactgatgatctcatcaaattgtcccaagctgctaagatcatggagcggatggtcaaccagaatacatatgatgacattgctcaagattttaagtactatgacgatgctgctgatgaataccgggaccaggtgggtaccctgctgccgctctggaagttccaaaatgacaaagccaagcgcctgtccgtcactgccctctgctggaatccaaagtacagggatctgtttgcagtgggatatggctcttatgacttcatgaagcagagccggggcatgctgctgctctacagcctgaagaaccccagcttccctgagtacatgttcagcagcaacagcggcgtcatgtgtctcgacatccacgtggaccacccctacctggtggcagtaggccactatgacggcaacgtggccatttacaacctcaagaagccccactcccagccctccttctgcagctcagccaagtctggcaagcactcagaccctgtgtggcaggtcaagtggcagaaggatgacatggaccaaaaccttaacttcttctctgtgtcatctgacggcaggattgtgtcttggactctcgtgaagagaaagctggttcacatagatgtcatcaagctgaaggtggaaggcagcaccacggaagttcctgaggggttgcagctgcacccagtgggttgtggcactgcctttgacttccacaaagagattgactacatgttcctagtgggcacagaggagggaaaaatctacaagtgctctaaatcctactccagccaattcctcgacacctatgacgcccacaacatgtcagtggacactgtgtcctggaacccataccacaccaaggtcttcatgtcctgcagctccgactggacagtgaagatctgggaccacaccatcaagaccccgatgttcatctatgacctgaactcagccgtgggtgatgtggcctgggcgccatactcttctactgtgttcgcagcagtcaccacagatgggaaggcccacatatttgacttagccatcaacaagtatgaggccatctgcaaccagcctgtggcggccaaaaagaacaggctcacccacgtgcagttcaatctcatccaccccatcatcattgtgggcgatgaccgtgggcacatcatcagcctcaagctctcacccaatttgcgcaagatgccaaaggaaaagaaggggcaggaggtgcagaagggtccagctgtggagattgcgaaactggacaaactgctgaacctggtgagggaagtgaaaatcaagacctgaggggctggcctcagtctctgtcccatcgcttgaatacagtactcctagggcttgaccctggtacccagcccagccttagcacccagcatgtgaccccactcctgatcaggtcccagcatcttcccttcttgttctgttccttaaggtcccagcaccttaccccaggacttggtcttcaaccaccattacccctctaactttgcacaaataaacctgtgtagaaaccca

SEQ ID NO: 9011 - DNA, 2337 bp, Homo sapiens
  source 1..2337: mol_type = unassigned DNA
ggtaaccgcgtcagggagttggattctatcctgcaagggcacggggacccacaacgacggctgtccctaaagaaccgttgcgactggtaactgaagtggaagagagtccagatttcttgtgtgtggtcaaggagacggacaaactttttgtcttcagacgagggagcgttttgtaggctctccaggggttgagatgattcctgcttctgcgaaggctccccataaacagcctcataagcagagcatcagcataggcagaggaaccaggaagagagatgaagattcagggactgaagtgggagaaggcacagatgaatgggcccaatccaaagccacagttagaccccctgaccagctggagttgaccgatgcggagttaaaggaggagttcactcggattttgacagccaacaacccacacgcaccccagaacattgtcaggtacagcttcaaagaaggcacatataagcctattggctttgtgaaccaactggcagttcactacacccaggttgggaacctgatccccaaagactcagatgaaggacggcggcagcattaccgcgatgaattagtggcaggttctcaggagtctgtcaaggtgatttcagaaacaggaaacctcgaagaagacgaagagcccaaggagttagaaactgagcctgggagtcaaacagatgtgcctgcagctggggcagctgaaaaagtgactgaagaagaattgatgactcctaagcagcccaaggagagaaagctcactaaccagttcaacttcagtgagagggcctcacagacctacaacaaccctgtccgggatcgagaatgccagacggagcctcctcccaggacaaacttttcagccacagccaatcagtgggagatctatgatgcctatgtagaggaacttgagaagcaggaaaagaccaaagagaaggagaaggcaaagaccccagtggctaaaaaatcagggaagatggccatgaggaagctgacatctatggagtctcagactgatgatctcatcaaattgtcccaagctgctaagatcatggagcggatggtcaaccagaatacatatgatgacattgctcaagattttaagtactatgacgatgctgctgatgaataccgggaccaggtgggtaccctgctgccgctctggaagttccaaaatgacaaagccaagcgcctgtccgtcactgccctctgctggaatccaaagtacagggatctgtttgcagtgggatatggctcttatgacttcatgaagcagagccggggcatgctgctgctctacagcctgaagaaccccagcttccctgagtacatgttcagcagcaacagcggcgtcatgtgtctcgacatccacgtggaccacccctacctggtggcagtaggccactatgacggcaacgtggccatttacaacctcaagaagccccactcccagccctccttctgcagctcagccaagtctggcaagcactcagaccctgtgtggcaggtcaagtggcagaaggatgacatggaccaaaaccttaacttcttctctgtgtcatctgacggcaggattgtgtcttggactctcgtgaagagaaagctggttcacatagatgtcatcaagctgaaggtggaaggcagcaccacggaagttcctgaggggttgcagctgcacccagtgggttgtggcactgcctttgacttccacaaagagattgactacatgttcctagtgggcacagaggagggaaaaatctacaagtgctctaaatcctactccagccaattcctcgacacctatgacgcccacaacatgtcagtggacactgtgtcctggaacccataccacaccaaggtcttcatgtcctgcagctccgactggacagtgaagatctgggaccacaccatcaagaccccgatgttcatctatgacctgaactcagccgtgggtgatgtggcctgggcgccatactcttctactgtgttcgcagcagtcaccacagatgggaaggaaaagaaggggcaggaggtgcagaagggtccagctgtggagattgcgaaactggacaaactgctgaacctggtgagggaagtgaaaatcaagacctgaggggctggcctcagtctctgtcccatcgcttgaatacagtactcctagggcttgaccctggtacccagcccagccttagcacccagcatgtgaccccactcctgatcaggtcccagcatcttcccttcttgttctgttccttaaggtcccagcaccttaccccaggacttggtcttcaaccaccattacccctctaactttgcacaaataaacctgtgtagaaaccc

SEQ ID NO: 9012 - DNA, 2487 bp, Homo sapiens
  source 1..2487: mol_type = unassigned DNA
ggtaaccgcgtcagggagttggattctatcctgcaagggcacggggacccacaacgacggctgtccctaaagaaccgttgcgactggtaactgaagtggaagagagtccagatttcttgtgtgtggtcaaggagacggacaaactttttgtcttcagacgagggagcgttttgtaggctctccaggggttgagatgattcctgcttctgcgaaggctccccataaacagcctcataagcaggatgaagattcagggactgaagtgggagaaggcacagatgaatgggcccaatccaaagccacagttagaccccctgaccagctggagttgaccgatgcggagttaaaggaggagttcactcggattttgacagccaacaacccacacgcaccccagaacattgtcaggtacagcttcaaagaaggcacatataagcctattggctttgtgaaccaactggcagttcactacacccaggttgggaacctgatccccaaagactcagatgaaggacggcggcagcattaccgcgatgaattagtggcaggttctcaggagtctgtcaaggtgatttcagaaacaggaaacctcgaagaagacgaagagcccaaggagttagaaactgagcctgggagtcaaacagatgtgcctgcagctggggcagctgaaaaagtgactgaagaagaattgatgactcctaagcagcccaaggagagaaagctcactaaccagttcaacttcagtgagagggcctcacagacctacaacaaccctgtccgggatcgagaatgccagacggagcctcctcccaggacaaacttttcagccacagccaatcagtgggagatctatgatgcctatgtagaggaacttgagaagcaggaaaagaccaaagagaaggagaaggcaaagaccccagtggctaaaaaatcagggaagatggccatgaggaagctgacatctatggagtctcagactgatgatctcatcaaattgtcccaagctgctaagatcatggagcggatggtcaaccagaatacatatgatgacattgctcaagattttaagtactatgacgatgctgctgatgaataccgggaccaggtgggtaccctgctgccgctctggaagttccaaaatgacaaagccaagcgcctgtccgtcactgccctctgctggaatccaaagtacagggatctgtttgcagtgggatatggctcttatgacttcatgaagcagagccggggcatgctgctgctctacagcctgaagaaccccagcttccctgagtacatgttcagcagcaacagcggcgtcatgtgtctcgacatccacgtggaccacccctacctggtggcagtaggccactatgacggcaacgtggccatttacaacctcaagaagccccactcccagccctccttctgcagctcagccaagtctggcaagcactcagaccctgtgtggcaggtcaagtggcagaaggatgacatggaccaaaaccttaacttcttctctgtgtcatctgacggcaggattgtgtcttggactctcgtgaagagaaagctggttcacatagatgtcatcaagctgaaggtggaaggcagcaccacggaagttcctgaggggttgcagctgcacccagtgggttgtggcactgcctttgacttccacaaagagattgactacatgttcctagtgggcacagaggagggaaaaatctacaagtgctctaaatcctactccagccaattcctcgacacctatgacgcccacaacatgtcagtggacactgtgtcctggaacccataccacaccaaggtcttcatgtcctgcagctccgactggacagtgaagatctgggaccacaccatcaagaccccgatgttcatctatgacctgaactcagccgtgggtgatgtggcctgggcgccatactcttctactgtgttcgcagcagtcaccacagatgggaaggcccacatatttgacttagccatcaacaagtatgaggccatctgcaaccagcctgtggcggccaaaaagaacaggctcacccacgtgcagttcaatctcatccaccccatcatcattgtgggcgatgaccgtgggcacatcatcagcctcaagctctcacccaatttgcgcaagatgccaaaggaaaagaaggggcaggaggtgcagaagggtccagctgtggagattgcgaaactggacaaactgctgaacctggtgagggaagtgaaaatcaagacctgaggggctggcctcagtctctgtcccatcgcttgaatacagtactcctagggcttgaccctggtacccagcccagccttagcacccagcatgtgaccccactcctgatcaggtcccagcatcttcccttcttgttctgttccttaaggtcccagcaccttaccccaggacttggtcttcaaccaccattacccctctaactttgcacaaataaacctgtgtagaaaccc

SEQ ID NO: 9013 - DNA, 1039 bp, Homo sapiens
  source 1..1039: mol_type = unassigned DNA
attctatcctgcaagggcacggggacccacaacgacggctgtccctaaagaaccgttgcgactggtaactgaagtggaagagagtccagatttcttgtgtgtggtcaaggagacggacaaactttttgtcttcagacgagggagcgttttgtaggctctccaggggttgagatgattcctgcttctgcgaaggctccccataaacagcctcataagcaggatgaagattcagggactgaagtgggagaaggcacagatgaatgggcccaatccaaagccacagttagaccccctgaccagctggagttgaccgatgcggagttaaaggaggagttcactcggattttgacagccaacaacccacacgcaccccagaacattgtcaggtacagcttcaaagaaggcacatataagcctattggctttgtgaaccaactggcagttcactacacccaggttgggaacctgatccccaaagactcagatgaaggacggcggcagcattaccgcgatgaattagtggcaggttctcaggagtctgtcaaggtgatttcagaaacaggaaacctcgaagaagacgaagagcccaaggagttagaaactgagcctgggagtcaaacagatgtgcctgcagctggggcagctgaaaaagtgactgaagaagaattgatgactcctaagcagcccaaggagagaaagctcactaaccagttcaacttcagtgagagggcctcacagacctacaacaaccctgtccgggatcgagaatgccagacggagcctcctcccaggacaaacttttcagccacagccaatcagtgggagatctatgatgcctatgtagaggaacttgagaagcaggaaaagaccaaagagaaggagaaggcaaagaccccagtggctaaaaaatcagggaagatggccatgaggaagctgacatctatggagtctcagactgatgatctcatcaaattgtcccaagctgctaagatcatggagcggatggtcaaccagaatacatatgatgacattgctcaag

SEQ ID NO: 9014 - DNA, 656 bp, Homo sapiens
  source 1..656: mol_type = unassigned DNA
gttgtggcactgcctttgacttccacaaagagattgactacatgttcctagtgggcacagaggagggaaaaatctacaagtgctctaaatcctactccagccaattcctcgacacctatgacgcccacaacatgtcagtggacactgtgtcctggaacccataccacaccaaggtcttcatgtcctgcagctccgactggacagtgaagatctgggaccacaccatcaagaccccgatgttcatctatgacctgaactcagccgtgggtgatgtggcctgggcgccatactcttctactgtgttcgcagcagtcaccacagatgggaaggaaaagaaggggcaggaggtgcagaagggtccagctgtggagattgcgaaactggacaaactgctgaacctggtgagggaagtgaaaatcaagacctgaggggctggcctcagtctctgtcccatcgcttgaatacagtactcctagggcttgaccctggtacccagcccagccttagcacccagcatgtgaccccactcctgatcaggtcccagcatcttcccttcttgttctgttccttaaggtcccagcaccttaccccaggacttggtcttcaaccaccattacccctctaactttgcacaaataaacctgtgtagaaaccca

SEQ ID NO: 9015 - DNA, 1325 bp, Homo sapiens
  source 1..1325: mol_type = unassigned DNA
gttgcgactggtaactgaagtggaagagagtccagatttcttgtgtgtggtcaaggagacggacaaactttttgtcttcagacgagggagcgttttgtaggctctccaggggttgagatgattcctgcttctgcgaaggctccccataaacagcctcataagcagagcatcagcataggcagaggaaccaggaagagagatgaagattcagggactgaagtgggagaaggcacagatgaatgggcccaatccaaagccacagttagaccccctgaccagctggagttgaccgatgcggagttaaaggaggagttcactcggattttgacagccaacaacccacacgcaccccagaacattgtcaggtacagcttcaaaaagcaatggagtctgggtttcattcctaaactgaagaggaagatcccagtcaactactggggacaagatgaaggtgaaatctcaaatgaaactgtaagggtaatttattccttgggaatcttcatcatgaaaatagttactattttattgaacattaatattgagcatttattatgtgtcagacactgtgttaataggttgtttttattatttttaatacttataattatcatgcaaattagatagtattagccttcttttatagatgaagaacttagggcttagagtggttaagcccaaagtcatgaagataagaagcagcagaataaagattcaaacccaactctgcctgcctccaaagaccatgctcttaaccactgcactgacttgtcttcccatacatctgagttactgaaagaagaagggctctgtggtgacttttaaatacagagcttcccaacctgtgtgatggcgatccttccagccctccaggggcagggagatctgtgcaactggaccccatgaactggtttcctctactgtgagtttaccgtagtgtgccatacaaacatagtttctatatggcttgaaaagggtttgcatatctgttttaaaagaaggaagagatctccggtctctaagtcaattttagtggttgcaagggtgctgatcaatgaggaggctatctgcaggaaccagactacaagctctgtgaaataagggattgtgtctactttttctcagctttatatcccaggcacctggaaaatacttggcacattgaggctgttcaaaaattatttcaagaatggatgaacaaaatgacctgggctgtaagcctaatcctgcttctcatttgctgtgtgacccggacaaatgccaacccatatcttttctggaattccatggtcctcttgtatggaactaggggattggggttgtctctg

SEQ ID NO: 9016 - DNA, 1992 bp, Homo sapiens
  source 1..1992: mol_type = unassigned DNA
ggtaaacgccgccgtttgaggagcaccggagccgcgaccgtggattgaacgcttccccagagacccagaagcagaaggagcggacccaggcagccggcaccatggagattgtgtacgtgtacgtcaagaagcgcagcgagttcgggaagcagtgcaatttctcggaccgccaggccgagctgaacatcgacatcatgcccaaccctgagctggccgagcagttcgtggagcggaacccagtggacacgggcatccagtgctcgatcagcatgtcggaacacgaggccaactcagagcggtttgagatggagacccggggagttaaccatgtcgaggggggctggcccaaggacgtgaaccccctggagctggagcagaccatccgtttccggaagaaagtggagaaagatgagaactacgttaacgccatcatgcagctcggctctggacccccaggaaatcaagagggctgccacacacctctcctggcaccccgatggcaacaggaagttggcagtggcatactcctgcttggattttcagcgggcacctgtgggcatgagcagcgattcatacatctgggacctggaaaaccccaacaagcctgaacttgctctgaagccatcgtctccactcgtgacgttggagttcaaccccaaagattcccacgtactcctgggtggctgctacaatggacagatagcctgctgggacacccgaaagggcagcctggtggcggagctatccaccattgagtccagccaccgagaccctgtgtatggcaccatctggctgcagtcgaagacgggcaccgagtgcttctcagcttccacggatgggcaggtcatgtggtgggacatccgaaagatgagcgagcccactgaagttgtgatcttggacatcaccaagaaggaacagttggaaaatgccttgggggccatctccctggagttcgaatctactttgcccaccaagttcatggtggggaccgagcagggcatcgtcatctcctgcaaccgcaaggccaagacgtcagctgaaaagattgtgtgcaccttcccgggccatcatggccccatctacgccctccagagaaaccccttctacccgaagaacttcctgacggttggcgactggacagcccgcatttggtctgaagacagccgggaatcgtccatcatgtggaccaagtaccacatggcttacctcactgatgctgcctggagccccgtgaggccgaccgttttctttaccaccaggatggacggaaccctggatatctgggacttcatgttcgagcagtgcgatcccaccctcagcttgaaggtgtgtgacgaggccctcttctgcctccgggtgcaggacaatgggtgtctcatcgcctgcggctcccagctggggacaaccaccctgctggaggtctcgcctgggctctctaccctccagaggaatgagaagaacgtagcctcttccatgtttgagcgtgagacccggcgagagaagatcctggaggccaggcaccgggagatgcggctgaaggagaaggcagcaaccaagtccagaagaagaccaggtggtggaggagggagaggaagcagcgggggaagaaggggatgaagaagtggaagaagacttagcctagaagtcagccttcgactgcggcgctatccctgtgtgccttcctttcccacctcttgaccctcaaccagacttgcatggccatggcagggcctcgggaagaccttcaggagtggggaagggtttctcctccatgatcgaccctcctcgtccacctacaaatcaggaacagaaagtctgtccactttgaaaatacctttccaggcagctccctgaccatttggacacattgccacgacaggagcctccaagtatgtgggaggggacgggcgggacgagcttggctgttctgctgcacctgaatgctttctgttatcctaattcttgtaaaattaaatgaatcgtaacaatgcc

SEQ ID NO: 9017 - DNA, 2278 bp, Homo sapiens
  source 1..2278: mol_type = unassigned DNA
caagcaaccggtaaacgccgccgtttgaggagcaccggagccgcgaccgtggattgaacgcttccccagagacccagaagcagaaggagcggacccaggcagccggcaccatggagattgtgtacgtgtacgtcaagaagcgcagcgagttcgggaagcagtgcaatttctcggaccgccaggccgagctgaacatcgacatcatgcccaaccctgagctggccgagcagttcgtggagcggaacccagtggacacgggcatccagtgctcgatcagcatgtcggaacacgaggccaactcagagcggtttgagatggagacccggggagttaaccatgtcgaggggggctggcccaaggacgtgaaccccctggagctggagcagaccatccgtttccggaagaaagtggagaaagatgagaactacgttaacgccatcatgcagctcggctctatcatggagcactgcatcaagcagaacaatgccattgacatctatgaagagtatttcaatgacgaggaggccatggaagtgatggaggaggacccttcagctaaaaccatcaatgtgttcagggacccccaggaaatcaagagggctgccacacacctctcctggcaccccgatggcaacaggaagttggcagtggcatactcctgcttggattttcagcgggcacctgtgggcatgagcagcgattcatacatctgggacctggaaaaccccaacaagcctgaacttgctctgaagccatcgtctccactcgtgacgttggagttcaaccccaaagattcccacgtactcctgggtggctgctacaatggacagatagcctgctgggacacccgaaagggcagcctggtggcggagctatccaccattgagtccagccaccgagaccctgtgtatggcaccatctggctgcagtcgaagacgggcaccgagtgcttctcagcttccacggatgggcaggtcatgtggtgggacatccgaaagatgagcgagcccactgaagttgtgatcttggacatcaccaagaaggaacagttggaaaatgccttgggggccatctccctggagttcgaatctactttgcccaccaagttcatggtggggaccgagcagggcatcgtcatctcctgcaaccgcaaggccaagacgtcagctgaaaagattgtgtgcaccttcccgggccatcatggccccatctacgccctccagagaaaccccttctacccgaagaacttcctgacggttggcgactggacagcccgcatttggtctgaagacagccgggaatcgtccatcatgtggaccaagtaccacatggcttacctcactgatgctgcctggagccccgtgaggccgaccgttttctttaccaccaggatggacggaaccctggatatctgggacttcatgttcgagcagtgcgatcccaccctcagcttgaaggtgtgtgacgaggccctcttctgcctccgggtgcaggacaatgggtgtctcatcgcctgcggctcccagctggggacaaccaccctgctggaggtctcgcctgggctctctaccctccagaggaatgagaagaacgtagcctcttccatgtttgagcgtgagacccggcgagagaagatcctggaggccaggcaccgggagatgcggctgaaggagaagggtaaggcggagggcagggatgaggagcagaccgatgaggagctggccgtagacctggaggcgctggtcagcaaggccgaggaggagttcttcgacatcatcttcgcagagctgaagaagaaggaggcagacgccataaagctgacgccagtgcctcagcaaccaagtccagaagaagaccaggtggtggaggagggagaggaagcagcgggggaagaaggggatgaagaagtggaagaagacttagcctagaagtcagccttcgactgcggcgctatccctgtgtgccttcctttcccacctcttgaccctcaaccagacttgcatggccatggcagggcctcgggaagaccttcaggagtggggaagggtttctcctccatgatcgaccctcctcgtccacctacaaatcaggaacagaaagtctgtccactttgaaaatacctttccaggcagctccctgaccatttggacacattgccacgacaggagcctccaagtatgtgggaggggacgggcgggacgagcttggctgttctgctgcacctgaatgctttctgttatcctaattcttgtaaaattaaatgaatcgtaacaatgcc

SEQ ID NO: 9018 - DNA, 2474 bp, Homo sapiens
  source 1..2474: mol_type = unassigned DNA
cctcccaatgtgctgggattacagttgtcagctaccgcgcctggccaaaatttttattgccctcctcagagagcaactgcaataactaaacagggtaatgcttagcatatagtcggcactcaggatttttttttaatgcggatgcagcttctggacaaattcctaggatctccccaccaccccttgcttcctgccccaaccagattgagaacctggagctgtcctggcaggacctgtggagatagggaaggggccggtggggtccctcaccccacaccctccctctgccccccagcagccggcaccatggagattgtgtacgtgtacgtcaagaagcgcagcgagttcgggaagcagtgcaatttctcggaccgccaggccgagctgaacatcgacatcatgcccaaccctgagctggccgagcagttcgtggagcggaacccagtggacacgggcatccagtgctcgatcagcatgtcggaacacgaggccaactcagagcggtttgagatggagacccggggagttaaccatgtcgaggggggctggcccaaggacgtgaaccccctggagctggagcagaccatccgtttccggaagaaagtggagaaagatgagaactacgttaacgccatcatgcagctcggctctatcatggagcactgcatcaagcagaacaatgccattgacatctatgaagagtatttcaatgacgaggaggccatggaagtgatggaggaggacccttcagctaaaaccatcaatgtgttcagggacccccaggaaatcaagagggctgccacacacctctcctggcaccccgatggcaacaggaagttggcagtggcatactcctgcttggattttcagcgggcacctgtgggcatgagcagcgattcatacatctgggacctggaaaaccccaacaagcctgaacttgctctgaagccatcgtctccactcgtgacgttggagttcaaccccaaagattcccacgtactcctgggtggctgctacaatggacagatagcctgctgggacacccgaaagggcagcctggtggcggagctatccaccattgagtccagccaccgagaccctgtgtatggcaccatctggctgcagtcgaagacgggcaccgagtgcttctcagcttccacggatgggcaggtcatgtggtgggacatccgaaagatgagcgagcccactgaagttgtgatcttggacatcaccaagaaggaacagttggaaaatgccttgggggccatctccctggagttcgaatctactttgcccaccaagttcatggtggggaccgagcagggcatcgtcatctcctgcaaccgcaaggccaagacgtcagctgaaaagattgtgtgcaccttcccgggccatcatggccccatctacgccctccagagaaaccccttctacccgaagaacttcctgacggttggcgactggacagcccgcatttggtctgaagacagccgggaatcgtccatcatgtggaccaagtaccacatggcttacctcactgatgctgcctggagccccgtgaggccgaccgttttctttaccaccaggatggacggaaccctggatatctgggacttcatgttcgagcagtgcgatcccaccctcagcttgaaggtgtgtgacgaggccctcttctgcctccgggtgcaggacaatgggtgtctcatcgcctgcggctcccagctggggacaaccaccctgctggaggtctcgcctgggctctctaccctccagaggaatgagaagaacgtagcctcttccatgtttgagcgtgagacccggcgagagaagatcctggaggccaggcaccgggagatgcggctgaaggagaagggtaaggcggagggcagggatgaggagcagaccgatgaggagctggccgtagacctggaggcgctggtcagcaaggccgaggaggagttcttcgacatcatcttcgcagagctgaagaagaaggaggcagacgccataaagctgacgccagtgcctcagcaaccaagtccagaagaagaccaggtggtggaggagggagaggaagcagcgggggaagaaggggatgaagaagtggaagaagacttagcctagaagtcagccttcgactgcggcgctatccctgtgtgccttcctttcccacctcttgaccctcaaccagacttgcatggccatggcagggcctcgggaagaccttcaggagtggggaagggtttctcctccatgatcgaccctcctcgtccacctacaaatcaggaacagaaagtctgtccactttgaaaatacctttccaggcagctccctgaccatttggacacattgccacgacaggagcctccaagtatgtgggaggggacgggcgggacgagcttggctgttctgctgcacctgaatgctttctgttatcctaattcttgtaaaattaaatgaatcgtaacaatgcc

SEQ ID NO: 9019 - DNA, 2312 bp, Homo sapiens
  source 1..2312: mol_type = unassigned DNA
aaccagagcagtgacagtagcaaccgccggaatggcgaaagcaacaacaatcaaagaagccttagcgagatgggaagctttcactgtctacaaactgcattgaaaaaattgccaacctgaatggcttaaaaaacttgaggatattatctttaggaagaaacaacataaagaacttaaatggactggaggcagtaggggacacattagaagaactgtggatctcctacaattttattgagaagttgaaagggatccacataatgaagaaattgaagattctctacatgtctaataacctggtaaaagactgggctgagtttgtgaagctggcagaactgccatgcctcgaagacctggtgtttgtaggcaatcccttggaagagaaacattctgctgagaataactggattgaagaagcaaccaagagagtgcccaaactgaaaaagctggatggtactccagtaattaaaggggatgaggaagaagacaactaatgccacgctttccactgtgtgttaacttatttaaatgtcataagaacaatagataaattttatataattgtctattttaaagattctgtatgggacaaaagtttcttaagataaaacagatcactcattctcatctttttttttcctttaacttattcagtgtttctccccaaaactggtaatgccaaccttatatatcctatttctctttttagaaaccacaaattttcgatttttgtcttcagtctcagttacgtactgtgtagccccatctactaaaacaaaacctttgtagaccagtcatttttaataacaaaggaacaaatgtttttttcagtttgttcattttttttaggttagacattttaaaagatgtacatttgaaaattcagaacatttttcctgaaggtctgtctctgtacaattcagaagcacatgcctttagctcagaaggcagcatggtgatgggaagagttcctcttagaaatacagcaggtccggaaccaagactccaaagttccattggaaaagatatggtgaaaaaaggaaaaagtagtatctcagagaccttctagtctatattatacttatttgtttttccaaaaatgtgcacattgtcaactggaatttaggttgtttttatatgcatggccacttgagtcattgtgtacagtcattctgtgatctcagttagtggttaaaatgactgtcatgatcatttctttgactgataatgtggcaatgttactcatgtggacctcgccttaagcacacattttggttttatagttccttatgtgtttaaagcattagttatatttgaattcctagactaaatgctggccattgatgtatgtcaaaatttaccctaattatttggtctggtgaccctcattgttgggaaaagtgactaccatggttataagtaagggtataatgaaacttagtatttcaaaatatattttttgagaagttctaagttaaacagctcttaaaatgtattatgtacgtggttgtggagggaagggagatgtttcattatgagatcccaggcaaatggcaatatgtttgaggattgtctcctacataaagcagtgtaggtgatttaacctcaaaattgcaaagcaatagttagatgcagaggttagaatttatcatgtaaacaaaaaatccttcaggaaaatgtaagacattgtagtcagtaagcagatgaggtcataggaggccatggctggatcactattagattgcagaaaagaagtcaggggccctctgccaaattgtgcctaaagtccctcagagactgttgattctggtttccccatctacttgtgtgattttacttgcataaaatcacagtgaaagagggaagaatcatctttaaaaagtgattgcataagtagtcctgggtttcagaagatttcagctatcatttacataggaattacttgatttttctaagttactctgatcaaaagggaccactgctttgacaatcaactctaaatacaaacaagaggccaggcgtggtggctcatgcctgtcatcccagcactttgggaggccgaggcgggcggatcatctgagatcaggagttcaagaccagcctgaccaacatggtgaaaccccgtctctactaaaaatacaaaaattagccagtcctggtggtgggcgcctgtagtcccaactactcgggaggctgaggcaggagaatcatttgaacccgggaggcggaggttgcagtgagccgagattgcgccattgcactccagcctgggcaatagagcgagactccatatttaaaaaaaaaaaaaaaaa

SEQ ID NO: 9020 - DNA, 617 bp, Homo sapiens
  source 1..617: mol_type = unassigned DNA
gctgggccttgattggttgagtcaagtgagctgattggttgattcaggcgaaagcaacaacaatcaaagaagccttagcgagatgggaagagaaaactggccagaggccatctgaagccaaagagataaaactttatgcccagattccccctatagagaagatggatgcatccttgtccatgcttgctaattgcgagaagctttcactgtctacaaactgcattgaaaaaattgccaacctgaatggcttaaaaaacttgaggatattatctttaggaagaaacaacataaagaacttaaatggactggaggcagtaggggacacattagaagaactgtggatctcctacaattttattgagaagttgaaagggatccacataatgaagaaattgaagattctctacatgtctaataacctggtaaaagactgggctgagtttgtgaagctggcagaactgccatgcctcgaagacctggtgtttgtaggcaatcccttggaagagaaacattctgctgagaataactggattgaagaagcaaccaagagagtgcccaaactgaaaaagctggatggtactccagtaattaaaggggatgaggaagaagacaactaa

SEQ ID NO: 9021 - DNA, 1166 bp, Homo sapiens
  source 1..1166: mol_type = unassigned DNA
gggccctagcaaccagagcagtgacagtagcaaccgccggaatggcgaaagcaacaacaatcaaagaagccttagcgagatgggaagagaaaactggccagaggccatctgaagccaaagagataaaactttatgcccagattccccctatagagaagatggatgcatccttgtccatgcttgctaattgcgagaagctttcactgtctacaaactgcattgaaaaaattgccaacctgaatggcttaaaaaacttgaggatattatctttaggaagaaacaacataaagaacttaaatggactggaggcagtaggggacacattagaagaactgtggatctcctacaattttattgagaagttgaaagggatccacataatgaagaaattgaagattctctacatgtctaataacctggtaaaagactgggctgagtttgtgaagctggcagaactgccatgcctcgaagacctggtgtttgtaggcaatcccttggaagagaaacattctgctgagaataactggattgaagaagcaaccaagagagtgcccaaactgaaaaagctggatggtactccagtaattaaaggggatgaggaagaagacaactaatgccacgctttccactgtgtgttaacttatttaaatgtcataagaacaatagataaattttatataattgtctattttaaagattctgtatgggacaaaagtttcttaagataaaacagatcactcattctcatctttttttttcctttaacttattcagtgtttctccccaaaactggtaatgccaaccttatatatcctatttctctttttagaaaccacaaattttcgatttttgtcttcagtctcagttacgtactgtgtagccccatctactaaaacaaaacctttgtagaccagtcatttttaataacaaaggaacaaatgtttttttcagtttgttcattttttttaggttagacattttaaaagatgtacatttgaaaattcagaacatttttcctgaaggtctgtctctgtacaattcagaagcacatgcctttagctcagaaggcagcatggtgatgggaagagttcctcttagaaatacagcaggtccggaaccaagactccaaagttccattggaaaagatatggtgaaaaaaggaaaaa

SEQ ID NO: 9022 - DNA, 526 bp, Homo sapiens
  source 1..526: mol_type = unassigned DNA
gcggccgccacgcagtcccacaatgccccgctcgcaccaccctgagggcggagagaaaggaccgctgccggggatagggcttccgccgagagcgccgagaagtgcgcacgcgcactgaccccgcgggccctagcaaccagagcagtgacagtagcaaccgccggaatggaagctttcactgtctacaaactgcattgaaaaaattgccaacctgaatggcttaaaaaacttgaggatattatctttaggaagaaacaacataaagaacttaaatggactggaggcagtaggggacacattagaagaactgtggatctcctacaattttattgagaagttgaaagggatccacataatgaagaaattgaagattctctacatgtctaataacctggtaaaagactgggctgagtttgtgaagctggcagaactgccatgcctcgaagacctggtgtttgtaggcaatcccttggaagagaaacattctgctgagaataactggattgaagaagcaaccaagagagtg

SEQ ID NO: 9023 - DNA, 632 bp, Homo sapiens
  source 1..632: mol_type = unassigned DNA
agcaaccgccggaatgctgggccttgattggttgagtcaagtgagctgattggttgattcaggcgaaagcaacaacaatcaaagaagccttagcgagatgggaagagaaaactggccagaggccatctgaagccaaagagataaaactttatgcccagattccccctatagagaagatggatgcatccttgtccatgcttgctaattgcgagaagctttcactgtctacaaactgcattgaaaaaattgccaacctgaatggcttaaaaaacttgaggatattatctttaggaagaaacaacataaagaacttaaatggactggaggcagtaggggacacattagaagaactgtggatctcctacaattttattgagaagttgaaagggatccacataatgaagaaattgaagattctctacatgtctaataacctggtaaaagactgggctgagtttgtgaagctggcagaactgccatgcctcgaagacctggtgtttgtaggcaatcccttggaagagaaacattctgctgagaataactggattgaagaagcaaccaagagagtgcccaaactgaaaaagctggatggtactccagtaattaaaggggatgaggaagaagacaactaa

SEQ ID NO: 9024 - DNA, 623 bp, Homo sapiens
  source 1..623: mol_type = unassigned DNA
gaccccgcgggccctagcaaccagagcagtgacagtagcaaccgccggaatgctgggccttgattggttgagtcaagtgagctgattggttgattcaggcgaaagcaacaacaatcaaagaagccttagcgagatgggaagagaaaactggccagaggccatctgaagccaaagagataaaactttatgcccagattccccctatagagaagatggatgcatccttgtccatgcttgctaattgcgactttcactgtctacaaactgcattgaaaaaattgccaacctgaatggcttaaaaaacttgaggatattatctttaggaagaaacaacataaagaacttaaatggactggaggcagtaggggacacattagaagaactgtggatctcctacaattttattgagaagttgaaagggatccacataatgaagaaattgaagattctctacatgtctaataacctggtaaaagactgggctgagtttgtgaagctggcagaactgccatgcctcgaagacctggtgtttgtaggcaatcccttggaagagaaacattctgctgagaataactggattgaagaagcaaccaagagagtgcccaaactgaaaaagctggatg

SEQ ID NO: 9025 - DNA, 502 bp, Homo sapiens
  source 1..502: mol_type = unassigned DNA
cagtgacagtagcaaccgccggaatgatggggtcttgctgtgttgtccaggctggtctcaaactcctggcctcaagtgatcctccagccttggcttcccatagtgctgggattgcaggcatgagccaccatgtccagcttgaagatataatattgtatctaggattttcaaatccatgttgaaaactgggccttgattggttgagtcaagtgagctgattggttgattcaggcgaaagcaacaacaatcaaagaagccttagcgagatgggaagagaaaactggccagaggccatctgaagccaaagagataaaactttatgcccagattccccctatagagaagatggatgcatccttgtccatgcttgctaattgcgagaagctttcactgtctacaaactgcattgaaaaaattgccaacctgaatggcttaaaaaacttgaggatattatctttaggaagaaacaacataaagaacttaaatggactggaggcagtag

SEQ ID NO: 9026 - DNA, 639 bp, Homo sapiens
  source 1..639: mol_type = unassigned DNA
gaagagaaaactggccagaggccatctgaagccaaagagataaaactttatgcccagattccccctatagagaagatggatgcatccttgtccatgcttgctaattgcgagaagctttcactgtctacaaactgcattgaaaaaattgccaacctgaatggcttaaaaaacttgaggatattatctttaggaagaaacaacataaagaacttaaatggactgagatggggtttcaccgtagtagccaggatggtctcgatctcctgacctcatgatccgcctgcctcggcctcccaaagtgctgggattacaggcgtgagccaccacacctgggcaaaatttgatatttgtgatgttctaaataaattggaggcagtaggggacacattagaagaactgtggatctcctacaattttattgagaagttgaaagggatccacataatgaagaaattgaagattctctacatgtctaataacctggtaaaagactgggctgagtttgtgaagctggcagaactgccatgcctcgaagacctggtgtttgtaggcaatcccttggaagagaaacattctgctgagaataactggattgaagaagcaaccaagagagtgcccaaactgaaaaagctggatggt

SEQ ID NO: 9027 - DNA, 2649 bp, Homo sapiens
  source 1..2649: mol_type = unassigned DNA
ggcggtttccatggtgacggcaaacaaggcccacactggacagggcagctgctgggttgctactctcgcctccgccatgattccgcccgcagactctttgctcaagtacgacaccccagtgctggtgagccggaacacggagaaacggagccccaaggctcggctactgaaagtcagcccccagcagcctggaccttcaggttcagccccacagccacccaagaccaagctcccctcaactccctgtgtcccagatcctacaaagcaggcagaagaaatcttgaatgccatactacccccaagggagtgggtggaagacacgcagctatggatccagcaggtgtccagcacccctagcaccaggatggacgtggtgcacctccaggagcagttagacttaaagctgcagcagcggcaggccagggaaacaggcatctgccctgtccgcagggaactctactcacagtgttttgatgagttgatccgggaggtcaccatcaactgtgcggagagggggctgctgctgctgcgagtccgggacgagatccgcatgaccatcgctgcctaccagaccctgtacgagagcagcgtggcgtttggcatgaggaaggcactgcaggctgagcaggggaagtcagacatggagaggaaaatcgcagaattggagacggaaaagagagacctggagaggcaagtgaacgagcagaaggcaaaatgtgaagccactgagaagcgggagagcgagaggcggcaggtggaggagaagaagcacaatgaggagattcagttcctgaagcgaacaaatcagcagctgaaggcccaactggaaggcattattgcaccaaagaagtgataatttccacatgattaatttccaacaagacacttgggagttatttactgtgttcctctggcagccaataaaatcatcataagccctttgtaataaaaagctagtttcctgagtgaacaagccataacctcccctaaacaccacctaggtatttgttagaagtcacactattactccaatgtcatcagacacctaaggtctgccagccaggctcctggctgggcaatggaagatggtgtggccctgttagtctccgtgtgtggcttactagccagccttgggaactgccaactcaaattctaagaaagccactgctttctcatcatcactctataccaatacttatttctggccaaatgaatctgcttctctgcccctcaaacttttagttcacaattcatcttctaccttaacttgggcttcttgggcctctggccttccttacttaatgtcttcttttccctactctaatgcatttctaactcactttggagctttggttttctaatgtattatccccacttgccagtcaactggaccccttcctcctcggtttcagactgcctacattaggaaacaatggcagtcaaacccatggctttggagaaagtaaatgtttgccagaaaggaatactagtcacagtggcctttgtgagttgtctgcaactcagctcttcccccagcacagatctgttccccttatcctgcagaaaatcaagccctgactctgcactccccgaagtagtgatgttaattaacaactgaagaggtaactaaatctcacatgcaggtctaatgactaataattggagtacggctgctagacaactgcattttagtatttctcttccattctcctggttttgtagacccagaagattgaatgagtgacataaatctttagttcggggcaagccagggtgggctagggtggtaagctggaggacttcatccttcagttaggctgcacaagtaacattacctaaaaggcactaacatgctcaggttccccagaaagaggcgtaagaagggcctctccttagcagagcttccacctgccatccgtcttgggttcagtgagcttcaaggctcacaatggaagcactgtcatttccccagaaaagctgtgttccctatgctgaacacaccatacacattctcatctggaatctaaggagcagcttttaccctgatccagtatcctgaggaattttaagcctccactcaaatgacctgcctgtgttgtcatttccatgggaaagaactctttccacgagatctgctagttccaggcctctaagacaggaacgtatgtgccataagtgggtctacttcacagactcaatgaggcagaaattattgtagttttctcctatttcttctgcacccaactttctccttgtatttcaaaggccaggccatgtacactaacgtccttgaaatttgcagttctgtatgcttctattccaaatcattcattaccaataaaaacgaaataccaccctttccattttatagacctcatcccctatttctgtcagacagttatatgacagggtgactgtggaacctcttagttcatccaaagtctacctgaagtgctagactttcagactcttatcactgaaatccttaaggttgaggaggctttatttccctagcactggtgaagggcttcaactgtcaaacctcagaacaaatgcattagggccttagaaatgtcaatggggcaggaagaaaacacaatttctaactgcctgtttttgtataatttaataaaaaccttttaaacatta

SEQ ID NO: 9028 - DNA, 1168 bp, Homo sapiens
  source 1..1168: mol_type = unassigned DNA
cgcagactctttgctcaagtacgacaccccagtgctggtgagccggaacacggagaaacggagccccaaggctcggctactgaaagtcagcccccagcagcctggaccttcaggttcagccccacagccacccaagaccaagctcccctcaactccctgtgtcccagatcctacaaagcaggcagaagaaatcttgaatgccatactacccccaagatgagttgatccgggaggtcaccatcaactgtgcggagagggggctgctgctgctgcgagtccgggacgagatccgcatgaccatcgctgcctaccagaccctgtacgagagcagcgtggcgtttggcatgaggaaggcactgcaggctgagcaggggaagtcagacatggagaggaaaatcgcagaattggagacggaaaagagagacctggagaggcaagtgaacgagcagaaggcaaaatgtgaagccactgagaagcgggagagcgagaggcggcaggtggaggagaagaagcacaatgaggagattcagttcctgaagcgaacaaatcagcagctgaaggcccaactggaaggcattattgcaccaaagaagtgataatttccacatgattaatttccaacaagacacttgggagttatttactgtgttcctctggcagccaataaaatcatcataagccctttgtaataaaaagctagtttcctgagtgaacaagccataacctcccctaaacaccacctaggtatttgttagaagtcacactattactccaatgtcatcagacacctaaggtctgccagccaggctcctggctgggcaatggaagatggtgtggccctgttagtctccgtgtgtggcttactagccagccttgggaactgccaactcaaattctaagaaagccactgctttctcatcatcactctataccaatacttatttctggccaaatgaatctgcttctctgcccctcaaacttttagttcacaattcatcttctaccttaacttgggcttcttgggcctctggccttccttacttaatgtcttcttttccctactctaatgcatttctaactcactttggagctttggttttctaatgtattatccccacttgccagtcaactggaccccttcctcctcggtttcagactgcctacatta

SEQ ID NO: 9029 - DNA, 14333 bp, Homo sapiens
  source 1..14333: mol_type = unassigned DNA
ctggcagtggctgcctttagggcggagccggctcccgctctcctcagtctgcggtgggctagcggacggtccggcttccggcggccgtttctgtctcttgctggctgtctcgctgagtcgcggccgccttctcatcgctcctggaaggtcccgagcgcgacaccatgtcggagcccgggggcggcggcggcgaggacggctcggccggattggaagtgtcggccgtgcagaatgtggcggacgtgtcggtgctgcagaagcacctgcgcaagctggtgccgctgctgctggaggacggcggcgaggcgccggccgcgctggaggcggcgctggaggagaagagcgccctggagcagatgcgcaagttcctttcggacccgcaggtccacacggtgctggtggagcgctccacgctcaaagaggacgtcggtgatgaaggagaagaagaaaaagaattcatttcctataacatcaacatagacattcattatggggttaaatccaatagcttggcattcattaaacgtactcccgtgattgatgcagataaacccgtgtcttctcagctccgggtccttacactcagtgaagactcgccctacgaaactttgcattctttcattagcaatgcagtggctcctttttttaagtcctacattagagagtctggcaaggcagacagggatggtgataaaatggctccttcagttgaaaagaagattgcagaactcgaaatgggactccttcacttgcagcaaaatattgaaattccggagatcagcctgccgattcatccaatgatcacaaatgttgcaaaacagtgttatgagcgtggagaaaagccaaaagttacagactttggtgataaggttgaagacccaacatttcttaatcagttacaatctggagttaaccgctggatccgagaaattcaaaaagtgaccaaactggatcgagatcctgcatcaggaactgccttacaggaaattagtttttggctaaacttggaacgtgcgttataccgcatccaggagaaacgggagagcccggaagttctcctgactctggatatcttgaaacatggcaagcgcttccatgccaccgtcagttttgacactgacacaggtctaaaacaggctttggaaactgtgaatgactacaatcctctgatgaaagatttccctctgaatgatttgctgtctgccacggagctggacaaaataagacaggcgcttgttgccattttcacacatttgagaaagatccgaaacacaaaatatcctattcagagggcactgcgtttggtggaggcaatttcaagagacttgagttctcaattactcaaagtattgggcactaggaaattgatgcatgttgcttatgaagaatttgaaaaagttatggtagcatgctttgaagtttttcagacttgggatgatgagtatgagaaacttcaggtattgttgagagacatcgtcaaaagaaaaagggaagaaaatctgaagatggtgtggcgtatcaaccctgcccacaggaagctgcaggcccgccttgaccagatgagaaaatttagacgccagcatgaacagctaagagctgttatcgtcagggtcctgaggccacaggtcacggcagttgcacaacagaatcaaggagaggtccctgaaccccaagatatgaaagtggctgaggttctctttgatgctgcagatgcaaatgccattgaggaagtaaaccttgcttatgagaacgtcaaggaagtggatggactggatgtttccaaagagggcacggaagcctgggaggctgctatgaagaggtacgatgagaggatcgacagagtggagacccggatcaccgctcgccttcgggatcagcttggcacagccaagaatgccaacgagatgtttaggattttctccaggtttaatgcactgtttgtcaggcctcacatccgtggggccattcgcgaataccagacccagctgatccagcgcgtgaaagatgacattgagtctcttcacgacaagttcaaggtccagtacccacagagtcaggcttgtaagatgagtcacgttcgtgacttgccccctgtgtcagggtctatcatctgggctaaacagatcgacaggcagctgacggcctacatgaagcgggtggaagatgtccttggcaagggctgggagaatcacgtggaggggcagaagctgaagcaggatggagacagcttccgcatgaagctcaacacgcaggagatctttgatgactgggcaaggaaggtgcagcagcgcaacctcggtgtctcggggcgcattttcaccatcgaaagtactcgggttcggggccgaactggaaatgtgcttaagctgaaagttaactttcttcctgagattatcacactatccaaagaagtccggaacctcaaatggcttggtttccgcgtcccactggcgattgtgaacaaagcccatcaagcaaaccagctttacccgtttgccatctcactgatcgagagcgttcgtacctatgaacggacctgcgagaaggtggaggagcggaacaccatttcccttttggtggctggcttgaaaaaggaagtgcaggccctgatcgcagaaggcattgcgttggtgtgggagtcctacaaacttgacccatatgtacagcgcttagcagagactgtcttcaacttccaagaaaaggtggatgatctgctgatcattgaagaaaaaatagacctagaagtccgttccttggaaacttgtatgtatgaccataagacattctcggaaatcttgaacagagtccagaaagcagtggatgacttaaatctgcactcctattccaatttgcccatctgggtcaacaagcttgacatggagattgaaagaatattgggcgtccgtctgcaagctggcctgagagcttggacgcaggttcttcttggacaagctgaagataaagcagaagttgacatggacacagatgctccacaagttagtcacaagcctggtggagagccaaagatcaaaaatgtcgttcatgagctaagaataaccaatcaggtaatctacttgaatccaccaattgaagagtgcagatacaagctgtatcaggaaatgtttgcctggaagatggttgtactgtctctccccaggatccagagtcagaggtaccaggtgggtgtacattacgaattgactgaggaagagaaattctatcggaatgctttaacacggatgcctgatggccctgttgccctggaagagtcgtattctgctgtcatgggcattgtatctgaagttgaacagtatgtcaaggtttggcttcagtatcagtgtttatgggatatgcaagctgaaaacatctataacagacttggagaagatctcaacaaatggcaggctctcctggtccaaataaggaaggccagaggaacctttgacaatgcagaaaccaagaaagagtttggaccagtagttatagattatggcaaggtacaatctaaggtgaacttgaaatatgactcttggcataaggaggttcttagcaaatttgggcagatgctaggatcaaacatgacggaattccattcccagatctcaaagtcccgccaagagttggagcagcactcagtagacacggccagcacctccgatgcagtgaccttcatcacctatgtgcagtctttgaaacggaagatcaagcagtttgagaagcaagttgagctctaccgcaatggccagcgcttactggaaaagcaaaggttccagttcccaccttcctggctttatattgacaacatcgagggagagtggggagccttcaatgacatcatgcggcgaaaggactctgccattcagcagcaggtggcaaacctgcaaatgaagattgtccaggaggatcgggccgtggaaagccgcaccaccgacctgctgactgactgggagaagaccaagcctgtcacgggcaaccttcgcccagaagaggcacttcaggctctcaccatatatgaggggaagtttggtaggctgaaggacgacagagagaagtgtgcaaaggccaaggaggcgctggaattgacagatactgggcttctcagtggcagtgaagagcgcgtgcaggtggccttagaagaattacaggacctcaaaggcgtttggtcagaactttctaaggtttgggagcaaatcgatcagatgaaggagcaaccctgggtttcagtacagcctcgaaagcttcgacaaaatttggatgccctcctgaaccagctgaaaagcttccctgcccggttgcgacagtatgcgtcctatgagtttgttcagaggcttctgaaaggttacatgaagataaatatgctggtgattgaactgaaatccgaagcacttaaagaccgccattggaaacagctcatgaaaaggcttcacgttaattgggttgtttctgagctaacccttggccaaatctgggatgttgacttgcagaaaaatgaagcgattgtcaaggatgtactgcttgtggcacaaggggagatggctttggaagaatttttgaagcagataagagaagtgtggaatacttatgaactagacttggttaattatcagaacaagtgccgcttgatccgtggctgggatgacctcttcaacaaggtcaaagaacacatcaacagcgtctcggccatgaagctctctccgtattacaaggtttttgaagaggatgctctcagctgggaagataagctgaacaggatcatggctctctttgatgtgtggattgatgtgcagaggcggtgggtctacctggaaggtatcttcacaggcagtgcagatatcaagcacctgctgccagtggaaacccagcggtttcagagcatcagcactgagtttttggctctaatgaaaaaagtgtccaagtctccccttgttatggatgttctgaacatccagggagtacagaggtctctggaaagattggcagacctgctaggaaagatccagaaagcattgggagaatatctggaaagagagcggtcatctttccccaggttctattttgtgggtgatgaagatttgcttgaaatcattggaaacagcaagaatgtcgctaaattacagaaacacttcaagaagatgtttgctggagtttcgagcatcatcctgaacgaggataactctgttgttttgggtatttcatctcgggaaggagaggaggttatgtttaaaactcctgtgtcaattactgaacatcccaaaatcaatgagtggctcacattggtagaaaaggagatgagagtcaccctggccaaactgcttgctgagtctgttacggaagttgagatttttggtaaagcaacttcaattgacccaaatacctacatcacttggattgataaataccaggcccagcttgtggttttgtcagcccagatagcctggtctgagaacgtggagaccgcactgagcagcatgggcggaggtggagatgccgcgcccttgcactctgtgctgagcaatgtggaggtcaccctcaatgtgttagcagactctgtcctcatggagcagcccccactccgaaggcggaagctagaacacttgattacagagttggttcaccagagagatgttacaaggtccttgatcaaaagcaagattgacaacgccaaatcttttgaatggctcagccagatgcgattttactttgaccctaagcaaactgatgtgttacagcagttgtcaattcaaatggcaaatgccaaatttaactatggctttgagtacctgggtgttcaggacaaactggtccagacccccctcactgaccgctgctatttgacaatgacacaagccttggaggccaggctggggggttccccatttggacctgctggaactgggaaaacagagtctgtcaaagctcttggccatcagcttggacggtttgttttagttttcaactgtgatgaaacctttgatttccaggcaatgggccggatctttgtgggcctttgccaggtgggtgcctggggctgctttgacgagttcaaccgcctggaggagcggatgctctcggctgtgtcccagcaggtgcagtgcatacaggaagcactgcgtgaacattccaaccccaactacgacaagacctctgcccccattacttgtgagctgctgaacaaacaagtcaaggtgagcccggacatggccatcttcatcaccatgaaccctggctacgcgggccggtctaaccttcctgacaacttgaagaagctgttccggagcttggccatgaccaagcccgaccggcagttaatcgcccaggtcatgctgtactcacagggtttccgcactgctgaagtgcttgccaacaaaatcgtcccgttttttaaactatgcgatgagcagctctcttcccaaagccattatgacttcggtcttcgggctttgaagagtgtgctggtgagtgcaggcaatgtgaagagagagagaatccagaagataaagagggagaaagaggaacgaggggaagcagttgatgaaggagaaattgctgaaaatctccctgaacaagagattctgatacagagcgtctgtgagacgatggtgccaaagctggtggcagaggacatcccgctgctcttcagcctcctgtcggacgtgttccctggagtccagtatcacaggggtgagatgactgcccttcgagaggagctgaagaaagtgtgtcaggagatgtatttgacatatggagatggagaagaagttggtggaatgtgggttgaaaaggttctccagctctatcagatcacccagatcaatcatggcctgatgatggtggggccctcgggaagtgggaagagcatggcctggcgtgtcctgctgaaggcattggagagactcgagggtgtggaaggtgtggcccatatcatcgaccccaaggccatcagcaaagaccacctctacggaaccctggaccccaacaccagggaatggacagatgggctcttcacacacgtgctgagaaagatcatcgacagcgtgagaggcgagctgcagaagcgccagtggatcgtcttcgatggcgatgtggatccagagtgggttgagaacttgaactcagtgctggatgacaataagctcctaactttgcccaatggagagcgcctcagtcttccacccaatgtgagaataatgtttgaggtacaggacttgaaatacgcgaccttggccacagtgtcgcgctgcggcatggtctggttcagtgaggatgtgctgagcaccgacatgatcttcaacaacttcctggccaggctgcgcagcatcccgctggatgaaggggaggatgaggcacagcggcggcgtaagggcaaagaggatgagggggaggaggccgcttcccccatgctgcagatccaaagagatgcagctacgatcatgcaaccgtacttcacgtccaacggcctggtcaccaaggcgctagagcacgccttccagctggagcacatcatggacctaacacgcctgcgctgcctgggctcgctcttctccatgctgcaccaggcctgccgcaacgtggcgcagtataacgccaaccatcccgacttccccatgcagatcgagcagctggagcgctacattcagcgatatctggtttatgccatactctggtccctgtctggagacagccggctaaaaatgagagcagagctgggtgaatacatcagaagaatcacgaccgtgcctctgcccactgcgcccaacatacccattatcgattatgaggtgtccatcagcggagaatggtctccgtggcaggccaaggtgcctcagattgaagtggagacgcacaaggtggcagcccctgatgtcgtcgtgccaacgctggacacagtccgccacgaagccctcttgtacacttggctggccgaacacaagcccctggtcttgtgtggccctcctgggtctggcaagaccatgacactcttcagcgccctccgggccttgcctgacatggaggtggtgggtctcaacttctccagtgctactactccagagctgcttctgaagacttttgatcactactgcgagtacaggcgcacacctaatggggtggttttggctcctgttcaacttggaaagtggctggtgttgttctgtgatgaaatcaacttgccagatatggataaatatgggacccagagggtcatatccttcatcagacagatggtggagcacggaggcttttaccgtacctcagatcaaacatgggtgaagctggagagaatccagtttgttggggcttgtaatccccccacagaccctggaagaaagcccctctcacacaggttcctgcgccacgtgcctgtcgtgtatgtggattacccgggccccgcctccctcacacagatctacggcaccttcaaccgcgccatgctgaggctcattccatccctgcggacgtatgcagagccgctcactgctgccatggtggagttctacaccatgtctcaggagagattcacccaggatacacaacctcactatatctattcaccccgtgaaatgactaggtgggtgagaggcatctttgaagcgctgagacctctggagaccctgcctgttgaaggcctcattcggatttgggcacatgaagctctgcgtctcttccaagatagactcgtagaggatgaggagaggcgttggactgatgagaacatcgacacggttgctctgaagcacttccctaacatcgacagagagaaggcaatgagccgacccatcttgtacagcaactggctgtcaaaggattacatcccagtagaccaagaagagttaagagattatgtcaaagctaggctgaaggtcttttatgaagaagaacttgatgttccgctggtgctgtttaatgaagtcctagaccacgtgctgaggattgacagaatattccgtcaacctcaaggccacttgcttctgattggtgttagtggagcaggaaaaactaccctgtctcgtttcgtcgcctggatgaacggtttgagtgtgtaccagattaaggtccataggaagtacacaggggaagactttgatgaagatctacggacagtgttgagacgttctggctgtaaaaatgaaaagatagcatttataatggatgaatctaatgtgttagattctggattcctggagcgaatgaatacccttctggccaatggagaggtgcctggtctctttgaaggagacgagtatgccaccttgatgacgcagtgcaaagagggggcacagaaggaaggcctgatgctggactcgcacgaggagctctacaagtggttcactagccaggttatccgcaacctccacgtcgtgttcaccatgaacccgtcctcggagggactcaaggaccgggcagctacatcaccagcacttttcaacaggtgtgtgttgaattggtttggagactggtccaccgaagcactgtatcaggttggcaaagaattcacaagtaagatggatctggagaagccaaattacatcgtgcctgattacatgccagttgtgtatgataagctgccgcagccaccatcccatcgggaagccattgtgaacagctgtgtgtttgttcatcagactcttcaccaggcgaatgctcggctagcaaagcgaggcggcagaacgatggccatcacccctcgccactacctggacttcatcaatcactatgccaacctgttccacgagaagcggagcgagctggaggagcagcagatgcacttgaacgtggggctcaggaagatcaaagagacagtcgaccaggtagaagaactgcgtcgtgacttgaggataaagagccaagagctggaggtgaagaatgcagcagccaatgacaagctgaaaaagatggtgaaagaccagcaggaggctgaaaagaagaaggttatgagccaagaaatccaggaacagctgcataagcagcaggaggtaattgcagacaaacagatgagtgtcaaagaagatcttgataaggtggaacctgccgtcattgaggcccagaatgctgtgaagtcgatcaagaagcagcacctggtggaggtgaggtccatggccaaccctcctgctgctgtgaagctggcgctggagtccatctgcctgctgctgggggaaagcaccacagactggaagcagatccgctccatcatcatgcgggagaacttcatccccaccatcgtcaacttctctgcagaggagatcagtgacgccataagggagaagatgaagaaaaattacatgtccaatccaagttacaattatgaaattgtgaatcgggcttccctggcttgcggccctatggtgaaatgggcaattgcacagcttaactatgcagacatgttaaagagagtggagcccctacgcaatgagctgcagaagctggaagatgacgccaaggacaaccagcagaaggccaacgaggtggagcagatgatccgagacctggaagccagcatcgcccgctacaaggaggaatacgccgtcctgatctcagaggcccaggccatcaaggcagacctggcagctgtcgaggcaaaagtaaaccggagcactgctcttctgaagagcttgtctgctgaacgtgaacgatgggaaaaaacaagtgaaactttcaaaaaccagatgtccaccattgctggggactgtctcttgtcagctgcgttcattgcctacgcgggttactttgaccagcagatgcgtcagaacttgttcactacctggtcccatcacctacagcaagccaacatccagttccgtacagatattgccaggacggaatacctttccaatgctgatgagcgtcttcgctggcaggccagctccttgcctgctgatgacctttgcacagaaaatgccatcatgctgaaacgattcaataggtatccgctgatcattgacccctctggacaggccacagaattcattatgaatgaatataaggatcgtaagatcacacggaccagcttcctggatgacgccttcagaaagaacttagagagtgcactgagattcggtaacccccttctggtccaggatgtggaaagctacgatccagttttgaacccggtgctgaaccgtgaagtgcggcgaacaggggggagagtgctgatcactctcggggaccaggacatagacctgtcgccatcgtttgtcatcttcctgtccacccgggatccaactgtcgagttcccaccagatctctgttcccgggttacttttgtaaacttcacagttacccgtagcagtttacaaagccagtgtctaaatgaagtacttaaagcagaaagacctgatgtggacgagaaacgatctgatcttcttaaacttcaaggggaatttcagctccgtttgcgtcagctggaaaaatctctactacaagctctgaacgaggtgaaagggcgcattttggatgacgacacgatcataaccactctggagaacctgaagagagaggctgcagaggtcaccaggaaagttgaggagacggacattgtcatgcaggaggtggagaccgtgtcccagcagtacctcccgctctccaccgcctgcagcagcatctacttcaccatggagtccctcaagcagatacacttcttgtaccagtactccctccagtttttcctggacatttatcacaacgtcctatacgagaacccgaacctgaagggtgtcaccgaccacacacagcgcctgtccattataacaaaggacctcttccaggtggcgtttaaccgagtggctcgaggcatgctgcatcaggaccacattacctttgccatgctgctggcaagaatcaaactgaagggcaccgtgggggagcccacctacgatgcagaattccagcacttcttgagaggaaatgagattgtcctgagtgctggctccacccccaggatccagggcctgactgtggagcaggcggaggcggtggtgaggctgagctgccttcccgcgtttaaggacttgattgcaaaggttcaggcagacgagcaatttggcatctggctggacagcagctccccggagcagactgtgccctacctctggagtgaagaaacacctgcaacacccattggccaggccatccaccgcctgctcctgatccaggctttccggcccgatcgcctgttggccatggcccacatgtttgtttcaacaaaccttggggagtctttcatgtccatcatggagcagccgctcgacctgacccacattgtgggcacagaggtgaagcccaacactcctgtcttaatgtgctctgtgcctggttatgatgccagtggacatgtcgaggaccttgcagccgagcagaacacgcagatcacttcaattgcaatcggctctgcagaaggctttaaccaagcagataaggcaataaacaccgctgtaaagtcgggcaggtgggtgatgctgaagaatgtgcatctggccccagggtggctgatgcagctggagaagaagttgcattccctgcagccgcatgcctgcttccgactcttcctcaccatggagatcaaccccaaggtgcctgtgaatctgctccgtgcgggccgcatctttgtgttcgagccaccgccaggggtgaaggccaacatgctgaggacgttcagcagcattcccgtctcacggatatgcaagtctcccaacgagcgtgcccgcttgtacttcctgctggcctggtttcatgcgatcatccaagaacgcttacgatacgcaccactggggtggtcaaagaagtatgaatttggagagtctgacctgcggtcagcttgcgatacggtggacacgtggctggatgacacggccaagggcaggcagaacatctcaccggataagatcccgtggtctgcactaaagaccttaatggcccagtccatttatggcgggcgcgtggacaacgagtttgaccagcgtctgctcaacaccttcctggagcgcctgttcacaaccaggagtttcgacagtgagtttaagctggcatgcaaggtcgacggacataaagacattcaaatgccagatggcatcaggcgagaggagtttgtgcagtgggtggagttgctccccgacacccagacgccctcctggctgggcctgcccaacaacgccgagagagtcctccttaccacacagggtgtggacatgatcagtaaaatgctgaagatgcagatgttggaggatgaggacgacctggcctacgcagagactgagaagaagacgaggacagactccacgtccgacgggcgccctgcctggatgcggacactgcacaccaccgcgtccaactggctgcacctcatcccccagacgctgagccacctcaagcgcaccgtggagaatatcaaggatcctttgttcaggttctttgagagagaagtgaagatgggcgcaaagctgcttcaggacgttcgccaggaccttgcagatgtcgtccaggtgtgcgaaggaaagaagaagcagaccaactacttgcgcacgctgatcaacgagctagtgaaagggatcttgcctcggagctggtcccactacacggtgcctgccggcatgaccgtcatccagtgggtgtccgacttcagcgagaggatcaaacagctgcagaacatctcactggcagctgcatctggtggcgccaaggagctaaagaacatccacgtgtgcctgggtggcctgttcgtgcctgaggcgtacatcactgccaccaggcagtatgtggcccaggccaacagctggtccctggaggagctctgcctggaagtcaacgtcaccacctcacagggcgccacccttgacgcttgcagcttcggagtcacgggtttgaaacttcaaggggccacgtgcaacaacaacaagctgtcactgtccaatgccatctcaaccgcccttcccctgacgcagctgcgctgggtcaagcagacaaacaccgagaagaaggccagtgtggtaaccttacctgtctacctgaacttcacccgtgcagacctcatcttcaccgtggacttcgaaattgctacaaaggaggatcctcgcagcttctacgagcggggtgtcgcagtcttgtgcacagagtaaacttttctagctgcccctttctgtaatagtgaaagttggtatttaacatttattcatttttaaaatatttggaaggtctgagcttgtgaaaagaaagtggttggtctgaggttggaggaagctgaatggaatctgacggttgggagtggtggaaattggaaggataccaggaggtatttgggaaggccaatggcgtggctcctttgaggaaataaaacactaagcatg

SEQ ID NO: 9030 - DNA, 2587 bp, Homo sapiens
  source 1..2587: mol_type = unassigned DNA
cttctcgatcgtgtcagtttgtaaggcgagggcggaagttggattcctggcctgagaatattaggcgtagttttccagtttttggcaaagcggaaatacttaaggcccctgggttgactgggttctttgttttatctaccggcttctgctttacgacaggtcacaaacatgtcagacaaaagtgaattaaaggctgagttggaacgtaagaagcagcgactggcccaaatcagagaggaaaagaagagaaaagaagaagaaaggaaaaaaaaagaaacagaccagaagaaggaagctgttgctcctgtgcaagaagaatcagatcttgaaaaaaaaaggagagaagctgaagcattgcttcaaagcatggggctaactccagaatcccccattgtccctcctcctatgtctccatcctccaaatctgtgagcactccaagtgaagctggaagccaagactctggagatggcgccgtgggatctaggacgctgcattgggatacagatccatcagttcttcagcttcactcagattccgatttgggacgaggacctattaaacttggaatggctaaaatcacgcaagtcgactttcctcctcgagaaattgtcacgtatacaaaggaaactcagactccagttatggctcaacccaaagaagatgaagaggaagatgatgatgtagtggctcctaaaccacctattgaacctgaagaagagaaaactttaaagaaagatgaggaaaatgatagtaaagctccccctcatgagctgactgaagaagaaaagcaacaaatcttgcactctgaggaatttttaagtttctttgaccattctacaagaattgtagaaagagctctttctgagcagattaacatcttctttgactatagtgggagagatttggaagacaaagaaggagagattcaagcaggtgctaaactgtcattaaatcgacaattttttgacgaacgttggtcaaagcatcgggtggttagttgtttggattggtcatctcagtatccggagttactcgtggcttcctataacaacaatgaagatgcccctcatgagcctgatggtgtggcccttgtatggaatatgaaatacaaaaaaactaccccagagtatgtgtttcactgccagtcagctgtgatgtctgccacatttgcaaaatttcatccaaatcttgttgttggtggtacatattcaggccaaattgtgctttgggataaccgtagcaataaaagaactccagtgcaaagaactccactgtcagcagctgcacacacacaccctgtatattgtgtaaatgttgttggaacacaaaatgctcacaatctgattagcatctctactgatggaaaaatttgttcatggagtctggacatgctttcccatccacaggatagcatggagttggttcataaacagtcaaaagcagtagctgtgacatctatgtccttccctgttggagatgtcaacaactttgttgttgggagtgaagaaggttctgtgtacacagcatgccgccatggcagcaaagctggaatcagtgagatgtttgaggggcatcaaggaccaatcactggcatccattgtcatgcagctgttggagcagtagacttctcacatctttttgtcacttcatcgtttgactggacagtaaagctttggacaactaagaataacaagcctttgtattcatttgaagataatgcagactatgtttatgatgttatgtggtcacctacccacccagccctgtttgcctgtgtggatggcatggggagattggatttgtggaatctcaataatgacacagaggtaccaactgccagcatttctgtggagggtaatcctgctcttaatcgtgtgagatggacccattctggcagagagattgctgtgggtgattctgaaggacagattgttatatacgatgtgggagagcagattgctgttccccgcaatgatgaatgggcacggtttggccgaacacttgcagaaattaatgcaaaccgagctgatgcagaggaggaagcagctacccgaatacctgcttagttcctgaaaaggggagtgtaactagtggatttgggaaaggttcttaagtagatcctgagactatttgcatgcttctgtctaaatgataattaaaaggaaatttcatggattaaaccatgggtttaatgcagcaaggaaacttacaatgtccctttatatataacatgcatcttgttttggatttgtgtcattttttaatatagctgattgacttcacagaaagcagcttttttgaattctaatacataggtgtatatttggtattagttattttgagttcttttcaacttataacactgtatacagttatttctaaagcacagatgaaataagttctgcatatttttaaataatcacagttccctgttatacagataatgttctcactacccataatatgtaggaacattgtttctccttagccgtagtatgcatacacctatccatgttcattctgacatcctttgttgtctttataattcatgtggtagttacctataaataaaaacaaatatgcgtt

SEQ ID NO: 9031 - DNA, 2589 bp, Homo sapiens
  source 1..2589: mol_type = unassigned DNA
aattcccagaacgcactgctcgtcgcacgcaggttttccttgttgccggggtttgtagttcttctcgatcgtgtcagtttgtaaggcgagggcggaagttggattcctggcctgagaatattaggcgtagttttccagtttttggcaaagcggaaatacttaaggcccctgggttgactgggttctttgttttatctaccggcttctgctttacgacaggtcacaaacatgtcagacaaaagtgaattaaaggctgagttggaacgtaagaagcagcgactggcccaaatcagagaggaaaagaagagaaaagaagaagaaaggaaaaaaaaagaaacagaccagaagaaggaagctgttgctcctgtgcaagaagaatcagatcttgaaaaaaaaaggagagaagctgaagcattgcttcaaagcatggggctaactccagaatcccccattgtccctcctcctatgtctccatcctccaaatctgtgagcactccaagtgaagctggaagccaagactctggagatggcgccgtgggatctagacgaggacctattaaacttggaatggctaaaatcacgcaagtcgactttcctcctcgagaaattgtcacgtatacaaaggaaactcagactccagttatggctcaacccaaagaagatgaagaggaagatgatgatgtagtggctcctaaaccacctattgaacctgaagaagagaaaactttaaagaaagatgaggaaaatgatagtaaagctccccctcatgagctgactgaagaagaaaagcaacaaatcttgcactctgaggaatttttaagtttctttgaccattctacaagaattgtagaaagagctctttctgagcagattaacatcttctttgactatagtgggagagatttggaagacaaagaaggagagattcaagcaggtgctaaactgtcattaaatcgacaattttttgacgaacgttggtcaaagcatcgggtggttagttgtttggattggtcatctcagtatccggagttactcgtggcttcctataacaacaatgaagatgcccctcatgagcctgatggtgtggcccttgtatggaatatgaaatacaaaaaaactaccccagagtatgtgtttcactgccagtcagctgtgatgtctgccacatttgcaaaatttcatccaaatcttgttgttggtggtacatattcaggccaaattgtgctttgggataaccgtagcaataaaagaactccagtgcaaagaactccactgtcagcagctgcacacacacaccctgtatattgtgtaaatgttgttggaacacaaaatgctcacaatctgattagcatctctactgatggaaaaatttgttcatggagtctggacatgctttcccatccacaggatagcatggagttggttcataaacagtcaaaagcagtagctgtgacatctatgtccttccctgttggagatgtcaacaactttgttgttgggagtgaagaaggttctgtgtacacagcatgccgccatggcagcaaagctggaatcagtgagatgtttgaggggcatcaaggaccaatcactggcatccattgtcatgcagctgttggagcagtagacttctcacatctttttgtcacttcatcgtttgactggacagtaaagctttggacaactaagaataacaagcctttgtattcatttgaagataatgcagactatgtttatgatgttatgtggtcacctacccacccagccctgtttgcctgtgtggatggcatggggagattggatttgtggaatctcaataatgacacagaggtaccaactgccagcatttctgtggagggtaatcctgctcttaatcgtgtgagatggacccattctggcagagagattgctgtgggtgattctgaaggacagattgttatatacgatgtgggagagcagattgctgttccccgcaatgatgaatgggcacggtttggccgaacacttgcagaaattaatgcaaaccgagctgatgcagaggaggaagcagctacccgaatacctgcttagttcctgaaaaggggagtgtaactagtggatttgggaaaggttcttaagtagatcctgagactatttgcatgcttctgtctaaatgataattaaaaggaaatttcatggattaaaccatgggtttaatgcagcaaggaaacttacaatgtccctttatatataacatgcatcttgttttggatttgtgtcattttttaatatagctgattgacttcacagaaagcagcttttttgaattctaatacataggtgtatatttggtattagttattttgagttcttttcaacttataacactgtatacagttatttctaaagcacagatgaaataagttctgcatatttttaaataatcacagttccctgttatacagataatgttctcactacccataatatgtaggaacattgtttctccttagccgtagtatgcatacacctatccatgttcattctgacatcctttgttgtctttataattcatgtggtagttacctataaataaaaacaaatatgcgttaa

SEQ ID NO: 9032 - DNA, 2211 bp, Homo sapiens
  source 1..2211: mol_type = unassigned DNA
agttggtgttgggggcttaggcgagggacgttaccgggaagttgcaggcgggaggactcttccccatccagtcacctgacaggtcacaaacatgtcagacaaaagtgaattaaaggctgagttggaacgtaagaagcagcgactggcccaaatcagagaggaaaagaagagaaaagaagaagaaaggaaaaaaaaagaaacagaccagaagaaggaagctgttgctcctgtgcaagaagaatcagatcttgaaaaaaaaaggagagaagctgaagcattgcttcaaagcatggggctaactccagaatcccccattgctgagcaacctctccgtgtagtaacagcggatacctgtctatttcactatttagtccctcctcctatgtctccatcctccaaatctgtgagcactccaagtgaagctggaagccaagactctggagatggcgccgtgggatctagacgaggacctattaaacttggaatggctaaaatcacgcaagtcgactttcctcctcgagaaattgtcacgtatacaaaggaaactcagactccagttatggctcaacccaaagaagatgaagaggaagatgatgatgtagtggctcctaaaccacctattgaacctgaagaagagaaaactttaaagaaagatgaggaaaatgatagtaaagctccccctcatgagctgactgaagaagaaaagcaacaaatcttgcactctgaggaatttttaagtttctttgaccattctacaagaattgtagaaagagctctttctgagcagattaacatcttctttgactatagtgggagagatttggaagacaaagaaggagagattcaagcaggtgctaaactgtcattaaatcgacaattttttgacgaacgttggtcaaagcatcgggtggttagttgtttggattggtcatctcagtatccggagttactcgtggcttcctataacaacaatgaagatgcccctcatgagcctgatggtgtggcccttgtatggaatatgaaatacaaaaaaactaccccagagtatgtgtttcactgccagtcagctgtgatgtctgccacatttgcaaaatttcatccaaatcttgttgttggtggtacatattcaggccaaattgtgctttgggataaccgtagcaataaaagaactccagtgcaaagaactccactgtcagcagctgcacacacacaccctgtatattgtgtaaatgttgttggaacacaaaatgctcacaatctgattagcatctctactgatggaaaaatttgttcatggagtctggacatgctttcccatccacaggatagcatggagttggttcataaacagtcaaaagcagtagctgtgacatctatgtccttccctgttggagatgtcaacaactttgttgttgggagtgaagaaggttctgtgtacacagcatgccgccatggcagcaaagctggaatcagtgagatgtttgaggggcatcaaggaccaatcactggcatccattgtcatgcagctgttggagcagtagacttctcacatctttttgtcacttcatcgtttgactggacagtaaagctttggacaactaagaataacaagcctttgtattcatttgaagataatgcagactatgtttatgatgttatgtggtcacctacccacccagccctgtttgcctgtgtggatggcatggggagattggatttgtggaatctcaataatgacacagaggtaccaactgccagcatttctgtggagggtaatcctgctcttaatcgtgtgagatggacccattctggcagagagattgctgtgggtgattctgaaggacagattgttatatacgatgtgggagagcagattgctgttccccgcaatgatgaatgggcacggtttggccgaacacttgcagaaattaatgcaaaccgagctgatgcagaggaggaagcagctacccgaatacctgcttagttcctgaaaaggggagtgtaactagtggatttgggaaaggttcttaagtagatcctgagactatttgcatgcttctgtctaaatgataattaaaaggaaatttcatggattaaaccatgggtttaatgcagcaaggaaacttacaatgtccctttatatataacatgcatcttgttttggatttgtgtcattttttaatatagctgattgacttcacagaaagcagc

SEQ ID NO: 9033 - DNA, 2604 bp, Homo sapiens
  source 1..2604: mol_type = unassigned DNA
ttctcgatcgtgtcagtttgtaaggcgagggcggaagttggattcctggcctgagaatattaggcgtagttttccagtttttggcaaagcggaaatacttaaggcccctgggttgactgggttctttgttttatctaccggcttctgctttacgacaggtcacaaacatgtcagacaaaagtgaattaaaggctgagttggaacgtaagaagcagcgactggcccaaatcagagaggaaaagaagagaaaagaagaagaaaggaaaaaaaaagaaacagaccagaagaaggaagctgttgctcctgtgcaagaagaatcagatcttgaaaaaaaaaggagagaagctgaagcattgcttcaaagcatggggctaactccagaatcccccattgttttttctgaatactgggtccctcctcctatgtctccatcctccaaatctgtgagcactccaagtgaagctggaagccaagactctggagatggcgccgtgggatctaggacgctgcattgggatacagatccatcagttcttcagcttcactcagattccgatttgggacgaggacctattaaacttggaatggctaaaatcacgcaagtcgactttcctcctcgagaaattgtcacgtatacaaaggaaactcagactccagttatggctcaacccaaagaagatgaagaggaagatgatgatgtagtggctcctaaaccacctattgaacctgaagaagagaaaactttaaagaaagatgaggaaaatgatagtaaagctccccctcatgagctgactgaagaagaaaagcaacaaatcttgcactctgaggaatttttaagtttctttgaccattctacaagaattgtagaaagagctctttctgagcagattaacatcttctttgactatagtgggagagatttggaagacaaagaaggagagattcaagcaggtgctaaactgtcattaaatcgacaattttttgacgaacgttggtcaaagcatcgggtggttagttgtttggattggtcatctcagtatccggagttactcgtggcttcctataacaacaatgaagatgcccctcatgagcctgatggtgtggcccttgtatggaatatgaaatacaaaaaaactaccccagagtatgtgtttcactgccagtcagctgtgatgtctgccacatttgcaaaatttcatccaaatcttgttgttggtggtacatattcaggccaaattgtgctttgggataaccgtagcaataaaagaactccagtgcaaagaactccactgtcagcagctgcacacacacaccctgtatattgtgtaaatgttgttggaacacaaaatgctcacaatctgattagcatctctactgatggaaaaatttgttcatggagtctggacatgctttcccatccacaggatagcatggagttggttcataaacagtcaaaagcagtagctgtgacatctatgtccttccctgttggagatgtcaacaactttgttgttgggagtgaagaaggttctgtgtacacagcatgccgccatggcagcaaagctggaatcagtgagatgtttgaggggcatcaaggaccaatcactggcatccattgtcatgcagctgttggagcagtagacttctcacatctttttgtcacttcatcgtttgactggacagtaaagctttggacaactaagaataacaagcctttgtattcatttgaagataatgcagactatgtttatgatgttatgtggtcacctacccacccagccctgtttgcctgtgtggatggcatggggagattggatttgtggaatctcaataatgacacagaggtaccaactgccagcatttctgtggagggtaatcctgctcttaatcgtgtgagatggacccattctggcagagagattgctgtgggtgattctgaaggacagattgttatatacgatgtgggagagcagattgctgttccccgcaatgatgaatgggcacggtttggccgaacacttgcagaaattaatgcaaaccgagctgatgcagaggaggaagcagctacccgaatacctgcttagttcctgaaaaggggagtgtaactagtggatttgggaaaggttcttaagtagatcctgagactatttgcatgcttctgtctaaatgataattaaaaggaaatttcatggattaaaccatgggtttaatgcagcaaggaaacttacaatgtccctttatatataacatgcatcttgttttggatttgtgtcattttttaatatagctgattgacttcacagaaagcagcttttttgaattctaatacataggtgtatatttggtattagttattttgagttcttttcaacttataacactgtatacagttatttctaaagcacagatgaaataagttctgcatatttttaaataatcacagttccctgttatacagataatgttctcactacccataatatgtaggaacattgtttctccttagccgtagtatgcatacacctatccatgttcattctgacatcctttgttgtctttataattcatgtggtagttacctataaataaaaacaaatatgcgtt

SEQ ID NO: 9034 - DNA, 2572 bp, Homo sapiens
  source 1..2572: mol_type = unassigned DNA
ttttatttctgggagcgacctcgttctggtgaggctatttgtccctaagctctcgccgtagcagccgccgcccatccctctttgtgtgctttggaaagccgcggagctggtggtggctacagttggtgttgggggcttaggcgagggacgttaccgggaagttgcaggcgggaggactcttccccatccagtcacctgacaggtcacaaacatgtcagacaaaagtgaattaaaggctgagttggaacgtaagaagcagcgactggcccaaatcagagaggaaaagaagagaaaagaagaagaaaggaaaaaaaaagaaacagaccagaagaaggaagctgttgctcctgtgcaagaagaatcagatcttgaaaaaaaaaggagagaagctgaagcattgcttcaaagcatggggctaactccagaatcccccattgtccctcctcctatgtctccatcctccaaatctgtgagcactccaagtgaagctggaagccaagactctggagatggcgccgtgggatctagacgaggacctattaaacttggaatggctaaaatcacgcaagtcgactttcctcctcgagaaattgtcacgtatacaaaggaaactcagactccagttatggctcaacccaaagaagatgaagaggaagatgatgatgtagtggctcctaaaccacctattgaacctgaagaagagaaaactttaaagaaagatgaggaaaatgatagtaaagctccccctcatgagctgactgaagaagaaaagcaacaaatcttgcactctgaggaatttttaagtttctttgaccattctacaagaattgtagaaagagctctttctgagcagattaacatcttctttgactatagtgggagagatttggaagacaaagaaggagagattcaagcaggtgctaaactgtcattaaatcgacaattttttgacgaacgttggtcaaagcatcgggtggttagttgtttggattggtcatctcagtatccggagttactcgtggcttcctataacaacaatgaagatgcccctcatgagcctgatggtgtggcccttgtatggaatatgaaatacaaaaaaactaccccagagtatgtgtttcactgccagtcagctgtgatgtctgccacatttgcaaaatttcatccaaatcttgttgttggtggtacatattcaggccaaattgtgctttgggataaccgtagcaataaaagaactccagtgcaaagaactccactgtcagcagctgcacacacacaccctgtatattgtgtaaatgttgttggaacacaaaatgctcacaatctgattagcatctctactgatggaaaaatttgttcatggagtctggacatgctttcccatccacaggatagcatggagttggttcataaacagtcaaaagcagtagctgtgacatctatgtccttccctgttggagatgtcaacaactttgttgttgggagtgaagaaggttctgtgtacacagcatgccgccatggcagcaaagctggaatcagtgagatgtttgaggggcatcaaggaccaatcactggcatccattgtcatgcagctgttggagcagtagacttctcacatctttttgtcacttcatcgtttgactggacagtaaagctttggacaactaagaataacaagcctttgtattcatttgaagataatgcagactatgtttatgatgttatgtggtcacctacccacccagccctgtttgcctgtgtggatggcatggggagattggatttgtggaatctcaataatgacacagaggtaccaactgccagcatttctgtggagggtaatcctgctcttaatcgtgtgagatggacccattctggcagagagattgctgtgggtgattctgaaggacagattgttatatacgatgtgggagagcagattgctgttccccgcaatgatgaatgggcacggtttggccgaacacttgcagaaattaatgcaaaccgagctgatgcagaggaggaagcagctacccgaatacctgcttagttcctgaaaaggggagtgtaactagtggatttgggaaaggttcttaagtagatcctgagactatttgcatgcttctgtctaaatgataattaaaaggaaatttcatggattaaaccatgggtttaatgcagcaaggaaacttacaatgtccctttatatataacatgcatcttgttttggatttgtgtcattttttaatatagctgattgacttcacagaaagcagcttttttgaattctaatacataggtgtatatttggtattagttattttgagttcttttcaacttataacactgtatacagttatttctaaagcacagatgaaataagttctgcatatttttaaataatcacagttccctgttatacagataatgttctcactacccataatatgtaggaacattgtttctccttagccgtagtatgcatacacctatccatgttcattctgacatcctttgttgtctttataattcatgtggtagttacctataaataaaaacaaatatgcgttaa

SEQ ID NO: 9035 - DNA, 2196 bp, Homo sapiens
  source 1..2196: mol_type = unassigned DNA
atttgtccctaagctctcgccgtagcagccgccgcccatccctctttgtgtgctttggaaagccgcggagctggtggtggctacagttggtgttgggggcttaggcgagggacgttaccgggaagttgcaggcgggaggactcttccccatccagtcacctgacaggtcacaaacatgtcagacaaaagtgaattaaaggctgagttggaacgtaagaagcagcgactggcccaaatcagagaggaaaagaagagaaaagaagaagaaaggaaaaaaaaagaaacagaccagaagaaggaagctgttgctcctgtgcaagaagaatcagatcttgaaaaaaaaaggagagaagctgaagcattgcttcaaagcatggggctaactccagaatcccccattgtccctcctcctatgtctccatcctccaaatctgtgagcactccaagtgaagctggaagccaagactctggagatggcgccgtgggatctaggacgctgcattgggatacagatccatcagttcttcagcttcactcagattccgatttgggacgaggacctattaaacttggaatggctaaaatcacgcaagtcgactttcctcctcgagaaattgtcacgtatacaaaggaaactcagactccagttatggctcaacccaaagaagatgaagaggaagatgatgatgtagtggctcctaaaccacctattgaacctgaagaagagaaaactttaaagaaagatgaggaaaatgatagtaaagctccccctcatgagctgactgaagaagaaaagcaacaaatcttgcactctgaggaatttttaagtttctttgaccattctacaagaattgtagaaagagctctttctgagcagattaacatcttctttgactatagtgggagagatttggaagacaaagaaggagagattcaagcaggtgctaaactgtcattaaatcgacaattttttgacgaacgttggtcaaagcatcgggtggttagttgtttggattggtcatctcagtatccggagttactcgtggcttcctataacaacaatgaagatgcccctcatgagcctgatggtgtggcccttgtatggaatatgaaatacaaaaaaactaccccagagtatgtgtttcactgccagtcagctgtgatgtctgccacatttgcaaaatttcatccaaatcttgttgttggtggtacatattcaggccaaattgtgctttgggataaccgtagcaataaaagaactccagtgcaaagaactccactgtcagcagctgcacacacacaccctgtatattgtgtaaatgttgttggaacacaaaatgctcacaatctgattagcatctctactgatggaaaaatttgttcatggagtctggacatgctttcccatccacaggatagcatggagttggttcataaacagtcaaaagcagtagctgtgacatctatgtccttccctgttggagatgtcaacaactttgttgttgggagtgaagaaggttctgtgtacacagcatgccgccatggcagcaaagctggaatcagtgagatgtttgaggggcatcaaggaccaatcactggcatccattgtcatgcagctgttggagcagtagacttctcacatctttttgtcacttcatcgtttgactggacagtaaagctttggacaactaagaataacaagcctttgtattcatttgaagataatgcagactatgtttatgatgttatgtggtcacctacccacccagccctgtttgcctgtgtggatggcatggggagattggatttgtggaatctcaataatgacacagaggtaccaactgccagcatttctgtggagggtaatcctgctcttaatcgtgtgagatggacccattctggcagagagattgctgtgggtgattctgaaggacagattgttatatacgatgtgggagagcagattgctgttccccgcaatgatgaatgggcacggtttggccgaacacttgcagaaattaatgcaaaccgagctgatgcagaggaggaagcagctacccgaatacctgcttagttcctgaaaaggggagtgtaactagtggatttgggaaaggttcttaagtagatcctgagactatttgcatgcttctgtctaaatgataattaaaaggaaatttcatggattaaaccatgggt

SEQ ID NO: 9036 - DNA, 2552 bp, Homo sapiens
  source 1..2552: mol_type = unassigned DNA
agctggtggtggctacagttggtgttgggggcttaggcgagggacgttaccgggaagttgcaggcgggaggactcttccccatccagtcacctgacaggtcacaaacatgtcagacaaaagtgaattaaaggctgagttggaacgtaagaagcagcgactggcccaaatcagagaggaaaagaagagaaaagaagaagaaaggaaaaaaaaagaaacagaccagaagaaggaagctgttgctcctgtgcaagaagaatcagatcttgaaaaaaaaaggagagaagctgaagcattgcttcaaagcatggggctaactccagaatcccccattgttttttctgaatactgggtccctcctcctatgtctccatcctccaaatctgtgagcactccaagtgaagctggaagccaagactctggagatggcgccgtgggatctaggacgctgcattgggatacagatccatcagttcttcagcttcactcagattccgatttgggacgaggacctattaaacttggaatggctaaaatcacgcaagtcgactttcctcctcgagaaattgtcacgtatacaaaggaaactcagactccagttatggctcaacccaaagaagatgaagaggaagatgatgatgtagtggctcctaaaccacctattgaacctgaagaagagaaaactttaaagaaagatgaggaaaatgatagtaaagctccccctcatgagctgactgaagaagaaaagcaacaaatcttgcactctgaggaatttttaagtttctttgaccattctacaagaattgtagaaagagctctttctgagcagattaacatcttctttgactatagtgggagagatttggaagacaaagaaggagagattcaagcaggtgctaaactgtcattaaatcgacaattttttgacgaacgttggtcaaagcatcgggtggttagttgtttggattggtcatctcagtatccggagttactcgtggcttcctataacaacaatgaagatgcccctcatgagcctgatggtgtggcccttgtatggaatatgaaatacaaaaaaactaccccagagtatgtgtttcactgccagtcagctgtgatgtctgccacatttgcaaaatttcatccaaatcttgttgttggtggtacatattcaggccaaattgtgctttgggataaccgtagcaataaaagaactccagtgcaaagaactccactgtcagcagctgcacacacacaccctgtatattgtgtaaatgttgttggaacacaaaatgctcacaatctgattagcatctctactgatggaaaaatttgttcatggagtctggacatgctttcccatccacaggatagcatggagttggttcataaacagtcaaaagcagtagctgtgacatctatgtccttccctgttggagatgtcaacaactttgttgttgggagtgaagaaggttctgtgtacacagcatgccgccatggcagcaaagctggaatcagtgagatgtttgaggggcatcaaggaccaatcactggcatccattgtcatgcagctgttggagcagtagacttctcacatctttttgtcacttcatcgtttgactggacagtaaagctttggacaactaagaataacaagcctttgtattcatttgaagataatgcagactatgtttatgatgttatgtggtcacctacccacccagccctgtttgcctgtgtggatggcatggggagattggatttgtggaatctcaataatgacacagaggtaccaactgccagcatttctgtggagggtaatcctgctcttaatcgtgtgagatggacccattctggcagagagattgctgtgggtgattctgaaggacagattgttatatacgatgtgggagagattgctgttccccgcaatgatgaatgggcacggtttggccgaacacttgcagaaattaatgcaaaccgagctgatgcagaggaggaagcagctacccgaatacctgcttagttcctgaaaaggggagtgtaactagtggatttgggaaaggttcttaagtagatcctgagactatttgcatgcttctgtctaaatgataattaaaaggaaatttcatggattaaaccatgggtttaatgcagcaaggaaacttacaatgtccctttatatataacatgcatcttgttttggatttgtgtcattttttaatatagctgattgacttcacagaaagcagcttttttgaattctaatacataggtgtatatttggtattagttattttgagttcttttcaacttataacactgtatacagttatttctaaagcacagatgaaataagttctgcatatttttaaataatcacagttccctgttatacagataatgttctcactacccataatatgtaggaacattgtttctccttagccgtagtatgcatacacctatccatgttcattctgacatcctttgttgtctttataattcatgtggtagttacctataaataaaaacaaatatgcgttaacttttcaaa

SEQ ID NO: 9037 - DNA, 2583 bp, Homo sapiens
  source 1..2583: mol_type = unassigned DNA
catccctctttgtgtgctttggaaagccgcggagctggtggtggctacagttggtgttgggggcttaggcgagggacgttaccgggaagttgcaggcgggaggactcttccccatccagtcacctgacaggtcacaaacatgtcagacaaaagtgaattaaaggctgagttggaacgtaagaagcagcgactggcccaaatcagagaggaaaagaagagaaaagaagaagaaaggaaaaaaaaagaaacagaccagaagaaggaagctgttgctcctgtgcaagaagaatcagatcttgaaaaaaaaaggagagaagctgaagcattgcttcaaagcatggggctaactccagaatcccccattgttttttctgaatactgggtccctcctcctatgtctccatcctccaaatctgtgagcactccaagtgaagctggaagccaagactctggagatggcgccgtgggatctaggacgctgcattgggatacagatccatcagttcttcagcttcactcagattccgatttgggacgaggacctattaaacttggaatggctaaaatcacgcaagtcgactttcctcctcgagaaattgtcacgtatacaaaggaaactcagactccagttatggctcaacccaaagaagatgaagaggaagatgatgatgtagtggctcctaaaccacctattgaacctgaagaagagaaaactttaaagaaagatgaggaaaatgatagtaaagctccccctcatgagctgactgaagaagaaaagcaacaaatcttgcactctgaggaatttttaagtttctttgaccattctacaagaattgtagaaagagctctttctgagcagattaacatcttctttgactatagtgggagagatttggaagacaaagaaggagagattcaagcaggtgctaaactgtcattaaatcgacaattttttgacgaacgttggtcaaagcatcgggtggttagttgtttggattggtcatctcagtatccggagttactcgtggcttcctataacaacaatgaagatgcccctcatgagcctgatggtgtggcccttgtatggaatatgaaatacaaaaaaactaccccagagtatgtgtttcactgccagtcagctgtgatgtctgccacatttgcaaaatttcatccaaatcttgttgttggtggtacatattcaggccaaattgtgctttgggataaccgtagcaataaaagaactccagtgcaaagaactccactgtcagcagctgcacacacacaccctgtatattgtgtaaatgttgttggaacacaaaatgctcacaatctgattagcatctctactgatggaaaaatttgttcatggagtctggacatgctttcccatccacaggatagcatggagttggttcataaacagtcaaaagcagtagctgtgacatctatgtccttccctgttggagatgtcaacaactttgttgttgggagtgaagaaggttctgtgtacacagcatgccgccatggcagcaaagctggaatcagtgagatgtttgaggggcatcaaggaccaatcactggcatccattgtcatgcagctgttggagcagtagacttctcacatctttttgtcacttcatcgtttgactggacagtaaagctttggacaactaagaataacaagcctttgtattcatttgaagataatgcagactatgtttatgatgttatgtggtcacctacccacccagccctgtttgcctgtgtggatggcatggggagattggatttgtggaatctcaataatgacacagaggtaccaactgccagcatttctgtggagggtaatcctgctcttaatcgtgtgagatggacccattctggcagagagattgctgtgggtgattctgaaggacagattgttatatacgatgtgggagagcagattgctgttccccgcaatgatgaatgggcacggtttggccgaacacttgcagaaattaatgcaaaccgagctgatgcagaggaggaagcagctacccgaatacctgcttagttcctgaaaaggggagtgtaactagtggatttgggaaaggttcttaagtagatcctgagactatttgcatgcttctgtctaaatgataattaaaaggaaatttcatggattaaaccatgggtttaatgcagcaaggaaacttacaatgtccctttatatataacatgcatcttgttttggatttgtgtcattttttaatatagctgattgacttcacagaaagcagcttttttgaattctaatacataggtgtatatttggtattagttattttgagttcttttcaacttataacactgtatacagttatttctaaagcacagatgaaataagttctgcatatttttaaataatcacagttccctgttatacagataatgttctcactacccataatatgtaggaacattgtttctccttagccgtagtatgcatacacctatccatgttcattctgacatcctttgttgtctttataattcatgtggtagttacctataaataaaaacaaatatgcgttaactttt

SEQ ID NO: 9038 - DNA, 2494 bp, Homo sapiens
  source 1..2494: mol_type = unassigned DNA
cggaagttggattcctggcctgagaatattaggcgtagttttccagtttttggcaaagcggaaatacttaaggcccctgggttgactgggttctttgttttatctaccggcttctgctttacgacaggtcacaaacatgtcagacaaaagtgaattaaaggctgagttggaacgtaagaagcagcgactggcccaaatcagagaggaaaagaagagaaaagaagaagaaaggaaaaaaaaagaaacagaccagaagaaggaagctgttgctcctgtgcaagaagaatcagatcttgaaaaaaaaaggagagaagctgaagcattgcttcaaagcatggggctaactccagaatcccccattgtccctcctcctatgtctccatcctccaaatctgtgagcactccaagtgaagctggaagccaagactctggagatggcgccgtgggatctagacgaggacctattaaacttggaatggctaaaatcacgcaagtcgactttcctcctcgagaaattgtcacgtatacaaaggaaactcagactccagttatggctcaacccaaagaagatgaagaggaagatgatgatgtagtggctcctaaaccacctattgaacctgaagaagagaaaactttaaagaaagatgaggaaaatgatagtaaagctccccctcatgagctgactgaagaagaaaagcaacaaatcttgcactctgaggaatttttaagtttctttgaccattctacaagaattgtagaaagagctctttctgagcagattaacatcttctttgactatagtgggagagatttggaagacaaagaaggagagattcaagcaggtgctaaactgtcattaaatcgacaattttttgacgaacgttggtcaaagcatcgggtggttagttgtttggattggtcatctcagtatccggagttactcgtggcttcctataacaacaatgaagatgcccctcatgagcctgatggtgtggcccttgtatggaatatgaaatacaaaaaaactaccccagagtatgtgtttcactgccagtcagctgtgatgtctgccacatttgcaaaatttcatccaaatcttgttgttggtggtacatattcaggccaaattgtgctttgggataaccgtagcaataaaagaactccagtgcaaagaactccactgtcagcagctgcacacacacaccctgtatattgtgtaaatgttgttggaacacaaaatgctcacaatctgattagcatctctactgatggaaaaatttgttcatggagtctggacatgctttcccatccacaggatagcatggagttggttcataaacagtcaaaagcagtagctgtgacatctatgtccttccctgttggagatgtcaacaactttgttgttgggagtgaagaaggttctgtgtacacagcatgccgccatggcagcaaagctggaatcagtgagatgtttgaggggcatcaaggaccaatcactggcatccattgtcatgcagctgttggagcagtagacttctcacatctttttgtcacttcatcgtttgactggacagtaaagctttggacaactaagaataacaagcctttgtattcatttgaagataatgcagactatgtttatgatgttatgtggtcacctacccacccagccctgtttgcctgtgtggatggcatggggagattggatttgtggaatctcaataatgacacagaggtaccaactgccagcatttctgtggagggtaatcctgctcttaatcgtgtgagatggacccattctggcagagagattgctgtgggtgattctgaaggacagattgttatatacgatgtgggagagattgctgttccccgcaatgatgaatgggcacggtttggccgaacacttgcagaaattaatgcaaaccgagctgatgcagaggaggaagcagctacccgaatacctgcttagttcctgaaaaggggagtgtaactagtggatttgggaaaggttcttaagtagatcctgagactatttgcatgcttctgtctaaatgataattaaaaggaaatttcatggattaaaccatgggtttaatgcagcaaggaaacttacaatgtccctttatatataacatgcatcttgttttggatttgtgtcattttttaatatagctgattgacttcacagaaagcagcttttttgaattctaatacataggtgtatatttggtattagttattttgagttcttttcaacttataacactgtatacagttatttctaaagcacagatgaaataagttctgcatatttttaaataatcacagttccctgttatacagataatgttctcactacccataatatgtaggaacattgtttctccttagccgtagtatgcatacacctatccatgttcattctgacatcctttgttgtctttataattcatgtggtagttacctataaataaaaacaaatatgcgttaa

SEQ ID NO: 9039 - DNA, 2605 bp, Homo sapiens
  source 1..2605: mol_type = unassigned DNA
cttctcgatcgtgtcagtttgtaaggcgagggcggaagttggattcctggcctgagaatattaggcgtagttttccagtttttggcaaagcggaaatacttaaggcccctgggttgactgggttctttgttttatctaccggcttctgctttacgacaggtcacaaacatgtcagacaaaagtgaattaaaggctgagttggaacgtaagaagcagcgactggcccaaatcagagaggaaaagaagagaaaagaagaagaaaggaaaaaaaaagaaacagaccagaagaaggaagctgttgctcctgtgcaagaagaatcagatcttgaaaaaaaaaggagagaagctgaagcattgcttcaaagcatggggctaactccagaatcccccattgacatagctgagtatttagtccctcctcctatgtctccatcctccaaatctgtgagcactccaagtgaagctggaagccaagactctggagatggcgccgtgggatctaggacgctgcattgggatacagatccatcagttcttcagcttcactcagattccgatttgggacgaggacctattaaacttggaatggctaaaatcacgcaagtcgactttcctcctcgagaaattgtcacgtatacaaaggaaactcagactccagttatggctcaacccaaagaagatgaagaggaagatgatgatgtagtggctcctaaaccacctattgaacctgaagaagagaaaactttaaagaaagatgaggaaaatgatagtaaagctccccctcatgagctgactgaagaagaaaagcaacaaatcttgcactctgaggaatttttaagtttctttgaccattctacaagaattgtagaaagagctctttctgagcagattaacatcttctttgactatagtgggagagatttggaagacaaagaaggagagattcaagcaggtgctaaactgtcattaaatcgacaattttttgacgaacgttggtcaaagcatcgggtggttagttgtttggattggtcatctcagtatccggagttactcgtggcttcctataacaacaatgaagatgcccctcatgagcctgatggtgtggcccttgtatggaatatgaaatacaaaaaaactaccccagagtatgtgtttcactgccagtcagctgtgatgtctgccacatttgcaaaatttcatccaaatcttgttgttggtggtacatattcaggccaaattgtgctttgggataaccgtagcaataaaagaactccagtgcaaagaactccactgtcagcagctgcacacacacaccctgtatattgtgtaaatgttgttggaacacaaaatgctcacaatctgattagcatctctactgatggaaaaatttgttcatggagtctggacatgctttcccatccacaggatagcatggagttggttcataaacagtcaaaagcagtagctgtgacatctatgtccttccctgttggagatgtcaacaactttgttgttgggagtgaagaaggttctgtgtacacagcatgccgccatggcagcaaagctggaatcagtgagatgtttgaggggcatcaaggaccaatcactggcatccattgtcatgcagctgttggagcagtagacttctcacatctttttgtcacttcatcgtttgactggacagtaaagctttggacaactaagaataacaagcctttgtattcatttgaagataatgcagactatgtttatgatgttatgtggtcacctacccacccagccctgtttgcctgtgtggatggcatggggagattggatttgtggaatctcaataatgacacagaggtaccaactgccagcatttctgtggagggtaatcctgctcttaatcgtgtgagatggacccattctggcagagagattgctgtgggtgattctgaaggacagattgttatatacgatgtgggagagcagattgctgttccccgcaatgatgaatgggcacggtttggccgaacacttgcagaaattaatgcaaaccgagctgatgcagaggaggaagcagctacccgaatacctgcttagttcctgaaaaggggagtgtaactagtggatttgggaaaggttcttaagtagatcctgagactatttgcatgcttctgtctaaatgataattaaaaggaaatttcatggattaaaccatgggtttaatgcagcaaggaaacttacaatgtccctttatatataacatgcatcttgttttggatttgtgtcattttttaatatagctgattgacttcacagaaagcagcttttttgaattctaatacataggtgtatatttggtattagttattttgagttcttttcaacttataacactgtatacagttatttctaaagcacagatgaaataagttctgcatatttttaaataatcacagttccctgttatacagataatgttctcactacccataatatgtaggaacattgtttctccttagccgtagtatgcatacacctatccatgttcattctgacatcctttgttgtctttataattcatgtggtagttacctataaataaaaacaaatatgcgtt

SEQ ID NO: 9040 - DNA, 2984 bp, Homo sapiens
  source 1..2984: mol_type = unassigned DNA
ctggtttcttcttccttcccccttcccccaacttccctccaccccttccaatcatggcgaacgggactgcggacgttcggaagctcttcatcttcactactacccagaattacttcgggttgatgtctgaactctgggatcagccactgttgtgcaactgtcttgaaatcaacaacttcttggatgacggcaaccagatgctcctcagggtgcagcgatccgacgcaggaatctccttttccaacacgattgagtttggtgacacaaaagataaagtgctggtgtttttcaagctgcgacctgaagtaattactgatgagaatctacatgataacattcttgtttcatctatgttagagtcacctattagttctctttaccaagcagtacggcaagtattcgcaccaatgttgttaaaggatcaggaatggagcagaaactttgatcccaaacttcagaatcttttgagtgaactagaagctgggttgggtatagttctacgaagatcagacactaacttaacaaaattgaaatttaaggaagatgacacacgaggtatccttacaccaagcgatgagttccagttttggatagaacaagctcaccgtggaaataaacagattagtaaagaaagagccaattattttaaagaattatttgaaacaattgcaagagagttttataacttggacagtctatccttactagaagttgttgacttggtggagactactcaggatgttgtagatgatgtgtggagacaaacagaacatgatcattatcctgagtcacgaatgttgcatctcttagacatcataggtggttcatttggaaggtttgttcagaaaaagttgggaactttgaacctgtgggaagatccttattatcttgtgaaagaaagtctgaaagctggtatttcaatttgtgaacagtgggtgatagtctgtaatcatctaacaggtcaggtgtggcagcgctatgttcctcatccatggaaaaatgaaaaatattttccagaaacacttgacaaacttggcaaacgccttgaagaggtcttggctattagaacaattcatgagaagtttctctattttctacctgccagtgaagagaaaatcatatgcctcactcgagtatttgaaccttttactggcctgaatcctgtgcaatataatccatatactgagcccttgtggaaagctgcggtgtctcaatatgaaaagattattgcacctgcggaacaaaaaatagcaggaaaattgaaaaattatatttcagaaattcaagacagtccacagcagcttcttcaagcattcctgaaatataaagagttggtaaagcgtccaactataagcaaagaattgatgttagaaagagaaactttactggcaagacttgtggactcaattaaagattttcgattagactttgagaatcggtgccgaggaattcctggtgatgcatctggaccactttctggcaaaaatctttcagaagttgtcaacagtatagtttgggttcgccagttggaattgaaggtagatgatactatcaagattgcagaggctcttttatctgacttgccaggatttcgatgtttccatcaaagtgccaaagatctcttagaccagcttaaactatatgaacaggaacaatttgatgattggtccagggatattcaatcaggtttatctgattccagatctggtttgtgtattgaggctagtagtcgaattatggaattggattctaatgatggattactaaaagtgcattattcagatcgtttggtgattcttctgagagaagttcgtcagctctctgcacttggctttgttattcctgccaaaatacagcaagttgcaaacattgcacagaaattctgcaagcaagcaattattcttaaacaagtggcacatttttataattctattgatcaacaaatgattcaaagtcagaggccaatgatgttacaatctgccttagcatttgaacagataattaagaattcaaaagcaggaagtggagggaaatcacagataacttgggataatcctaaagaattagaaggctatatccaaaaactccaaaatgctgctgaacggcttgccactgaaaatagaaaactgagaaaatggcacactacattttgtgaaaaggtggttgttcttatgaatattgatctgcttcggcagcaacagcgctggaaagatggattacaagaattgagaactggcttagcaactgtagaagcacagtgtcctctcgcatggcagagcaagtgggaaggcccagaagatcccttacaatacctgagaggtcttgttgcccgtgcccttgcaatacagaactgggtagataaagctgaaaaacaggctcttctctctgaaacacttgacctatcagaacttttccatccagacacatttcttaatgctcttcgccaggaaactgcaagggcagtgggtcgttctgtggatagccttaaatttgtagcctcatggaaaggtcgactgcaagaagcaaagctacaaattaagatcagtggcttgttactagaaggatgtagttttgatggaaatcaactttctgaaaatcagcttgattctcccagcgtgtcatcagtgctcccttgttttatgggctggattccacaggatgcatgtggtccatattctccggatgagtgcatctctttgcctgtttacacaagtgctgaaagggatcgtgtggttaccaatattgatgttccatgtgggggcaaccaagaccagtggattcagtgtggagcagctctattcctaaaaaatcagtagaatctaatgacaacaaaagccatcttcacaaaagggaacattgattctttaagctttaaatcaaacatgtggtcagtctacatttgaaatgttagttcaaaatattaacatatagttatgttgttgatgtcactgaaattttaatgtgtaaaagcagcactgtgcatc

SEQ ID NO: 9041 - DNA, 13678 bp, Homo sapiens
  source 1..13678: mol_type = unassigned DNA
gactacccctggcaaccgcgaagctctgcggtcccgcggtcgggctacgggtttgagcaaagctcctctcttcccttcacttccctccggactggtttcttcttccttcccccttcccccaacttccctccaccccttccaatcatggcgaacgggactgcggacgttcggaagctcttcatcttcactactacccagaattacttcgggttgatgtctgaactctgggatcagccactgttgtgcaactgtcttgaaatcaacaacttcttggatgacggcaaccagatgctcctcagggtgcagcgatccgacgcaggaatctccttttccaacacgattgagtttggtgacacaaaagataaagtgctggtgtttttcaagctgcgacctgaagtaattactgatgagaatctacatgataacattcttgtttcatctatgttagagtcacctattagttctctttaccaagcagtacggcaagtattcgcaccaatgttgttaaaggatcaggaatggagcagaaactttgatcccaaacttcagaatcttttgagtgaactagaagctgggttgggtatagttctacgaagatcagacactaacttaacaaaattgaaatttaaggaagatgacacacgaggtatccttacaccaagcgatgagttccagttttggatagaacaagctcaccgtggaaataaacagattagtaaagaaagagccaattattttaaagaattatttgaaacaattgcaagagagttttataacttggacagtctatccttactagaagttgttgacttggtggagactactcaggatgttgtagatgatgtgtggagacaaacagaacatgatcattatcctgagtcacgaatgttgcatctcttagacatcataggtggttcatttggaaggtttgttcagaaaaagttgggaactttgaacctgtgggaagatccttattatcttgtgaaagaaagtctgaaagctggtatttcaatttgtgaacagtgggtgatagtctgtaatcatctaacaggtcaggtgtggcagcgctatgttcctcatccatggaaaaatgaaaaatattttccagaaacacttgacaaacttggcaaacgccttgaagaggtcttggctattagaacaattcatgagaagtttctctattttctacctgccagtgaagagaaaatcatatgcctcactcgagtatttgaaccttttactggcctgaatcctgtgcaatataatccatatactgagcccttgtggaaagctgcggtgtctcaatatgaaaagattattgcacctgcggaacaaaaaatagcaggaaaattgaaaaattatatttcagaaattcaagacagtccacagcagcttcttcaagcattcctgaaatataaagagttggtaaagcgtccaactataagcaaagaattgatgttagaaagagaaactttactggcaagacttgtggactcaattaaagattttcgattagactttgagaatcggtgccgaggaattcctggtgatgcatctggaccactttctggcaaaaatctttcagaagttgtcaacagtatagtttgggttcgccagttggaattgaaggtagatgatactatcaagattgcagaggctcttttatctgacttgccaggatttcgatgtttccatcaaagtgccaaagatctcttagaccagcttaaactatatgaacaggaacaatttgatgattggtccagggatattcaatcaggtttatctgattccagatctggtttgtgtattgaggctagtagtcgaattatggaattggattctaatgatggattactaaaagtgcattattcagatcgtttggtgattcttctgagagaagttcgtcagctctctgcacttggctttgttattcctgccaaaatacagcaagttgcaaacattgcacagaaattctgcaagcaagcaattattcttaaacaagtggcacatttttataattctattgatcaacaaatgattcaaagtcagaggccaatgatgttacaatctgccttagcatttgaacagataattaagaattcaaaagcaggaagtggagggaaatcacagataacttgggataatcctaaagaattagaaggctatatccaaaaactccaaaatgctgctgaacggcttgccactgaaaatagaaaactgagaaaatggcacactacattttgtgaaaaggtggttgttcttatgaatattgatctgcttcggcagcaacagcgctggaaagatggattacaagaattgagaactggcttagcaactgtagaagcacagggattccaagcaagtgacatgcatgcatggaaacaacactggaatcatcaactgtacaaagctctggagcatcagtaccagatgggcttagaagcacttaatgagaatttgccagaaataaatatagacttaacttacaaacagggacgattacaattcaggcccccttttgaagaaatccgggctaaatattatagagaaatgaagagattcatcggcattccaaatcagtttaagggagtgggtgaggcaggagatgaatctattttttctattatgattgatagaaatgcaagtggatttttgacgattttcagcaaagcagaagatctgtttagaagattgtcagctgttttacaccaacataaggaatggattgtaattgggcaagttgatatggaagctctggtggaaaagcatctttttactgtacatgattgggagaaaaattttaaagcattaaaaataaaggggaaagaagtagaacgacttccaagtgctgtcaaggtagattgtttaaatattaattgcaaccctgtgaagactgtgattgatgatctcatccagaagttatttgatctgcttgttctttctttgaagaagtccatacaggctcatttacatgaaattgatacatttgttactgaggctatggaagtcttaacaattatgccccagtctgtggaagaaattggtgatgcaaatctacaatatagtaagttacaagaacggaagccagagattttgcccttatttcaagaagctgaagacaaaaacagacttttacgaactgtggctggtggaggtttagaaacaattagtaatttgaaagccaagtgggataaatttgagttaatgatggaaagtcaccaacttatgattaaagaccagattgaagtgatgaaaggaaatgtgaaatcacgtcttcagatctattatcaagaactggaaaaatttaaagctcgttgggaccaactaaagcctggtgatgatgttattgaaactggccaacataatactcttgataaaagtgcaaagttaataaaagagaaaaaaattgagtttgatgatcttgaagtcacaagaaaaaagctggttgatgattgccatcattttagactggaagagcctaatttctccctggcaagtagtatctctaaagatatcgagagctgtgcccaaatttgggccttttatgaagagtttcaacaaggatttcaggaaatggccaatgaagactggatcacttttcggactaagacatacctgtttgaggaatttttgatgaactggcatgacagattaaggaaggttgaagaacattcagtgatgacagtgaaattacaatcagaggttgacaaatataaaatcgtaattcctatcttgaaatatgtgagaggggagcatctttctccagatcactggcttgacctttttcgtctccttggacttcctagggggactagtctagagaaactactgtttggtgatttgctcagagtagctgatacaattgtagccaaagctgccgaccttaaagatttaaatagtcgggcacaaggtgaagttacaatcagagaagctttacgtgaacttgatctttggggagttggagcagtgtttacattaattgattatgaagacagccaaagtcgaactatgaagctgattaaagactggaaagatatagtaaatcaggttggagataatagatgccttctccaatccttaaaggattctccttattataaaggatttgaagataaagtatcaatttgggaaagaaaacttgcagagttagatgaatacctgcagaatttaaatcatattcagagaaagtgggtgtatttggaacccattttcggccgtggagcattgccaaaagaacagacacgcttcaacagagttgatgaagattttagatcaataatgactgatatcaagaaagacaatagagtcacaacattaactactcatgctggaataagaaattctctactaacaatacttgatcagcttcaaagatgtcagaaatcattaaatgaatttttggaggaaaaacgctcagcattcccaagattttattttattggtgatgatgacttattagaaatattgggccagtctaccaacccatcagtgattcagtctcacctgaagaagctttttgctggtattaacagtgtttgctttgatgagaaatcaaaacatataactgcaatgaaatctttagagggagaagttgtaccttttaaaaataaagttcctctatcaaataatgtagagacatggttgaatgatttggccttagaaatgaagaaaactttggaacagttgttgaaggaatgtgttactactgggcgaagttctcaaggtgcagttgacccatctctgttcccttcacagattttatgcttggcggagcagattaaattcactgaagatgtagaaaatgctattaaagatcatagtcttcatcagattgaaacacaactggtgaataagttagagcaatatactaacattgatacaagttctgaggatccagggaatactgaatcgggcatcctggagcttaaacttaaagccctaattcttgacattatccataatattgatgtggtaaagcagttaaaccaaattcaggttcatacaactgaagactgggcttggaaaaaacaacttagattctatatgaaaagtgatcatacatgttgtgttcaaatggtggattctgaatttcagtatacttatgaatatcagggtaatgcttccaaactggtttatactccactgacagacaagtgctacttaactctcactcaagccatgaagatgggacttggaggaaatccttatggaccagctggaactgggaaaacggaatcagtaaaggctttaggtggacttcttggaagacaagttttagtctttaattgtgatgagggcatcgatgtgaagtcaatgggacgaatatttgttggtttggtgaagtgtggggcctggggttgttttgatgaatttaataggctggaagaatctgtactgtcagcagtttctatgcaaatccagacaattcaagatgctttgaagaatcatagaactgtatgtgaactgcttggcaaggaggtagaagtaaattctaattctggaatttttatcactatgaatcctgctggaaaaggttatggaggaagacaaaaactgcctgataatcttaaacagcttttcaggcccgtagctatgtctcatccagacaatgagcttattgcagaagttattctctattcggaaggctttaaagacgctaaagtattgagcagaaaattggtagctattttcaatctatctagggaacttttgacacctcagcaacattatgattggggtttgagagctttgaagacagttctgagaggaagtggaaatctccttagacagctaaacaaaagtggcactacacagaatgctaatgaaagtcatattgtggtacaagcactgaggcttaataccatgtcaaagtttacgtttactgattgcacccggtttgatgcactgataaaagatgtctttccgggaattgaattgaaagaagtggaatatgatgaactaagtgctgcattaaagcaggtctttgaagaggccaattatgaaattatacccaatcagatcaaaaaggctttagaattgtatgaacagttatgccagaggatgggagttgttattgttggtccaagtggtgctggaaaatcaacgctttggagaatgttaagggctgcgctttgtaaaactggcaaagtagtgaaacaatatactatgaatcccaaagctatgcctcgatatcaattattaggccatattgacatggacacaagagaatggtctgatggtgttttgacaaatagtgctcgtcaagtggttcgggaacctcaagatgtcagctcatggataatctgtgatggtgatattgaccctgaatggatagaatctctgaattctgttctggatgataatcgactgctgactatgcccagtggagaaaggattcagtttggcccaaatgttaactttgtatttgaaactcatgatttaagttgtgcatcaccagccacaatatctagaatgggaatgatctttcttagtgatgaagagacagatcttaattctctgataaaatcttggttgaggaatcagcctgctgaatatagaaataatcttgaaaattggattggagattattttgaaaaggctttacaatgggttctaaagcagaatgactatgtggtagaaacaagtttggttgggactgtgatgaatggtttgtcacatctacatggttgcagagatcatgacgaattcattattaatctcataaggggacttggtggaaatctgaatatgaagtcacgtttggaatttaccaaagaggtttttcattgggcacgagaatctcctccagactttcacaaacctatggatacctactatgactctactaggggtcgattagcaacatatgtgcttaagaagccagaagacttgactgctgatgatttcagtaacggcttaactcttccagtcattcagactcctgacatgcaacgaggtctagattatttcaaaccatggttaagttctgatactaaacagccctttattctggtaggaccagaaggatgtggcaaagggatgctgctcaggtacgcattttcacaactccggtccactcaaattgctacagttcactgtagtgcacaaaccacttctcgacatctcctgcagaaactgagccagacttgcatggtaatcagtactaatactggtcgtgtatacagaccaaaagactgtgaaagacttgttctgtacttaaaagatatcaacctacctaaacttgataaatgggggaccagtactttggtagcattcctacaacaggtattgacgtatcaaggattttatgatgaaaatttggaatgggttggtctagaaaatattcaaattgtggcttctatgtcagctggaggaagactgggaagacataaacttactaccagatttacttccatcgttcgtctttgttctatagattacccagaaagagagcagttacaaacgatttatggagcatatttggaaccagttctacataaaaatctgaagaatcattctatttggggttcttcatcaaaaatttatcttttagcaggatctatggtacaagtgtatgaacaggtgcgagccaaatttacagttgatgattatagtcactatttctttactccttgcattcttacccaatgggttcttggcttatttagatatgatttagaaggaggatcctcaaaccatccactagattatgtgttagaaattgtagcatatgaggcacggcgcttatttcgtgacaaaattgttggtgcaaaggaacttcatttatttgacatcattttaacatcagtgtttcaaggagattggggctcagacatattagacaatatgtcagatagtttctacgttacatggggagctcggcataattcaggagcaagggcagccccaggacaaccattacctccacatggaaaaccacttggaaaactaaactctactgatctcaaggatgttattaaaaagggtcttattcattatggacgagataaccagaatttagacattttacttttccacgaagtcttggagtatatgtctaggatagatagagtgctgagtttccctggaggttcacttctattagcaggacgcagtggtgtaggtcgtcggaccatcacttctttagtcagtcacatgcatggagcggtcctgttttctccaaagatttccagaggatatgaactgaagcagttcaaaaatgatctcaaacatgtgctgcaacttgcaggaattgaagcacaacaggtagttttacttcttgaggattaccagtttgtacatcctacatttttggagatgatcaatagccttttgtcttcaggtgaagttcctggactctatactcttgaagaattagagcccttgctgttaccacttaaggatcaagcttcacaagatggtttttttggaccagtcttcaattacttcacatatagaattcagcaaaacttgcatattgtcttgataatggattctgcaaattcaaacttcatgataaactgtgagagtaatccagctttgcataagaaatgccaggtgttgtggatggagggttggtccaatagcagtatgaagaaaatacctgaaatgttattcagtgaaacaggtggtggagaaaaatacaatgataaaaaacgaaaagaagaaaagaaaaaaaattcagttgatcctgattttctaaaatcatttttattaatccatgaatcttgtaaagcatatggtgctacaccaagccgatacatgacctttttacatgtgtattctgccattagtagtagcaagaaaaaggaattattaaaaagacaaagtcatttgcaggctggtgtatctaaactaaatgaagctaaagctcttgtggatgaactgaacagaaaagctggagaacaaagtgtgttacttaaaacgaagcaagatgaagcagatgctgcccttcaaatgatcacagtgtcaatgcaggatgctagtgagcaaaaaacagaacttgaaagactgaagcacagaatagcagaagaagttgttaaaattgaagaaagaaaaaataaaattgatgatgaattaaaagaagtacaacctttagtcaatgaagctaaactagcagttggaaacattaagcccgaatcactttcagaaattcgctcactacgcatgccacctgatgtaattagagatattcttgaaggagttttaaggttgatgggtatctttgatacatcttgggtgagcatgaaaagtttccttgcaaaaagaggtgtaagagaagacatagcaacctttgatgcccgaaatatttcaaaggaaataagagagagtgttgaagaacttctttttaaaaataaaggctcttttgatccaaagaatgctaagcgtgccagtactgcagctgcacctttggctgcctgggtgaaagccaatattcagtattcccatgtcttggaacgaattcatcctttggaaactgaacaggcaggattagaatcgaatctgaagaaaactgaagacagaaaaaggaaactagaggagcttcttaattctgttggtcaaaaggtatcagaactcaaagaaaaatttcagagcaggacttcagaagctgccaaacttgaggctgaagtaagcaaggcacaagaaacaatcaaagctgcagaagtcttaattaatcagcttgacagagaacataagagatggaatgcacaggttgtagagataacagaggaattagctactcttcctaaaagagctcaacttgctgctgcatttattacatatctttctgctgctcctgaatctctgagaaaaacctgtttggaagaatggaccaagtcagctggtcttgagaaatttgatctgaggagatttctttgtactgaaagtgagcagttaatttggaaaagtgaaggcctaccatcagatgacctttccatagaaaatgctcttgtaatattacagagtcgagtgtgcccatttcttatagatccttcttcccaagctacagagtggttaaaaacacatttgaaagactcacgtttagaagttatcaatcagcaggatagtaactttatcacagctcttgaattagcagtacgttttgggaaaacccttattatacaagagatggatggtgtagaacctgttctttatccattattgagacgagatctggttgctcaaggaccacgttatgtggtacaaataggtgacaaaattattgactacaatgaagaattccgcctctttttgtcaacaagaaacccaaatccttttattccaccggatgcagcttccattgttactgaggttaactttactacaacaagaagtggattacgagggcagcttttagctttaaccattcagcatgagaaacctgatttagaagaacagaaaacaaaactattacaacaggaagaagataagaaaatacagctagccaagctcgaagaatctcttctagagacacttgccacatctcaaggcaatattttggaaaataaggatttgattgagtctttgaatcagacaaaagcaagcagtgcacttattcaagagtcacttaaagaatcttacaaactccaaatttcccttgatcaagaacgggatgcctatctccccctggctgagagtgccagcaagatgtacttcattatttctgatttgtccaaaattaataacatgtaccgttttagtttggctgcttttctccgacttttccaacgagctctacaaaacaaacaggattctgaaaatacagaacagagaatccagtcacttatcagctcattacaacatatggtatatgaatatatatgtcgttgtctatttaaggctgatcagttgatgttcgctttgcattttgttcgaggcatgcatcctgaactttttcaagaaaatgaatgggatacgtttacaggtgtggttgttggagacatgttacggaaagctgactctcaacaaaaaatacgtgatcagcttccgtcttggatagatcaggaacgaagctgggccgtggcaacattaaagattgctctccccagtctttatcagaccctctgctttgaagatgcagctctgtggcgtacttattataataattcaatgtgtgagcaagagtttccatctatccttgcaaagaaagtttccttatttcagcagattcttgtagtacaggcgctaagaccggacagattgcaaagtgccatggctctttttgcatgtaaaactctgggactgaaagaggtgtccccactgcctctaaatctcaaacgtttatacaaagagacactggaaattgaacccatcttgataattatttctccgggtgctgatccttctcaggaacttcaagaactagctaatgctgaaagaagcggagagtgttatcaccaggttgccatgggtcaaggtcaagctgatttagcaattcaaatgctaaaagaatgtgcccgcaatggagactggctctgtttgaagaacttacatcttgtggtatcttggctgccagttctggaaaaggaattgaatactcttcaacctaaagatacctttcgtctttggctcactgcagaagttcatcccaactttactcctattttactacagtcaagtctgaagataacatatgagtcacctccaggtttaaagaagaatttaatgcgtacttatgagtcttggactcctgagcaaattagcaaaaaagataatacacatcgagctcatgctctcttcagtcttgcatggtttcatgctgcatgtcaagaaagaagaaactatattcctcagggttggacaaagttttatgaattttctttatcagatcttcgggctgggtacaacattattgacagactttttgatggtgccaaagatgtacaatgggaatttgtacatggtttacttgaaaatgctatttatggaggacgtatagacaactattttgaccttagagttcttcagtcatacctgaagcagttttttaattcttcagttattgatgtattcaaccaaaggaacaagaaaagcatttttccatattccgtatctctaccacaatcctgcagcattttggactatcgtgctgtcattgagaaaattccagaggacgacaaacctagtttctttggtctgcctgccaatatcgctcgctcatctcagcgcatgatcagttctcaggttatttcacagttgaggattttgggcagatccataacagctggttccaaatttgatagagaaatctggtctaatgaactttctcctgtcctcaatctctggaagaaactaaaccagaattcaaacctaatacatcagaaagtgcctcctcctaacgatcgacaaggatctccaatactgtcattcatcattcttgaacaatttaatgctattcgtttagtacaaagtgtccaccagtctcttgctgctctcagcaaagtcatcagaggaactactttactgagttcagaagtacaaaaattggcaagtgctttattaaaccaaaagtgtcctctcgcatggcagagcaagtgggaaggcccagaagatcccttacaatacctgagaggtcttgttgcccgtgcccttgcaatacagaactgggtagataaagctgaaaaacaggctcttctctctgaaacacttgacctatcagaacttttccatccagacacatttcttaatgctcttcgccaggaaactgcaagggcagtgggtcgttctgtggatagccttaaatttgtagcctcatggaaaggtcgactgcaagaagcaaagctacaaattaagatcagtggcttgttactagaaggatgtagttttgatggaaatcaactttctgaaaatcagcttgattctcccagcgtgtcatcagtgctcccttgttttatgggctggattccacaggatgcatgtggtccatattctccggatgagtgcatctctttgcctgtttacacaagtgctgaaagggatcgtgtggttaccaatattgatgttccatgtgggggcaaccaagaccagtggattcagtgtggagcagctctattcctaaaaaatcagtagaatctaatgacaacaaaagccatcttcacaaaagggaacattgattctttaagctttaaatcaaacatgtggtcagtctacatttgaaatgttagttcaaaatattaacatatagttatgttgttgatgtcactgaaattttaatgtgtaaaagcagcactgtgcatcttttaaagtaataaattaatggagttattgttaaaacagagtattcttttgacaacattaaatatttctgtgagaaagttcacttttccagtggctcaaaaatttgttttaggtcagagattttaagtggtatattaaccaataataaatattttggctgtcatttgtgtcataattatttaataaaagagcattcataatttttgcagtcttcccatgactctttttacatactgaagaatgtattataaagttataatgaatgtataaaagtatcaacatgaatataattatactatgctaattataatatacaaatatataattattgtcataattatatacttataactaatatcttaaggtaattcaaataggaataattcaggtgacataataatggaggataaattctggttattaaacattcagcttttttgtg

SEQ ID NO: 9042 - DNA, 12945 bp, Homo sapiens
  source 1..12945: mol_type = unassigned DNA
atggcgaacgggactgcggacgttcggaagctcttcatcttcactactacccagaattacttcgggttgatgtctgaactctgggatcagccactgttgtgcaactgtcttgaaatcaacaacttcttggatgacggcaaccagatgctcctcagggtgcagcgatccgacgcaggaatctccttttccaacacgattgagtttggtgacacaaaagataaagtgctggtgtttttcaagctgcgacctgaagtaattactgatgagaatctacatgataacattcttgtttcatctatgttagagtcacctattagttctctttaccaagcagtacggcaagtattcgcaccaatgttgttaaaggatcaggaatggagcagaaactttgatcccaaacttcagaatcttttgagtgaactagaagctgggttgggtatagttctacgaagatcagacactaacttaacaaaattgaaatttaaggaagatgacacacgaggtatccttacaccaagcgatgagttccagttttggatagaacaagctcaccgtggaaataaacagattagtaaagaaagagccaattattttaaagaattatttgaaacaattgcaagagagttttataacttggacagtctatccttactagaagttgttgacttggtggagactactcaggatgttgtagatgatgtgtggagacaaacagaacatgatcattatcctgagtcacgaatgttgcatctcttagacatcataggtggttcatttggaaggtttgttcagaaaaagttgggaactttgaacctgtgggaagatccttattatcttgtgaaagaaagtctgaaagctggtatttcaatttgtgaacagtgggtgatagtctgtaatcatctaacaggtcaggtgtggcagcgctatgttcctcatccatggaaaaatgaaaaatattttccagaaacacttgacaaacttggcaaacgccttgaagaggtcttggctattagaacaattcatgagaagtttctctattttctacctgccagtgaagagaaaatcatatgcctcactcgagtatttgaaccttttactggcctgaatcctgtgcaatataatccatatactgagcccttgtggaaagctgcggtgtctcaatatgaaaagattattgcacctgcggaacaaaaaatagcaggaaaattgaaaaattatatttcagaaattcaagacagtccacagcagcttcttcaagcattcctgaaatataaagagttggtaaagcgtccaactataagcaaagaattgatgttagaaagagaaactttactggcaagacttgtggactcaattaaagattttcgattagactttgagaatcggtgccgaggaattcctggtgatgcatctggaccactttctggcaaaaatctttcagaagttgtcaacagtatagtttgggttcgccagttggaattgaaggtagatgatactatcaagattgcagaggctcttttatctgacttgccaggatttcgatgtttccatcaaagtgccaaagatctcttagaccagcttaaactatatgaacaggaacaatttgatgattggtccagggatattcaatcaggtttatctgattccagatctggtttgtgtattgaggctagtagtcgaattatggaattggattctaatgatggattactaaaagtgcattattcagatcgtttggtgattcttctgagagaagttcgtcagctctctgcacttggctttgttattcctgccaaaatacagcaagttgcaaacattgcacagaaattctgcaagcaagcaattattcttaaacaagtggcacatttttataattctattgatcaacaaatgattcaaagtcagaggccaatgatgttacaatctgccttagcatttgaacagataattaagaattcaaaagcaggaagtggagggaaatcacagataacttgggataatcctaaagaattagaaggctatatccaaaaactccaaaatgctgctgaacggcttgccactgaaaatagaaaactgagaaaatggcacactacattttgtgaaaaggtggttgttcttatgaatattgatctgcttcggcagcaacagcgctggaaagatggattacaagaattgagaactggcttagcaactgtagaagcacagggattccaagcaagtgacatgcatgcatggaaacaacactggaatcatcaactgtacaaagctctggagcatcagtaccagatgggcttagaagcacttaatgagaatttgccagaaataaatatagacttaacttacaaacagggacgattacaattcaggcccccttttgaagaaatccgggctaaatattatagagaaatgaagagattcatcggcattccaaatcagtttaagggagtgggtgaggcaggagatgaatctattttttctattatgattgatagaaatgcaagtggatttttgacgattttcagcaaagcagaagatctgtttagaagattgtcagctgttttacaccaacataaggaatggattgtaattgggcaagttgatatggaagctctggtggaaaagcatctttttactgtacatgattgggagaaaaattttaaagcattaaaaataaaggggaaagaagtagaacgacttccaagtgctgtcaaggtagattgtttaaatattaattgcaaccctgtgaagactgtgattgatgatctcatccagaagttatttgatctgcttgttctttctttgaagaagtccatacaggctcatttacatgaaattgatacatttgttactgaggctatggaagtcttaacaattatgccccagtctgtggaagaaattggtgatgcaaatctacaatatagtaagttacaagaacggaagccagagattttgcccttatttcaagaagctgaagacaaaaacagacttttacgaactgtggctggtggaggtttagaaacaattagtaatttgaaagccaagtgggataaatttgagttaatgatggaaagtcaccaacttatgattaaagaccagattgaagtgatgaaaggaaatgtgaaatcacgtcttcagatctattatcaagaactggaaaaatttaaagctcgttgggaccaactaaagcctggtgatgatgttattgaaactggccaacataatactcttgataaaagtgcaaagttaataaaagagaaaaaaattgagtttgatgatcttgaagtcacaagaaaaaagctggttgatgattgccatcattttagactggaagagcctaatttctccctggcaagtagtatctctaaagatatcgagagctgtgcccaaatttgggccttttatgaagagtttcaacaaggatttcaggaaatggccaatgaagactggatcacttttcggactaagacatacctgtttgaggaatttttgatgaactggcatgacagattaaggaaggttgaagaacattcagtgatgacagtgaaattacaatcagaggttgacaaatataaaatcgtaattcctatcttgaaatatgtgagaggggagcatctttctccagatcactggcttgacctttttcgtctccttggacttcctagggggactagtctagagaaactactgtttggtgatttgctcagagtagctgatacaattgtagccaaagctgccgaccttaaagatttaaatagtcgggcacaaggtgaagttacaatcagagaagctttacgtgaacttgatctttggggagttggagcagtgtttacattaattgattatgaagacagccaaagtcgaactatgaagctgattaaagactggaaagatatagtaaatcaggttggagataatagatgccttctccaatccttaaaggattctccttattataaaggatttgaagataaagtatcaatttgggaaagaaaacttgcagagttagatgaatacctgcagaatttaaatcatattcagagaaagtgggtgtatttggaacccattttcggccgtggagcattgccaaaagaacagacacgcttcaacagagttgatgaagattttagatcaataatgactgatatcaagaaagacaatagagtcacaacattaactactcatgctggaataagaaattctctactaacaatacttgatcagcttcaaagatgtcagaaatcattaaatgaatttttggaggaaaaacgctcagcattcccaagattttattttattggtgatgatgacttattagaaatattgggccagtctaccaacccatcagtgattcagtctcacctgaagaagctttttgctggtattaacagtgtttgctttgatgagaaatcaaaacatataactgcaatgaaatctttagagggagaagttgtaccttttaaaaataaagttcctctatcaaataatgtagagacatggttgaatgatttggccttagaaatgaagaaaactttggaacagttgttgaaggaatgtgttactactgggcgaagttctcaaggtgcagttgacccatctctgttcccttcacagattttatgcttggcggagcagattaaattcactgaagatgtagaaaatgctattaaagatcatagtcttcatcagattgaaacacaactggtgaataagttagagcaatatactaacattgatacaagttctgaggatccagggaatactgaatcgggcatcctggagcttaaacttaaagccctaattcttgacattatccataatattgatgtggtaaagcagttaaaccaaattcaggttcatacaactgaagactgggcttggaaaaaacaacttagattctatatgaaaagtgatcatacatgttgtgttcaaatggtggattctgaatttcagtatacttatgaatatcagggtaatgcttccaaactggtttatactccactgacagacaagtgctacttaactctcactcaagccatgaagatgggacttggaggaaatccttatggaccagctggaactgggaaaacggaatcagtaaaggctttaggtggacttcttggaagacaagttttagtctttaattgtgatgagggcatcgatgtgaagtcaatgggacgaatatttgttggtttggtgaagtgtggggcctggggttgttttgatgaatttaataggctggaagaatctgtactgtcagcagtttctatgcaaatccagacaattcaagatgctttgaagaatcatagaactgtatgtgaactgcttggcaaggaggtagaagtaaattctaattctggaatttttatcactatgaatcctgctggaaaaggttatggaggaagacaaaaactgcctgataatcttaaacagcttttcaggcccgtagctatgtctcatccagacaatgagcttattgcagaagttattctctattcggaaggctttaaagacgctaaagtattgagcagaaaattggtagctattttcaatctatctagggaacttttgacacctcagcaacattatgattggggtttgagagctttgaagacagttctgagaggaagtggaaatctccttagacagctaaacaaaagtggcactacacagaatgctaatgaaagtcatattgtggtacaagcactgaggcttaataccatgtcaaagtttacgtttactgattgcacccggtttgatgcactgataaaagatgtctttccgggaattgaattgaaagaagtggaatatgatgaactaagtgctgcattaaagcaggtctttgaagaggccaattatgaaattatacccaatcagatcaaaaaggctttagaattgtatgaacagttatgccagaggatgggagttgttattgttggtccaagtggtgctggaaaatcaacgctttggagaatgttaagggctgcgctttgtaaaactggcaaagtagtgaaacaatatactatgaatcccaaagctatgcctcgatatcaattattaggccatattgacatggacacaagagaatggtctgatggtgttttgacaaatagtgctcgtcaagtggttcgggaacctcaagatgtcagctcatggataatctgtgatggtgatattgaccctgaatggatagaatctctgaattctgttctggatgataatcgactgctgactatgcccagtggagaaaggattcagtttggcccaaatgttaactttgtatttgaaactcatgatttaagttgtgcatcaccagccacaatatctagaatgggaatgatctttcttagtgatgaagagacagatcttaattctctgataaaatcttggttgaggaatcagcctgctgaatatagaaataatcttgaaaattggattggagattattttgaaaaggctttacaatgggttctaaagcagaatgactatgtggtagaaacaagtttggttgggactgtgatgaatggtttgtcacatctacatggttgcagagatcatgacgaattcattattaatctcataaggggacttggtggaaatctgaatatgaagtcacgtttggaatttaccaaagaggtttttcattgggcacgagaatctcctccagactttcacaaacctatggatacctactatgactctactaggggtcgattagcaacatatgtgcttaagaagccagaagacttgactgctgatgatttcagtaacggcttaactcttccagtcattcagactcctgacatgcaacgaggtctagattatttcaaaccatggttaagttctgatactaaacagccctttattctggtaggaccagaaggatgtggcaaagggatgctgctcaggtacgcattttcacaactccggtccactcaaattgctacagttcactgtagtgcacaaaccacttctcgacatctcctgcagaaactgagccagacttgcatggtaatcagtactaatactggtcgtgtatacagaccaaaagactgtgaaagacttgttctgtacttaaaagatatcaacctacctaaacttgataaatgggggaccagtactttggtagcattcctacaacaggtattgacgtatcaaggattttatgatgaaaatttggaatgggttggtctagaaaatattcaaattgtggcttctatgtcagctggaggaagactgggaagacataaacttactaccagatttacttccatcgttcgtctttgttctatagattacccagaaagagagcagttacaaacgatttatggagcatatttggaaccagttctacataaaaatctgaagaatcattctatttggggttcttcatcaaaaatttatcttttagcaggatctatggtacaagtgtatgaacaggtgcgagccaaatttacagttgatgattatagtcactatttctttactccttgcattcttacccaatgggttcttggcttatttagatatgatttagaaggaggatcctcaaaccatccactagattatgtgttagaaattgtagcatatgaggcacggcgcttatttcgtgacaaaattgttggtgcaaaggaacttcatttatttgacatcattttaacatcagtgtttcaaggagattggggctcagacatattagacaatatgtcagatagtttctacgttacatggggagctcggcataattcaggagcaagggcagccccaggacaaccattacctccacatggaaaaccacttggaaaactaaactctactgatctcaaggatgttattaaaaagggtcttattcattatggacgagataaccagaatttagacattttacttttccacgaagtcttggagtatatgtctaggatagatagagtgctgagtttccctggaggttcacttctattagcaggacgcagtggtgtaggtcgtcggaccatcacttctttagtcagtcacatgcatggagcggtcctgttttctccaaagatttccagaggatatgaactgaagcagttcaaaaatgatctcaaacatgtgctgcaacttgcaggaattgaagcacaacaggtagttttacttcttgaggattaccagtttgtacatcctacatttttggagatgatcaatagccttttgtcttcaggtgaagttcctggactctatactcttgaagaattagagcccttgctgttaccacttaaggatcaagcttcacaagatggtttttttggaccagtcttcaattacttcacatatagaattcagcaaaacttgcatattgtcttgataatggattctgcaaattcaaacttcatgataaactgtgagagtaatccagctttgcataagaaatgccaggtgttgtggatggagggttggtccaatagcagtatgaagaaaatacctgaaatgttattcagtgaaacaggtggtggagaaaaatacaatgataaaaaacgaaaagaagaaaagaaaaaaaattcagttgatcctgattttctaaaatcatttttattaatccatgaatcttgtaaagcatatggtgctacaccaagccgatacatgacctttttacatgtgtattctgccattagtagtagcaagaaaaaggaattattaaaaagacaaagtcatttgcaggctggtgtatctaaactaaatgaagctaaagctcttgtggatgaactgaacagaaaagctggagaacaaagtgtgttacttaaaacgaagcaagatgaagcagatgctgcccttcaaatgatcacagtgtcaatgcaggatgctagtgagcaaaaaacagaacttgaaagactgaagcacagaatagcagaagaagttgttaaaattgaagaaagaaaaaataaaattgatgatgaattaaaagaagtacaacctttagtcaatgaagctaaactagcagttggaaacattaagcccgaatcactttcagaaattcgctcactacgcatgccacctgatgtaattagagatattcttgaaggagttttaaggttgatgggtatctttgatacatcttgggtgagcatgaaaagtttccttgcaaaaagaggtgtaagagaagacatagcaacctttgatgcccgaaatatttcaaaggaaataagagagagtgttgaagaacttctttttaaaaataaaggctcttttgatccaaagaatgctaagcgtgccagtactgcagctgcacctttggctgcctgggtgaaagccaatattcagtattcccatgtcttggaacgaattcatcctttggaaactgaacaggcaggattagaatcgaatctgaagaaaactgaagacagaaaaaggaaactagaggagcttcttaattctgttggtcaaaaggtatcagaactcaaagaaaaatttcagagcaggacttcagaagctgccaaacttgaggctgaagtaagcaaggcacaagaaacaatcaaagctgcagaagtcttaattaatcagcttgacagagaacataagagatggaatgcacaggttgtagagataacagaggaattagctactcttcctaaaagagctcaacttgctgctgcatttattacatatctttctgctgctcctgaatctctgagaaaaacctgtttggaagaatggaccaagtcagctggtcttgagaaatttgatctgaggagatttctttgtactgaaagtgagcagttaatttggaaaagtgaaggcctaccatcagatgacctttccatagaaaatgctcttgtaatattacagatcattggtttgaaatcatggagtcgagtgtgcccatttcttatagatccttcttcccaagctacagagtggttaaaaacacatttgaaagactcacgtttagaagttatcaatcagcaggatagtaactttatcacagctcttgaattagcagtacgttttgggaaaacccttattatacaagagatggatggtgtagaacctgttctttatccattattgagacgagatctggttgctcaaggaccacgttatgtggtacaaataggtgacaaaattattgactacaatgaagaattccgcctctttttgtcaacaagaaacccaaatccttttattccaccggatgcagcttccattgttactgaggttaactttactacaacaagaagtggattacgagggcagcttttagctttaaccattcagcatgagaaacctgatttagaagaacagaaaacaaaactattacaacaggaagaagataagaaaatacagctagccaagctcgaagaatctcttctagagacacttgccacatctcaaggcaatattttggaaaataaggatttgattgagtctttgaatcagacaaaagcaagcagtgcacttattcaagagtcacttaaagaatcttacaaactccaaatttcccttgatcaagaacgggatgcctatctccccctggctgagagtgccagcaagatgtacttcattatttctgatttgtccaaaattaataacatgtaccgttttagtttggctgcttttctccgacttttccaacgagctctacaaaacaaacaggattctgaaaatacagaacagagaatccagtcacttatcagctcattacaacatatggtatatgaatatatatgtcgttgtctatttaaggctgatcagttgatgttcgctttgcattttgttcgaggcatgcatcctgaactttttcaagaaaatgaatgggatacgtttacaggtgtggttgttggagacatgttacggaaagctgactctcaacaaaaaatacgtgatcagcttccgtcttggatagatcaggaacgaagctgggccgtggcaacattaaagattgctctccccagtctttatcagaccctctgctttgaagatgcagctctgtggcgtacttattataataattcaatgtgtgagcaagagtttccatctatccttgcaaagaaagtttccttatttcagcagattcttgtagtacaggcgctaagaccggacagattgcaaagtgccatggctctttttgcatgtaaaactctgggactgaaagaggtgtccccactgcctctaaatctcaaacgtttatacaaagagacactggaaattgaacccatcttgataattatttctccgggtgctgatccttctcaggaacttcaagaactagctaatgctgaaagaagcggagagtgttatcaccaggttgccatgggtcaaggtcaagctgatttagcaattcaaatgctaaaagaatgtgcccgcaatggagactggctctgtttgaagaacttacatcttgtggtatcttggctgccagttctggaaaaggaattgaatactcttcaacctaaagatacctttcgtctttggctcactgcagaagttcatcccaactttactcctattttactacagtcaagtctgaagataacatatgagtcacctccaggtttaaagaagaatttaatgcgtacttatgagtcttggactcctgagcaaattagcaaaaaagataatacacatcgagctcatgctctcttcagtcttgcatggtttcatgctgcatgtcaagaaagaagaaactatattcctcagggttggacaaagttttatgaattttctttatcagatcttcgggctgggtacaacattattgacagactttttgatggtgccaaagatgtacaatgggaatttgtacatggtttacttgaaaatgctatttatggaggacgtatagacaactattttgaccttagagttcttcagtcatacctgaagcagttttttaattcttcagttattgatgtattcaaccaaaggaacaagaaaagcatttttccatattccgtatctctaccacaatcctgcagcattttggactatcgtgctgtcattgagaaaattccagaggacgacaaacctagtttctttggtctgcctgccaatatcgctcgctcatctcagcgcatgatcagttctcaggttatttcacagttgaggattttgggcagatccataacagctggttccaaatttgatagagaaatctggtctaatgaactttctcctgtcctcaatctctggaagaaactaaaccagaattcaaacctaatacatcagaaagtgcctcctcctaacgatcgacaaggatctccaatactgtcattcatcattcttgaacaatttaatgctattcgtttagtacaaagtgtccaccagtctcttgctgctctcagcaaagtcatcagaggaactactttactgagttcagaagtacaaaaattggcaagtgctttattaaaccaaaagtgtcctctcgcatggcagagcaagtgggaaggcccagaagatcccttacaatacctgagaggtcttgttgcccgtgcccttgcaatacagaactgggtagataaagctgaaaaacaggctcttctctctgaaacacttgacctatcagaacttttccatccagacacatttcttaatgctcttcgccaggaaactgcaagggcagtgggtcgttctgtggatagccttaaatttgtagcctcatggaaaggtcgactgcaagaagcaaagctacaaattaagatcagtggcttgttactagaaggatgtagttttgatggaaatcaactttctgaaaatcagcttgattctcccagcgtgtcatcagtgctcccttgttttatgggctggattccacaggatgcatgtggtccatattctccggatgagtgcatctctttgcctgtttacacaagtgctgaaagggatcgtgtggttaccaatattgatgttccatgtgggggcaaccaagaccagtggattcagtgtggagcagctctattcctaaaaaatcagtag

SEQ ID NO: 9043 - DNA, 3305 bp, Homo sapiens
  source 1..3305: mol_type = unassigned DNA
ggttaaaaacacatttgaaagactcacgtttagaagttatcaatcagcaggatagtaactttatcacagctcttgaattagcagtacgttttgggaaaacccttattatacaagagatggatggtgtagaacctgttctttatccattattgagacgagatctggttgctcaaggaccacgttatgtggtacaaataggtgacaaaattattgactacaatgaagaattccgcctctttttgtcaacaagaaacccaaatccttttattccaccggatgcagcttccattgttactgaggttaactttactacaacaagaagtggattacgagggcagcttttagctttaaccattcagcatgagaaacctgatttagaagaacagaaaacaaaactattacaacaggaagaagataagaaaatacagctagccaagctcgaagaatctcttctagagacacttgccacatctcaaggcaatattttggaaaataaggatttgattgagtctttgaatcagacaaaagcaagcagtgcacttattcaagagtcacttaaagaatcttacaaactccaaatttcccttgatcaagaacgggatgcctatctccccctggctgagagtgccagcaagatgtacttcattatttctgatttgtccaaaattaataacatgtaccgttttagtttggctgcttttctccgacttttccaacgagctctacaaaacaaacaggattctgaaaatacagaacagagaatccagtcacttatcagctcattacaacatatggtatatgaatatatatgtcgttgtctatttaaggctgatcagttgatgttcgctttgcattttgttcgaggcatgcatcctgaactttttcaagaaaatgaatgggatacgtttacaggtgtggttgttggagacatgttacggaaagctgactctcaacaaaaaatacgtgatcagcttccgtcttggatagatcaggaacgaagctgggccgtggcaacattaaagattgctctccccagtctttatcagaccctctgctttgaagatgcagctctgtggcgtacttattataataattcaatgtgtgagcaagagtttccatctatccttgcaaagaaagtttccttatttcagcagattcttgtagtacaggcgctaagaccggacagattgcaaagtgccatggctctttttgcatgtaaaactctgggactgaaagaggtgtccccactgcctctaaatctcaaacgtttatacaaagagacactggaaattgaacccatcttgataattatttctccgggtgctgatccttctcaggaacttcaagaactagctaatgctgaaagaagcggagagtgttatcaccaggttgccatgggtcaaggtcaagctgatttagcaattcaaatgctaaaagaatgtgcccgcaatggagactggctctgtttgaagaacttacatcttgtggtatcttggctgccagttctggaaaaggaattgaatactcttcaacctaaagatacctttcgtctttggctcactgcagaagttcatcccaactttactcctattttactacagtcaagtctgaagataacatatgagtcacctccaggtttaaagaagaatttaatgcgtacttatgagtcttggactcctgagcaaattagcaaaaaagataatacacatcgagctcatgctctcttcagtcttgcatggtttcatgctgcatgtcaagaaagaagaaactatattcctcagggttggacaaagttttatgaattttctttatcagatcttcgggctgggtacaacattattgacagactttttgatggtgccaaagatgtacaatgggaatttgtacatggtttacttgaaaatgctatttatggaggacgtatagacaactattttgaccttagagttcttcagtcatacctgaagcagttttttaattcttcagttattgatgtattcaaccaaaggaacaagaaaagcatttttccatattccgtatctctaccacaatcctgcagcattttggactatcgtgctgtcattgagaaaattccagaggacgacaaacctagtttctttggtctgcctgccaatatcgctcgctcatctcagcgcatgatcagttctcaggttatttcacagttgaggattttgggcagatccataacagctggttccaaatttgatagagaaatctggtctaatgaactttctcctgtcctcaatctctggaagaaactaaaccagaattcaaacctaatacatcagaaagtgcctcctcctaacgatcgacaaggatctccaatactgtcattcatcattcttgaacaatttaatgctattcgtttagtacaaagtgtccaccagtctcttgctgctctcagcaaagtcatcagaggaactactttactgagttcagaagtacaaaaattggcaagtgctttattaaaccaaaagtgtcctctcgcatggcagagcaagtgggaaggcccagaagatcccttacaatacctgagaggtcttgttgcccgtgcccttgcaatacagaactgggtagataaagctgaaaaacaggctcttctctctgaaacacttgacctatcagaacttttccatccagacacatttcttaatgctcttcgccaggaaactgcaagggcagtgggtcgttctgtggatagccttaaatttgtagcctcatggaaaggtcgactgcaagaagcaaagctacaaattaagatcagtggcttgttactagaaggatgtagttttgatggaaatcaactttctgaaaatcagcttgattctcccagcgtgtcatcagtgctcccttgttttatgggctggattccacaggacttattatgaaagtaatgatgttatcactatattgttgaaaaatcaggatgcatgtggtccatattctccggatgagtgcatctctttgcctgtttacacaagtgctgaaagggatcgtgtggttaccaatattgatgttccatgtgggggcaaccaagaccagtggattcagtgtggagcagctctattcctaaaaaatcagtagaatctaatgacaacaaaagccatcttcacaaaagggaacattgattctttaagctttaaatcaaacatgtggtcagtctacatttgaaatgttagttcaaaatattaacatatagttatgttgttgatgtcactgaaattttaatgtgtaaaagcagcactgtgcatcttttaaagtaataaattaatggagttattgtt

SEQ ID NO: 9044 - DNA, 720 bp, Homo sapiens
  source 1..720: mol_type = unassigned DNA
ggcgggagcagggcggggcctgagcactaggcggcggcggctggcgtggggctgcttagatgcgccacggtttcggtagcgacggtatctctagccgggcctgagctgtgctagcacctcccccaggagaccgttgcagtcggccagcccccttctccacggtaaccatgtgcgaccgaaaggccgtgatcaaaaatgcggacatgtcggaagagatgcaacaggactcggtggagtgcgctactcaggcgctggagaaatacaacatagagaaggacattgcggctcatatcaagaaggaatttgacaagaagtacaatcccacctggcattgcatcgtggggaggaacttcggtagttatgtgacacatgaaaccaaacacttcatctacttctacctgggccaagtggccattcttctgttcaaatctggttaaaagcatggactgtgccacacacccagtgatccatccaaaaacaaggactgcagcctaaattccaaataccagagactgaaattttcagccttgctaagggaacatctcgatgtttgaacctttgttgtgttttgtacagggcattctctgtactagtttgtcgtggttataaaacaattagcagaatagcctacatttgtatttattttctattccatacttctgcccacgttgttttctctcaaaatccattcctttaaaaaataaatctgatgcagatgtg

SEQ ID NO: 9045 - DNA, 697 bp, Homo sapiens
  source 1..697: mol_type = unassigned DNA
ggcggctggcgtggggctgcttagatgcgccacggtttcggtagcgacggtatctctagccgggcctgagctgtgctagcacctcccccaggagaccgttgcagtcggccagcccccttctccacggccttgcccactaggtaaccatgtgcgaccgaaaggccgtgatcaaaaatgcggacatgtcggaagagatgcaacaggactcggtggagtgcgctactcaggcgctggagaaatacaacatagagaaggacattgcggctcatatcaagaaggaatttgacaagaagtacaatcccacctggcattgcatcgtggggaggaacttcggtagttatgtgacacatgaaaccaaacacttcatctacttctacctgggccaagtggccattcttctgttcaaatctggttaaaagcatggactgtgccacacacccagtgatccatccaaaaacaaggactgcagcctaaattccaaataccagagactgaaattttcagccttgctaagggaacatctcgatgtttgaacctttgttgtgttttgtacagggcattctctgtactagtttgtcgtggttataaaacaattagcagaatagcctacatttgtatttattttctattccatacttctgcccacgttgttttctctcaaaatccattcctttaaaaaataaatctgatgcagatg

SEQ ID NO: 9046 - DNA, 814 bp, Homo sapiens
  source 1..814: mol_type = unassigned DNA
gctgacagggagagcctggggccgggccgtgtggatgccatccccgagcgcggttcgcgctcggctgaggcgctggacaagtggcttgggctcccgcgcctcagtttctctctgtggcgccgcctacctcacagacttgtgagcactcactgacgtgggtagcgcccagggcctgcggggcgcaggagagctggagtcaggcggagaccgcaggctgaccccgcagcggccgggctgtcgcggcccccacctcaggtaaccatgtgcgaccgaaaggccgtgatcaaaaatgcggacatgtcggaagagatgcaacaggactcggtggagtgcgctactcaggcgctggagaaatacaacatagagaaggacattgcggctcatatcaagaaggaatttgacaagaagtacaatcccacctggcattgcatcgtggggaggaacttcggtagttatgtgacacatgaaaccaaacacttcatctacttctacctgggccaagtggccattcttctgttcaaatctggttaaaagcatggactgtgccacacacccagtgatccatccaaaaacaaggactgcagcctaaattccaaataccagagactgaaattttcagccttgctaagggaacatctcgatgtttgaacctttgttgtgttttgtacagggcattctctgtactagtttgtcgtggttataaaacaattagcagaatagcctacatttgtatttattttctattccatacttctgcccacgttgttttctctcaaaatccattcctttaaaaaataaatctgatgcagatgtg

SEQ ID NO: 9047 - DNA, 662 bp, Homo sapiens
  source 1..662: mol_type = unassigned DNA
gatgccatccccgagcgcggttcgcgctcggctgaggcgctggacaagtggcttgggctcccgcgcctcagtttctctctgtggcgccgcctacctcacagacttgtgagcactcactgacgtgggtagcgcccagggcctgcggggcgcaggagagctggagtcaggcggagaccgcaggctgaccccgcagcggccgggctgtcgcggcccccacctcagagccactggtggccgcagaagacagtccacgtgtcttaaccagacttacaagactccaaagatgggtgccttgtatcaagcaggtgctcaacaaatgtctgctgaaaaaatgatgcagggtgcggtggttcacgcaggtaaccatgtgcgaccgaaaggccgtgatcaaaaatgcggacatgtcggaagagatgcaacaggactcggtggagtgcgctactcaggcgctggagaaatacaacatagagaaggacattgcggctcatatcaagaaggaatttgacaagaagtacaatcccacctggcattgcatcgtggggaggaacttcggtagttatgtgacacatgaaaccaaacacttcatctacttctacctgggccaagtggccattcttctgttcaaatctggttaaaagcatggactgtgccacacacccagt

SEQ ID NO: 9048 - DNA, 794 bp, Homo sapiens
  source 1..794: mol_type = unassigned DNA
gggagagcctggggccgggccgtgtggatgccatccccgagcgcggttcgcgctcggctgaggcgctggacaagtggcttgggctcccgcgcctcagtttctctctgtggcgccgcctacctcacagacttgtgagcactcactgacgtgggtagcgcccagggcctgcggggcgcaggagagctggagtcaggcggagaccgcaggctgaccccgcagcggccgggctgtcgcggcccccacctcagagccactggtggccgcagaagacagtccacgtgtcttaaccagacttacaagactccaaagatgggtgccttgtatcaagcaggtgctcaacaaatgtctgctgaaaaaatgatgcagggtgcggtggttcacgcagtaaagatggggtttcaccatgttagccaggatggtcttgatctcctgacctcgtgatccgcctgcctcggcctcccaaagtgctgggattacaggcgtgagccaccacacccggccatataaggaaagactgcctcacctgagcaagaagcttcaccctggacaaaaaccccggggctcaacactcccaaatccacccggatccccatccccaaccccttaaaggatgtccgcattgcttggcagagaccccactcttggggataatcccttaattcgtaaccatgtgcgaccgaaaggccgtgatcaaaaatgcggacatgtcggaagagatgcaacaggactcggtggagtgcgctactcaggcgctggagaaatacaacatagagaaggacattgcggctcatatc

SEQ ID NO: 9049 - DNA, 719 bp, Homo sapiens
  source 1..719: mol_type = unassigned DNA
agatgcgccacggtttcggtagcgacggtatctctagccgggcctgagctgtgctagcacctcccccaggagaccgttgcagtcggccagcccccttctccacggtgagaaactcggggggccagggggtgtcctcgctgccttatttcgccccactccggacttagccctccgcgtagcccgcgcttcctgagaagtggggtggggggcgtcgtcccgtggtggcgccggccggggtgggggcagttagtgcctggggggcgcggcccaactcaaccccttaccccaggccttgcccactaggtaaccatgtgcgaccgaaaggccgtgatcaaaaatgcggacatgtcggaagagatgcaacaggactcggtggagtgcgctactcaggcgctggagaaatacaacatagagaaggacattgcggctcatatcaagaaggaatttgacaagaagtacaatcccacctggcattgcatcgtggggaggaacttcggtagttatgtgacacatgaaaccaaacacttcatctacttctacctgggccaagtggccattcttctgttcaaatctggttaaaagcatggactgtgccacacacccagtgatccatccaaaaacaaggactgcagcctaaattccaaataccagagactgaaattttcagccttgctaagggaacatctcgatgtttgaacctttgttgtgttttgtacagg

SEQ ID NO: 9050 - DNA, 1522 bp, Homo sapiens
  source 1..1522: mol_type = unassigned DNA
agcggcagagcggagcggagctgtgaggcgccagtgcggagcgggcgggcgggcgggcggcgtgaggcggagcgcgggcggccggcgaaactccaagggcggaccgcggcagggagcgatcggcctcgggctgcgggagccggagaccgcggcggcggcggctgctgcagctgcaggaggagcccagggaacaccgcccctgcctgtgctctgcctcgggccatcgctcctccccagggcccagtgcggactcgcctccgtgaagtgtcacaccatgtctgaccggaaggcagtgatcaagaacgcagacatgtctgaggacatgcaacaggatgccgttgactgcgccacgcaggccatggagaagtacaatatagagaaggacattgctgcctatatcaagaaggaatttgacaagaaatataaccctacctggcattgtatcgtgggccgaaattttggcagctacgtcacacacgagacaaagcacttcatctatttttacttgggtcaagttgcaatcctcctcttcaagtcaggctaggtggccatggtgaaggtgtcagtggcggcggcagcgatggcaagcaggcggcgttgctgggactgttttgcactggagccagcatcaggatgtcctctccaatggctgtgctactgcatggactgtatactcgatttcatgtgtatgtcgcagtaaacaaaaccaaacctctttctgtttagttgcctgggggaagaaggctgctttatgtttatttttcaagactttaaaaatattttttggttgtattgcactaggaaatctctcccacctctcccttttctctttctttccctatacaaaataaaaggcccaccatagagactaggcggccgaaagactaggagggctgaggaaaagaaataggtctctggaggtggaactaaaactgtgcagctgcctcttcctggcggtggatgctgctttgggagggccagggaggctgcagggggacagtgttgggattgtcaaggaaaaaggggtaggaaggaaggtggagggattgatctagtaccagggagaatattccactgaactgtgattctatggcttggggcggagggtggggtggggatgccttctttaggggccctgagatgtgtttgtctgtggtgtgtgggagtggggagcagatttgtcttgctgtctttgtcagaatttctaagtaagggctgtgtctttgtggattaccttcttttgttcttcctgccagagatcatgacaggaggatgctggggtaggattagcttgaatcttttttttctttacatttttctcctgtctgctccctgcttagccctcagtttcctcattcctctggagttctcttagagcagcccctgttgttagttggctggcaagggaatttctggtgactgtagttccttagttaggtcttagcaatcaaaccaaattgatgtctcccttgactcttctgtgtatatgtgtgaatatgtgtgtatatgtgtgtgtatgtgt

SEQ ID NO: 9051 - DNA, 1464 bp, Homo sapiens
  source 1..1464: mol_type = unassigned DNA
ccggatcggtcggaaatggcagaggtggaggagacactgaagcgactgcagagccagaagggagtgcagggaatcatcgtcgtgaacacagaaggaggctgggagcccttgggacactgtggagacaggagcaggccccctgctcagggctgcccctgatcagttgggtggcctgaggcaactcctttccccgcttcagccctcaactgcctcgagtcctgtgatggtccagggaatctcttttgggcacttcttgctctaagacctgaaagacttttgtcactaagagagaaactgtcttctgggactggacattttgactccaaggagacaaccccaggggccaacagccccagctgtgacccccaggcttccacatgaactcacaaaggagaggccctcattcttgccttaaaactgcccctaaagccaagccttttcactgggaagccctagctgcttaccttttggatactagtgagtgctgcttttttgtatactcatggggctgattgcaccatagctgagaacgtggaatgcagaatgagcccacctggctttgaatctgggccctacttaacttatcagctatgtggttttgggcataagccactttctctgttaagttttctcatttgtaaaatgtgggtcataattctgccttcctctaggggaagcttttagaatagtgcctggcatgaaatgcctatgaatgtctcagttagtgtgtgtgtgtctttaacttgcgtcccattctcagggcccccacatcagtgtctcgtttacatctcacacagtgaccctgcgaggcaagggtttgcccagtttgcagatgagaaacccaaagctgagagaggtgtggggaaccgcccaaggtcacccagctgtgaatgaacgtggtcagaacacagaatctgagttggtcacacttcccactgatccatggggcctttaagccctctggaagcttccattaaagatgattatttgaggataattgtattgggatgcctatgatcttatctagggttttcctacccatccccaacattcagctcagctgcctctttcttgaggacaccctcactgatcaccccagcccagccagagtggttgctcctgctcctgcccctgaacctatgacatacccaagtcccaatactttcgagccatctgccactgccttttgacatctctgccttggctagattcaaatggtgtttcataataaaagtctgagtttaagcagctttaccgaaaacgcaagggaagtttcattccatttatacttctccagaccccctgccatcctctgctgctacccacacaggcagaataaaaggcttaaatgtgtaagtcccatgaaggcaaagattggtctcttgtgttcactgctgtctgtagtacttaggatggtgttggcccagagttggtgtttgattaaagtatctgttgaatttttta

SEQ ID NO: 9052 - DNA, 675 bp, Homo sapiens
  source 1..675: mol_type = unassigned DNA
cacaggactcgctaagtgttcgctacgcggggctaccggatcggtcggaaatggcagaggtggaggagacactgaagcgactgcagagccagaagggagtgcagggaatcatcgtcgtgaacacagaaggcattcccatcaagagcaccatggacaaccccaccaccacccagtatgccagcctcatgcacagcttcatcctgaaggcacggagcaccgtgcgtgacatcgacccccagaacgatctcaccttccttcgaattcgctccaagaaaaatgaaattatggttgcaccagataaagactatttcctgattgtgattcagaatccaaccgaataagccactctcttggctccctgtgtcattccttaatttaatgccccccaagaatgttaatgtcaatcatgtcagtggactagcacatggcagtcgcttggaacccactcacaccaatccagtgaccgtgtgtgggctggcggctcttctcccccaccaacggaacccctgtgtgcaccaaccttccccagagctccggagcgccctctcctcacttccaggttttggagcaagagcttgcaggaagcccgcacccagcttccttctgaccttcagttcactttgtcgcccttggagaaagctgtttttctttaactaaaaataaccaaaatgctta

SEQ ID NO: 9053 - DNA, 1072 bp, Homo sapiens
  source 1..1072: mol_type = unassigned DNA
gttcgctacgcggggctaccggatcggtcggaaatggcagaggtggaggagacactgaagcgactgcagagccagaagggagtgcagggaatcatcgtcgtgaacacagaaggcattcccatcaagagcaccatggacaaccccaccaccacccagtatgccagcctcatgcacagcttcatcctgaaggcacggagcaccgtgcgtgacatcgacccccagaacgatctcaccttccttcgaattcgctccaagaaaaatgaaattatggttgcaccaggtaaggggtcttctacctccccatgtaggaacagacctcatggcacattctctgtggctcatcaggagtcctggcacagtggtgtctccagaggatccaagcagggcccgaggagttgaaggaattgggttgttgcctcactgcctagccagcctccagctggtgtcccatagcagatcctcccagggaccggccccagagggtaaccccagtctcctgagatagacagacacgtgagcatcatgtgtgtctccccttccttgataggagaaaactcaaaggcatttgggacatagaggagggtgtggccaggcctgtctggggctgtctgcaaaagcttcccagaagaggggacactggagctgaatcttaagggcaccaggaagcagtgtgagcaaggcggaggggcggaaagccacgtttggaagaatattcagtgattcttctccaaaatgtaaagcaaaagtactgtatcattttatccttgaaaacatgttctctgcccacttgtaaaggccaggcctgtctttaggccccttacagccagcttttcctgccgcacgggagcagattgctttgtttcctttacgcgaggtgcttgccttgcatttgggggctctgtggtgcaaccaaggcctgtgtttagtccttaggatcattctcagggtgaggagatgctcattctgggaggagcccacaaggatgggagcacaggagcgagcaacagagccacatctcctgcccggctccctcgctctcactcatggactggggtggcaggcagagcctcca

SEQ ID NO: 9054 - DNA, 497 bp, Homo sapiens
  source 1..497: mol_type = unassigned DNA
cagccctgacgcttccgtggggccacttccttttttgtctcctagcaacggcgggtagcgttgttgacatcccgggaggctgtgccgccggcctgagcccagagtttcgcggcctccgcgatggcagaggtggaggaaaccttaaagaggatccagagtcataaaggggttattggaactatggttgtaaatgcagaaggtattcccatccgaacaaccttggacaactcaacaactgttcaatatgcaggccttcttcatcacctgacaatgaaagccaaaagcacagttcgtgatattgatcctcagaacgacctgacttttcttaggatcagatcaaagaaacatgaaatcatggtagctccagataaggaatatcttctgatcgtcattcagaatccatgtgaatagacctgcgatggccaaggctgtttaagcgacactgggttggaaacacttggctctctcatgagtattaaaattctatttcaatctaa

SEQ ID NO: 9055 - DNA, 512 bp, Homo sapiens
  source 1..512: mol_type = unassigned DNA
atcccgggaggctgtgccgccggcctgagcccagagtttcgcggcctccgcgatggcagaggtggaggaaaccttaaagaggatccagagtcataaaggggttattggaactatggttgtaaatgcagaagatccacgctttgtgaccttcaagtatgcaagacagctgactgccttccagagaaaaagtggccaacaaatcacaataaaagattagcaaggtattcccatccgaacaaccttggacaactcaacaactgttcaatatgcaggccttcttcatcacctgacaatgaaagccaaaagcacagttcgtgatattgatcctcagaacgacctgacttttcttaggatcagatcaaagaaacatgaaatcatggtagctccagataaggaatatcttctgatcgtcattcagaatccatgtgaatagacctgcgatggccaaggctgtttaagcgacactgggttggaaacacttggctctctcatgagtattaaaattctatttc

SEQ ID NO: 9056 - DNA, 1036 bp, Homo sapiens
  source 1..1036: mol_type = unassigned DNA
gtgcgtcctctggagaagtgcgcgcgtgtaagtgtggcgagtgtggccaagggtgccggaggcagggttcgggagctgacatggacccaaatcctcgggccgccctggagcgccagcagctccgccttcgggagcggcaaaaattcttcgaggacattttacagccagagacagagtttgtctttcctctgtcccatctgcatctcgagtcgcagagaccccccataggtagtatctcatccatggaagtgaatgtggacacactggagcaagtagaacttattgaccttggggacccggatgcagcagatgtgttcttgccttgcgaagatcctccaccaaccccccagtcgtctgggatggacaaccatttggaggagctgagcctgccggtgcctacatcagacaggaccacatctaggacctcctcctcctcctcctccgactcctccaccaacctgcatagcccaaatccaagtgatgatggagcagatacgcccttggcacagtcggatgaagaggaggaaaggggtgatggaggggcagagcctggagcctgcagctagcagtgggcccctgcctacagactgaccacgctggctattctccacatgagaccacaggcccagccagagcctgtcgggagaagaccagactctttacttgcagtaggcaccagaggtgggaaggatggtgggattgtgtacctttctaagaattaaccctctcctgctttactgctaattttttcctgctgcaaccctcccaccagtttttggcttactcctgagatatgatttgcaaatgaggagagagaagatgaggttggacaagatgccactgcttttcttagcactcttccctcccctaaaccatcccgtagtcttctaatacagtctctcagacaagtgtctctagatggatgtgaactccttaactcatcaagtaaggtggtactcaagccatgctgcctccttacatcctttttggaacagagcacggtataaataataaactaataataatatgccaacca

SEQ ID NO: 9057 - DNA, 1078 bp, Homo sapiens
  source 1..1078: mol_type = unassigned DNA
cccgggagccctggaggcgcagccccaccccggccggcgcggctcgctcccacgcccccgccgcggcctcgctggagcggacggactgagtcagagggggcgccagcgctgcaggagctgacatggacccaaatcctcgggccgccctggagcgccagcagctccgccttcgggagcggcaaaaattcttcgaggacattttacagccagagacagagtttgtctttcctctgtcccatctgcatctcgagtcgcagagaccccccataggtagtatctcatccatggaagtgaatgtggacacactggagcaagtagaacttattgaccttggggacccggatgcagcagatgtgttcttgccttgcgaagatcctccaccaaccccccagtcgtctgggatggacaaccatttggaggagctgagcctgccggtgcctacatcagacaggaccacatctaggacctcctcctcctcctcctccgactcctccaccaacctgcatagcccaaatccaagtgatgatggagcagatacgcccttggcacagtcggatgaagaggaggaaaggggtgatggaggggcagagcctggagcctgcagctagcagtgggcccctgcctacagactgaccacgctggctattctccacatgagaccacaggcccagccagagcctgtcgggagaagaccagactctttacttgcagtaggcaccagaggtgggaaggatggtgggattgtgtacctttctaagaattaaccctctcctgctttactgctaattttttcctgctgcaaccctcccaccagtttttggcttactcctgagatatgatttgcaaatgaggagagagaagatgaggttggacaagatgccactgcttttcttagcactcttccctcccctaaaccatcccgtagtcttctaatacagtctctcagacaagtgtctctagatggatgtgaactccttaactcatcaagtaaggtggtactcaagccatgctgcctccttacatcctttttggaacagagcacggtataaataataaactaataataatatgccaacca

SEQ ID NO: 9058 - DNA, 1417 bp, Homo sapiens
  source 1..1417: mol_type = unassigned DNA
agcactggaggaagggaaccctccaccctgagatctctgtctctatcctatcctgtccctggccttctgaggcaagcggggccaattaaggggaaaacgtacctcctccatttgtgctgaaccaatccctccaacccctctcaggagggcatgatatggagagttgggcattggctgtgttccctgaatacagagtatctctcttgtggtgcctggaactggcatcccctttgtggagcttagggcaagccccgcctctgcatgagacttggtttgtgggacacacttggtttcagggaaggggaaagaggtcaccaagggcagaggtgtccaggccggagccaggggccccactgttgggatgctggctgcagtggggcgccccaagcccaggtcccctctgtcttctctttcgactttgcagctgtacttgttttgctcctctacccgcaggagctgacatggacccaaatcctcgggccgccctggagcgccagcagctccgccttcgggagcggcaaaaattcttcgaggacattttacagccagagacagagtttgtctttcctctgtcccatctgcatctcgagtcgcagagaccccccataggtagtatctcatccatggaagtgaatgtggacacactggagcaagtagaacttattgaccttggggacccggatgcagcagatgtgttcttgccttgcgaagatcctccaccaaccccccagtcgtctgggatggacaaccatttggaggagctgagcctgccggtgcctacatcagacaggaccacatctaggacctcctcctcctcctcctccgactcctccaccaacctgcatagcccaaatccaagtgatgatggagcagatacgcccttggcacagtcggatgaagaggaggaaaggggtgatggaggggcagagcctggagcctgcagctagcagtgggcccctgcctacagactgaccacgctggctattctccacatgagaccacaggcccagccagagcctgtcgggagaagaccagactctttacttgcagtaggcaccagaggtgggaaggatggtgggattgtgtacctttctaagaattaaccctctcctgctttactgctaattttttcctgctgcaaccctcccaccagtttttggcttactcctgagatatgatttgcaaatgaggagagagaagatgaggttggacaagatgccactgcttttcttagcactcttccctcccctaaaccatcccgtagtcttctaatacagtctctcagacaagtgtctctagatggatgtgaactccttaactcatcaagtaaggtggtactcaagccatgctgcctccttacatcctttttggaacagagcacggtataaataataaactaataataatatgccaacca

SEQ ID NO: 9059 - DNA, 1537 bp, Homo sapiens
  source 1..1537: mol_type = unassigned DNA
tagcgttgtgacctgggcggcagctctaagagcctttcccgggaatcggcgtcagcgcctcgctcctccgccgccagcccgcggccgcacggtctccccagacttccgtggccctgccttggccagtcggggttgggtccctctccacctctgtggcgcccgtggagctggccagggtctgggatacgctgggtgcagatgaggtggggaaggcagtctgcggaggatgacgtctgatcctcaagctagaaactcccttgcctctggtgatgggctcagagcagaacgccgggaaggagatgagcgaatgggaatgaatgcaccgacctgggctggcccatagcctcagtgctctggcagggtctcagcttctcagccctaggggtcaggaggcctgctctgaactggacccagaacccgcctttccaattgctcctcactgactaatggggagataagtcagtgagatgtgtcccaggagggggacgcataaagagctgttggagttcaaaggaaagatggtagtctcctaaatagctcaccttcacaagcagggtcttgtatttgaggcaggagctgacatggacccaaatcctcgggccgccctggagcgccagcagctccgccttcgggagcggcaaaaattcttcgaggacattttacagccagagacagagtttgtctttcctctgtcccatctgcatctcgagtcgcagagaccccccataggtagtatctcatccatggaagtgaatgtggacacactggagcaagtagaacttattgaccttggggacccggatgcagcagatgtgttcttgccttgcgaagatcctccaccaaccccccagtcgtctgggatggacaaccatttggaggagctgagcctgccggtgcctacatcagacaggaccacatctaggacctcctcctcctcctcctccgactcctccaccaacctgcatagcccaaatccaagtgatgatggagcagatacgcccttggcacagtcggatgaagaggaggaaaggggtgatggaggggcagagcctggagcctgcagctagcagtgggcccctgcctacagactgaccacgctggctattctccacatgagaccacaggcccagccagagcctgtcgggagaagaccagactctttacttgcagtaggcaccagaggtgggaaggatggtgggattgtgtacctttctaagaattaaccctctcctgctttactgctaattttttcctgctgcaaccctcccaccagtttttggcttactcctgagatatgatttgcaaatgaggagagagaagatgaggttggacaagatgccactgcttttcttagcactcttccctcccctaaaccatcccgtagtcttctaatacagtctctcagacaagtgtctctagatggatgtgaactccttaactcatcaagtaaggtggtactcaagccatgctgcctccttacatcctttttggaacagagcacggtataaataataaactaataataatatgccaacca

SEQ ID NO: 9060 - DNA, 1207 bp, Homo sapiens
  source 1..1207: mol_type = unassigned DNA
ctcgttcccggctcccagggcccgtcggtcccccgggagccctggaggcgcagccccaccccggccggcgcggctcgctcccacgcccccgccgcggcctcgctggagcggacggactgagtcagagggggcgccagcgctgcaggagctgacatggacccaaatcctcgggccgccctggagcgccagcagctccgccttcgggagcggcaaaaattcttcgaggacattttacagccagagacagagtttgtctttcctctgtcccatctgcatctcgagtcgcagagaccccccataggtagtatctcatccatggaagtgaatgtggacacactggagcaagtagaacttattgaccttggggacccggatgcagcagatgtgttcttgccttgcgaagatcctccaccaaccccccagtcgtctggtatgcccctctgctttggggacttcagtgccagtcagccagagccggatgtcaggctctgaaacgaggctacaaggctgggctggggaagtacacaaggatggacaaccatttggaggagctgagcctgccggtgcctacatcagacaggaccacatctaggacctcctcctcctcctcctccgactcctccaccaacctgcatagcccaaatccaagtgatgatggagcagatacgcccttggcacagtcggatgaagaggaggaaaggggtgatggaggggcagagcctggagcctgcagctagcagtgggcccctgcctacagactgaccacgctggctattctccacatgagaccacaggcccagccagagcctgtcgggagaagaccagactctttacttgcagtaggcaccagaggtgggaaggatggtgggattgtgtacctttctaagaattaaccctctcctgctttactgctaattttttcctgctgcaaccctcccaccagtttttggcttactcctgagatatgatttgcaaatgaggagagagaagatgaggttggacaagatgccactgcttttcttagcactcttccctcccctaaaccatcccgtagtcttctaatacagtctctcagacaagtgtctctagatggatgtgaactccttaactcatcaagtaaggtggtactcaagccatgctgcctccttacatcctttttggaacagagcacggtataaataataaactaataataatatgccaacca

SEQ ID NO: 9061 - DNA, 1481 bp, Homo sapiens
  source 1..1481: mol_type = unassigned DNA
cgagtgtggccaagggtgccggaggcagggttcgggtgcgtagtcgttgcgtgggcgctgcccaaaaggcgcagagcatcaagtgtgcgtgggcagaaccggcgcgggcgcccgccgcgggtctgcgcggggcgggggcgcagcaagtgcatccgagcgagcggagactagcgcaccggcgtcggtggcgagggtggtgcagaggagtccggctgggcggagggaggaaggatgggtgcgggtaactttttgaccgccttggaagtaccagtagccgcgctcgcaggggctgcctccgaccgccgggcgagctgcgagcgagtgagcccgccaccgcccctcccccacttccgcctcccgcctcttcctcgttcccggctcccagggcccgtgtccaggccggagccaggggccccactgttgggatgctggctgcagtggggcgccccaagcccaggtcccctctgtcttctctttcgactttgcagctgtacttgttttgctcctctacccgcaggagctgacatggacccaaatcctcgggccgccctggagcgccagcagctccgccttcgggagcggcaaaaattcttcgaggacattttacagccagagacagagtttgtctttcctctgtcccatctgcatctcgagtcgcagagaccccccataggtagtatctcatccatggaagtgaatgtggacacactggagcaagtagaacttattgaccttggggacccggatgcagcagatgtgttcttgccttgcgaagatcctccaccaaccccccagtcgtctgggatggacaaccatttggaggagctgagcctgccggtgcctacatcagacaggaccacatctaggacctcctcctcctcctcctccgactcctccaccaacctgcatagcccaaatccaagtgatgatggagcagatacgcccttggcacagtcggatgaagaggaggaaaggggtgatggaggggcagagcctggagcctgcagctagcagtgggcccctgcctacagactgaccacgctggctattctccacatgagaccacaggcccagccagagcctgtcgggagaagaccagactctttacttgcagtaggcaccagaggtgggaaggatggtgggattgtgtacctttctaagaattaaccctctcctgctttactgctaattttttcctgctgcaaccctcccaccagtttttggcttactcctgagatatgatttgcaaatgaggagagagaagatgaggttggacaagatgccactgcttttcttagcactcttccctcccctaaaccatcccgtagtcttctaatacagtctctcagacaagtgtctctagatggatgtgaactccttaactcatcaagtaaggtggtactcaagccatgctgcctccttacatcctttttggaacagagcacggtataaataataaactaataataatatgccaacca

SEQ ID NO: 9062 - DNA, 1202 bp, Homo sapiens
  source 1..1202: mol_type = unassigned DNA
agccgggcgagtcccagggcaggggtcctccgccgccttgcacctgccctgctgggcggcaccgggtcagtgccctgccccctcctgcgggtcccaactctctctttcccatcgtgcgtcctctggagaagtgcgcgcgtgagctgacatggacccaaatcctcgggccgccctggagcgccagcagctccgccttcgggagcggcaaaaattcttcgaggacattttacagccagagacagagtttgtctttcctctgtcccatctgcatctcgagtcgcagagaccccccataggtagtatctcatccatggaagtgaatgtggacacactggagcaagtagaacttattgaccttggggacccggatgcagcagatgtgttcttgccttgcgaagatcctccaccaaccccccagtcgtctggtatgcccctctgctttggggacttcagtgccagtcagccagagccggatgtcaggctctgaaacgaggctacaaggctgggctggggaagtacacaaggatggacaaccatttggaggagctgagcctgccggtgcctacatcagacaggaccacatctaggacctcctcctcctcctcctccgactcctccaccaacctgcatagcccaaatccaagtgatgatggagcagatacgcccttggcacagtcggatgaagaggaggaaaggggtgatggaggggcagagcctggagcctgcagctagcagtgggcccctgcctacagactgaccacgctggctattctccacatgagaccacaggcccagccagagcctgtcgggagaagaccagactctttacttgcagtaggcaccagaggtgggaaggatggtgggattgtgtacctttctaagaattaaccctctcctgctttactgctaattttttcctgctgcaaccctcccaccagtttttggcttactcctgagatatgatttgcaaatgaggagagagaagatgaggttggacaagatgccactgcttttcttagcactcttccctcccctaaaccatcccgtagtcttctaatacagtctctcagacaagtgtctctagatggatgtgaactccttaactcatcaagtaaggtggtactcaagccatgctgcctccttacatcctttttggaacagagcacggtataaataataaactaataataatatgccaacca

SEQ ID NO: 9063 - DNA, 1118 bp, Homo sapiens
  source 1..1118: mol_type = unassigned DNA
caggaatcaggggcagccgggcgagtcccagggcaggggtcctccgccgccttgcacctgccctgctgggcggcaccgggtcagtgccctgccccctcctgcgggtcccaactctctctttcccatcgtgcgtcctctggagaagtgcgcgcgtgagctgacatggacccaaatcctcgggccgccctggagcgccagcagctccgccttcgggagcggcaaaaattcttcgaggacattttacagccagagacagagtttgtctttcctctgtcccatctgcatctcgagtcgcagagaccccccataggtagtatctcatccatggaagtgaatgtggacacactggagcaagtagaacttattgaccttggggacccggatgcagcagatgtgttcttgccttgcgaagatcctccaccaaccccccagtcgtctgggatggacaaccatttggaggagctgagcctgccggtgcctacatcagacaggaccacatctaggacctcctcctcctcctcctccgactcctccaccaacctgcatagcccaaatccaagtgatgatggagcagatacgcccttggcacagtcggatgaagaggaggaaaggggtgatggaggggcagagcctggagcctgcagctagcagtgggcccctgcctacagactgaccacgctggctattctccacatgagaccacaggcccagccagagcctgtcgggagaagaccagactctttacttgcagtaggcaccagaggtgggaaggatggtgggattgtgtacctttctaagaattaaccctctcctgctttactgctaattttttcctgctgcaaccctcccaccagtttttggcttactcctgagatatgatttgcaaatgaggagagagaagatgaggttggacaagatgccactgcttttcttagcactcttccctcccctaaaccatcccgtagtcttctaatacagtctctcagacaagtgtctctagatggatgtgaactccttaactcatcaagtaaggtggtactcaagccatgctgcctccttacatcctttttggaacagagcacggtataaataataaactaataataatatgccaacca

SEQ ID NO: 9064 - DNA, 1233 bp, Homo sapiens
  source 1..1233: mol_type = unassigned DNA
acacttggtttcagggaaggggaaagaggtcaccaagggcagaggtgtccaggccggagccaggggccccactgttgggatgctggctgcagtggggcgccccaagcccaggtcccctctgtcttctctttcgactttgcagctgtacttgttttgctcctctacccgcaggagctgacatggacccaaatcctcgggccgccctggagcgccagcagctccgccttcgggagcggcaaaaattcttcgaggacattttacagccagagacagagtttgtctttcctctgtcccatctgcatctcgagtcgcagagaccccccataggtagtatctcatccatggaagtgaatgtggacacactggagcaagtagaacttattgaccttggggacccggatgcagcagatgtgttcttgccttgcgaagatcctccaccaaccccccagtcgtctggtatgcccctctgctttggggacttcagtgccagtcagccagagccggatgtcaggctctgaaacgaggctacaaggctgggctggggaagtacacaaggatggacaaccatttggaggagctgagcctgccggtgcctacatcagacaggaccacatctaggacctcctcctcctcctcctccgactcctccaccaacctgcatagcccaaatccaagtgatgatggagcagatacgcccttggcacagtcggatgaagaggaggaaaggggtgatggaggggcagagcctggagcctgcagctagcagtgggcccctgcctacagactgaccacgctggctattctccacatgagaccacaggcccagccagagcctgtcgggagaagaccagactctttacttgcagtaggcaccagaggtgggaaggatggtgggattgtgtacctttctaagaattaaccctctcctgctttactgctaattttttcctgctgcaaccctcccaccagtttttggcttactcctgagatatgatttgcaaatgaggagagagaagatgaggttggacaagatgccactgcttttcttagcactcttccctcccctaaaccatcccgtagtcttctaatacagtctctcagacaagtgtctctagatggatgtgaactccttaactcatcaagtaaggtggtactcaagccatgctgcctccttacatcctttttggaacagagcacggtataaataataaactaataataatatgccaacca

SEQ ID NO: 9065 - DNA, 16742 bp, Homo sapiens
  source 1..16742: mol_type = unassigned DNA
atggctttaggctagattcttttgaatagttatcagcatattatttgctgtgtgttgcatatgcatgttgaagcatatttaaggagccactaaaagctgtaatattcagctgccacttttcaccgttagaagtagagctttttccagacctcctaccttttagtctactttgaaaggtgaaagaaagaacatcgtttcaggaataaaaatgcacagtagtagttatagttaccgtagcagtgattctgtgtttagtaacactaccagcactcgaaccagtcttgattcaaatgaaaatcttctcttggttcattgtggtccaacactgatcaactcttgcattagcttcggcagtgaatcctttgatggacacaggttagaaatgttgcaacagattgccaacagagttcagagggacagtgtcatctgtgaagacaaactgattcttgctggaaatgctcttcagtctgattctaaaagattagaatcaggagtgcagtttcagaatgaagcagaaattgctgggtatatacttgaatgtgagaaccttttacgccagcatgtaattgatgtacagattcttattgatggaaaatactaccaggcagatcaattggtacagagggttgcaaaactgcgtgacgaaattatggccttaaggaacgaatgttcttctgtgtacagcaaaggacgcatactgacaacagaacagacaaagctcatgatatcaggaatcactcaaagtttaaactcaggatttgcacagaccttacaccctagtctgacctcagggctgacccagagtttaacaccttccctaacctcttctagtatgacttctggcctgtcatcagggatgacttcccgcctgactccatctgtcactccagcttatacacctggtttcccatcaggattagttccaaatttcagttcaggagtagagccaaattcattgcaaactttgaagttgatgcagatccgaaaaccccttctaaagtcttctttgctggatcaaaatttaacagaagaagaaatcaatatgaaatttgttcaggatcttttgaattgggttgatgagatgcaggtacaactggaccgcactgagtggggctcagatttgccaagtgttgaaagccatttagaaaatcataaaaatgttcatagagctattgaagaatttgaatctagtctcaaagaagctaaaatcagtgagattcaaatgacagcacctcttaaactgacttatgcagaaaagttgcacagattagagagtcagtatgcaaaactcttgaatacatccaggaatcaagaacggcaccttgatacactccataattttgtaagtcgtgcgactaatgaacttatttggttgaatgaaaaagaagaggaggaagttgcttatgactggagtgagagaaacaccaacatagctaggaaaaaagattatcatgctgaattaatgagagaacttgatcaaaaggaagaaaatattaaatcagttcaggagatagcagagcagctacttctagaaaatcatccagcccggttaactattgaggcctacagagcggcaatgcagacgcagtggagctggatcttacagctctgccagtgtgtggagcagcacataaaggagaacacagcgtatttcgagtttttcaatgatgccaaagaagctactgattacttaaggaatctaaaagatgccattcagcggaagtacagctgtgatagatcaagcagcattcacaagctagaagaccttgttcaggaatcaatggaagagaaagaagaacttctgcagtacaaaagcactatagcaaacctaatgggaaaagcaaaaacaataattcaactgaagccaaggaattctgactgtccactcaaaacttctattccgatcaaagctatctgtgactacagacaaattgagataaccatttacaaagacgatgaatgtgttttggcgaataactctcatcgtgctaaatggaaggtcattagtcctactgggaatgaggctatggtcccatctgtgtgcttcaccgttcctccaccaaacaaagaagcggtggaccttgccaacagaattgagcaacagtatcagaatgtcctgactctttggcatgagtctcacataaacatgaagagtgtagtatcctggcattatctcatcaatgaaattgatagaattcgagctagcaatgtggcttcaataaagacaatgctacctggtgaacatcagcaagttctaagtaatctacaatctcgttttgaagattttctggaagatagccaggaatcccaagtcttttcaggctcagatataacacaactggaaaaggaggttaatgtatgtaagcagtattatcaagaacttcttaaatctgcagaaagagaggagcaagaggaatcagtttataatctctacatctctgaagttcgaaacattagacttcggttagagaactgtgaagatcggctgattagacagattcgaactcccctggaaagagatgatttgcatgaaagtgtgttcagaatcacagaacaggagaaactaaagaaagagctggaacgacttaaagatgatttgggaacaatcacaaataagtgtgaggagtttttcagtcaagcagcagcctcttcatcagtccctaccctacgatcagagcttaatgtggtccttcagaacatgaaccaagtctattctatgtcttccacttacatagataagttgaaaactgttaacttggtgttaaaaaacactcaagctgcagaagccctcgtaaaactctatgaaactaaactgtgtgaagaagaagcagttatagctgacaagaataatattgagaatctaataagtactttaaagcaatggagatctgaagtagatgaaaagagacaggtattccatgccttagaggatgagttgcagaaagctaaagccatcagtgatgaaatgtttaaaacgtataaagaacgggaccttgattttgactggcacaaagaaaaagcagatcaattagttgaaaggtggcaaaatgttcatgtgcagattgacaacaggttacgggacttagagggcattggcaaatcactgaagtactacagagacacttaccatcctttagatgattggatccagcaggttgaaactactcagagaaagattcaggaaaatcagcctgaaaatagtaaaaccctagccacacagttgaatcaacagaagatgctggtgtccgaaatagaaatgaaacagagcaaaatggacgagtgtcaaaaatatgcagaacagtactcagctacagtgaaggactatgaattacaaacaatgacctaccgggccatggtagattcacaacaaaaatctccagtgaaacgccgaagaatgcagagttcagcagatctcattattcaagagttcatggacctaaggactcgatatactgccctggtcactctcatgacacaatatattaaatttgctggtgattcattgaagaggctggaagaggaggagaagtcactggaagaagaaaagaaagaacatgttgaaaaagccaaagaattgcaaaaatgggtatcaaatatcagcaagacattgaaagatgcagagaaggctggaaaacctcccttctctaagcaaaagatttccagtgaggaaatatcaaccaagaaggaacaattatcggaagcacttcaaactatacagctttttttggcaaaacatggagacaaaatgacagatgaagaaagaaatgaattggaaaaacaagtgaaaactcttcaggaaagttataatttattattcagtgaatctctgaaacagctacaagaatcacaaacctcaggagatgtaaaggtagaggagaagattgtagcagagcgtcagcaggagtataaagagaaactccaagggatatgtgatcttcttacccaaactgaaaaccgcctaattggtcaccaagaagccttcatgattggagatggcacagttgagttaaagaaatatcagtccaagcaagaggaattacagaaagatatgcaaggaagtgcacaggcattggctgaagtagtgaaaaacacagagaacttcttaaaagagaatggtgaaaagctgtcacaggaagataaggctttgattgaacagaaacttaatgaagctaagataaagtgtgaacagcttaatttaaaagcagaacagtctaaaaaggagctggataaagttgtgacaacagcaatcaaggaagaaactgaaaaggtagcagcagtgaagcagctggaagagagcaaaaccaaaatagaaaaccttttggactggttgtcaaatgttgacaaagactcagaaagggcagggacaaaacacaaacaggtaatcgaacagaacgggacccattttcaagaaggtgatggcaagtcagcaattggagaagaggatgaagttaatggtaacctgttggagactgatgttgatgggcaagttggaaccactcaggagaatctgaatcagcaatatcagaaagttaaggcccaacacgagaagatcatctctcagcaccaagcagtgatcatagccactcagtctgcacaagtgttgcttgagaaacagggtcagtatctctctcctgaagaaaaagagaaactgcaaaagaacatgaaggaactgaaagtgcattatgaaactgcactggctgagtcagagaagaaaatgaagttaactcactctctgcaggaagaattagaaaagtttgatgctgactataccgagtttgagcactggctacagcagtcagaacaagaacttgaaaacctggaggcaggtgcagatgacatcaatggtttaatgaccaaattgaagaggcagaagagtttctcagaagacgttatttctcacaaaggtgacttgagatacatcacaatttctggaaacagagtgttggaagctgccaaatcttgcagcaagagagacggtggcaaggttgatacttctgcaacccacagagaagtgcagcgcaagttggatcatgctactgatcggttcaggtctctctactctaagtgcaatgttcttggaaataatcttaaagatctggtggataaatatcaacactatgaagatgcttcatgtggacttcttgctggactccaggcctgtgaggccacagcgagcaaacacttatctgaacctattgcggtggaccccaaaaatcttcaaaggcaattagaagagaccaaggctttgcaaggacagatatcaagtcagcaggttgctgtagagaaactgaagaaaacggctgaagtgcttttagatgccaggggatctttacttccagccaagaatgatatccagaaaacacttgatgacattgttgggagatatgaggatctgtccaagtctgttaatgaacgaaatgaaaaactccagataaccttgacccgttcactgagtgtgcaggatggcttggatgaaatgctggactggatgggaaatgtggaaagttctctgaaagaacaaggtcaagtgcctttaaactctactgctcttcaggatattatcagtaaaaacattatgttggaacaggatattgcaggtcgtcagagcagtataaatgccatgaatgaaaaagtgaagaaatttatggaaacaacagatccatccactgcatcctcactgcaagccaaaatgaaagacttgtctgctcggttttcagaagcaagtcataaacacaaagaaactcttgccaaaatggaggagctaaaaaccaaagtagaactgtttgagaacctctcagaaaagctccagacatttttagaaacaaaaactcaggctcttactgaagtagatgtgccaggaaaagatgttactgaattgtctcagtatatgcaggaatcaacttctgaatttttagaacacaagaaacatcttgaagttttgcatagtctcttgaaggagatatccagccatggcttaccaagtgataaggctttggtccttgaaaaaacaaataatttgtcaaagaaattcaaggaaatggaggataccatcaaagaaaaaaaagaagctgtaacttcttgtcaagaacagttggatgctttccaagttcttgttaaatcattgaagtcatggataaaagaaacaacaaaaaaagttcccattgtacagccttcttttggtgcagaggatttaggaaaatctttggaagacactaagaaattacaagaaaagtggagtttaaaaacaccagagattcagaaagtaaacaacagtgggatctcactatgtaacttaataagtgctgtgaccacccctgcaaaggcaatagcagcagttaaatcaggtggagcagtattaaatggtgaaggaacagccacaaatactgaggaattttgggcaaataaaggtttaacatccattaaaaaggacatgactgacataagtcatggttatgaagatcttggcctcttactcaaggacaaaatagcggaactgaacactaaactctccaaattgcaaaaggctcaggaagaatcaagtgcaatgatgcagtggttacagaaaatgaacaaaactgcaacaaaatggcagcagacacctgcacctacagatactgaagctgtgaagactcaagttgagcagaataagtcgtttgaggcagaactgaagcagaatgtaaacaaagtacaggagttgaaagacaaattgacagagctgttggaggagaacccagatactcctgaggcccccagatggaaacagatgttgacagaaatagattctaagtggcaagaactcaatcaattaacaattgatagacaacaaaaactggaagaatcctccaataatctaacccagttccagactgtagaggcccaattgaaacagtggcttgtggaaaaagaacttatggtcagtgttcttgggcccttgtcaattgacccaaatatgctaaacacacaaaggcagcaggtgcagattttgctgcaagaattcgccactcggaaacctcaatatgaacagctgacagcagctggtcagggcattctgagcaggcctggagaagacccttctttacgtgggattgtgaaagagcaactggcagctgtgacccaaaaatgggatagcctaacagggcaattgagtgacagatgtgactggattgaccaagccattgttaaaagcacacagtatcaaagcctgctgagaagcctttctgataaactgagtgacttggataataaactcagcagcagtctggctgtgagcacgcaccctgatgctatgaaccaacagttggaaacagcccaaaaaatgaagcaggagatacagcaggaaaagaagcagataaaagtggcccaggcactctgtgaggatttgtcagcactggttaaagaagagtacttgaaagcagaacttagtaggcaactagaaggcatcttaaaatcatttaaggatgttgaacagaaagcagagaatcatgtccagcaccttcagtcggcctgtgcaagctctcatcaatttcagcaaatgtctagagattttcaggcttggctggatacaaagaaagaagagcaaaacaaatctcatccaatatctgccaaactcgatgtcttggagtcattaattaaagatcataaagactttagtaaaactttgaccgctcagtctcatatgtatgaaaaaaccattgcagaaggtgaaaatctgttattaaaaacacaagggtctgagaaggcagccttacagttacagcttaatacaattaaaaccaattgggatacatttaataagcaggtgaaagaaagagaaaacaagttaaaagagtcattggaaaaagcccttaagtataaagagcaagtagagactctctggccatggatagacaaatgccaaaacaacctggaggaaataaaattttgcttggatcctgctgaaggagagaattctattgccaagttaaagtctctgcagaaggaaatggaccaacactttggtatggtagaattactgaacaacacagccaatagcttgctcagtgtctgtgagatagataaagaagttgttacagatgagaataagtcactgatccagaaggtggacatggtcactgaacaacttcacagtaagaaattctgtctggagaacatgactcagaagtttaaagaatttcaagaagtttccaaagaatctaaaaggcagcttcagtgtgcaaaggagcagctagatatccatgattcgctgggatcccaggcttacagtaacaaatacctgaccatgttgcaaactcagcagaaatcacttcaggccttgaagcatcaggtagatttggctaaaagacttgcacaggaccttgtggtagaggcctcagactcaaagggaacctctgatgttttattacaagtggaaaccatagctcaagagcatagtacactaagtcagcaggttgatgaaaagtgttctttcttagaaaccaagcttcagggcattgggcatttccagaataccattcgagaaatgttttctcagttcgcagagtttgatgatgaactggatagcatggctccagtggggagagatgcagaaacattgcaaaagcaaaaggaaactataaaagcctttctaaagaaactagaagccctcatggcaagcaatgacaatgccaataaaacctgcaagatgatgttagccacagaagaaacctctcctgaccttgttggaatcaaaagggacttggaggccttaagcaaacaatgcaacaagttactggaccgagcccaagccagagaagagcaggttgaagggacaattaagcgccttgaagaattttacagcaaattgaaagaattttctattctgctccagaaagccgaagaacatgaagagtcacaaggtcctgttggtatggaaacggagacaattaatcagcagcttaacatgttcaaggtattccagaaagaagagattgaacccttgcaaggtaaacagcaagatgtaaactggttaggtcaaggccttattcagagtgctgccaaaagcactagcactcagggcttggagcatgacctggatgatgtcaatgcacggtggaagactctcaataagaaggtggctcagcgagcagcccagctgcaggaggccttgctgcactgtgggaggttccaggatgccctggagtccctgctcagctggatggtggacactgaggagcttgtggccaatcagaagcccccgtcggctgagttcaaagtggtaaaggcccagatacaagaacaaaagcttctccagagattgttggatgaccgaaaatctacggtggaggtaatcaaacgagaaggagaaaaaattgctacaacagcagagcccgcagataaagtgaagattttgaaacagctcagtctcttggatagcagatgggaggcattgcttaataaagctgaaacaaggaatcgtcagttggaaggtatctcggtggtagcacagcaatttcatgaaaccttagaaccactgaacgagtggcttacaaccatagaaaagaggctggtgaattgtgaacccataggaacccaagcatctaaacttgaggaacaaattgcacagcacaaagccttagaagatgacatcatcaatcacaataaacatttacaccaggctgttagcattggccagtccttaaaggttttgagctccagggaggataaagatatggtgcagagtaaattagacttctctcaagtatggtacattgagattcaagagaaaagtcacagcaggtctgagctcctccagcaggccttatgtaatgctaagatttttggggaagatgaagttgaactgatgaactggctgaatgaagtgcatgacaaactgagcaagctctcagtccaggattacagcactgaggggctatggaagcagcagtctgaacttcgggttctgcaagaggacatcttactcaggaaacaaaatgtagatcaggctttactaaatggtttagaactacttaaacaaaccacaggtgatgaagttttaataattcaagataaattggaagccattaaagcaaggtacaaagacattactaaactgagcactgatgtggccaagactctggaacaggcgctgcagcttgcaaggcggctgcactccacacacgaagagctgtgtacctggctggacaaagtggaggtggaattactttcatatgaaactcaggttctgaaaggagaagaagcaagtcaagcacaaatgagaccaaaggaactgaaaaaggaagctaagaacaacaaagccttactggactcccttaatgaagtgagcagtgctttgctggaactggtaccatggagggcaagagaaggacttgagaaaatggtagctgaggacaatgagcgctaccgattagtgagcgacaccatcactcagaaggtggaggagatcgatgcagccattctgcgatcacagcagtttgaccaagcagctgatgctgagttatcctggattactgaaacagaaaaaaaattgatgtctctgggtgacatcaggcttgagcaagaccagacttctgctcagcttcaagttcaaaagacattcaccatggagattttgagacacaaggatattattgatgaccttgttaaatctgggcataaaatcatgaccgcatgcagtgaagaggaaaagcaatcaatgaagaaaaaactggacaaggtactgaagaactatgataccatctgccagattaattcagaaaggtatctgcagctggaacgggcacagtccctggttaaccaattctgggaaacatatgaagaactttggccatggctgacagaaacacaatcaatcatctctcagcttcccgccccagcccttgaatatgaaactctaaggcagcagcaggaagaacatcggcaactgcgtgagttgatagctgaacacaagcctcatatagataagatgaacaaaactgggccacagttactggaattgagccctggggaaggcttttctatccaagagaagtatgtggcagccgacaccctttacagtcaaattaaagaagatgtcaaaaagcgtgctgtggcactggatgaagccatttctcaatcaactcagttccatgacaagatagatcagatccttgagagcctggaacgcatcgtggaacgtctgaggcagccaccctctatctctgcagaggttgagaagatcaaggaacagatcagtgaaaataagaatgtgtcagtagacatggaaaagctacagccgttgtatgaaactcttaaacagaggggagaggaaatgattgctagatctggggggactgataaagacatatctgccaaagctgttcaggataagcttgaccaaatggttttcatttgggagaacatacacacactggtggaagagagggaagccaaactactggatgtgatggagctagcagaaaagttctggtgtgatcacatgtcattgatagttaccattaaagatactcaagatttcatccgggacctggaagatcctggaattgatccttcagtagtaaaacaacagcaagaagcagcagagaccataagggaagaaatagatggactacaggaggagctggatatagttattaacctaggttctgaactcattgcggcatgtggggagcctgataaacccattgtcaagaagagtatagatgagttaaattcagcatgggattctctaaataaagcttggaaagaccggattgacaaacttgaggaggcaatgcaggctgccgttcagtaccaggatggactgcaggcggtatttgactgggtagatattgcaggtggtaaattagcttcaatgtctccaattggaacagatctcgaaactgtcaagcagcagattgaagagctaaagcaatttaagtctgaggcctatcaacagcagatagaaatggaaagactgaatcatcaagcagagcttttgctaaagaaagtaacagaagagagtgacaaacacactgttcaagacccattaatggaactgaaattgatatgggatagcctggaggagagaatcatcaacagacagcataaactggagggtgctctattagccttgggtcagttccaacatgccctggatgagctcctggcatggctgacacacaccgagggcttgctaagtgagcagaaacctgttggaggagaccctaaagccattgaaattgaacttgccaagcatcatgtgctccaaaatgatgtattagcccatcagtccacagtggaagccgttaataaagcaggaaatgatctaattgaatcaagtgcaggagaagaagcaagcaaccttcagaacaagctagaggttttaaatcaacgctggcaaaatgttttggaaaaaacagaacaaaggaagcagcagctggatggtgccttgcgccaggccaaagggttccatggcgaaattgaggatttgcagcagtggctgactgacacggagcgtcatctgttggcatctaaaccgctgggaggtttaccggaaacagccaaggagcagcttaatgtccatatggaagtctgtgctgcctttgaagctaaagaagaaacatataagagtctgatgcagaaaggccagcagatgcttgcaagatgcccaaaatctgcagagacaaatattgaccaagacataaataacttgaaagaaaaatgggaatcggtggaaaccaaactcaatgaaaggaaaactaaactggaagaggctctcaacttggcaatggagttccacaattctctccaagacttcatcaactggcttactcaggctgaacagaccctaaatgtagcttctcggccaagtctcatcttggacacagtcttatttcaaattgacgaacacaaggtttttgccaatgaagtaaattctcatcgtgagcagataatagagctggacaaaactggaacccacctaaaatattttagtcagaaacaagatgttgttctaatcaagaatctacttatcagtgtacaaagtcgatgggaaaaagtggttcaacggttggtagagagaggaagatctttggatgatgcaaggaagagagccaagcagttccatgaagcttggagtaaacttatggagtggctagaagagtcagaaaagtctttggattctgaactggaaatcgcaaatgatccagacaaaataaaaacacaacttgcacaacataaggagtttcagaaatcactcggagccaagcattctgtctacgacaccaccaacaggactggacgttctctgaaggagaaaacctccctggctgatgacaacctgaaactggatgacatgctgagtgaactcagagacaaatgggataccatatgtggaaaatctgtggaaagacaaaacaaattggaggaagccctgttattttctggacaattcacagatgccctacaggctctcattgattggttatatagagttgaaccccagctggcagaagaccagcctgttcatggagacattgatttggtgatgaatctgatcgataatcacaaggccttccaaaaagagttggggaagaggaccagcagtgtgcaggccctgaagcgctcagcccgagaactcatagaaggcagtcgggatgactcctcctgggtcaaggtccagatgcaggaattaagcacacgctgggagaccgtgtgtgcactttctatatcaaagcaaacacggttagaagcagccctgcgtcaggcagaggaattccactcggtggtacatgccctcttggagtggctggctgaggcggagcaaaccctgcgtttccatggtgtcctcccagatgatgaggatgctctccggactctcattgatcagcataaagaattcatgaagaaactggaagaaaagagagctgaactaaataaagccaccactatgggcgacaccgttttggctatctgccaccccgactccatcactaccattaagcactggataacaatcatccgggcgaggtttgaggaggtgctggcctgggcaaagcaacatcagcagagattagcaagtgctctggctgggcttattgccaaacaggaattgttggaagctttgctggcttggttgcaatgggctgaaactacacttactgataaggataaagaagtcatcccccaggagatcgaagaggtgaaagcactcattgcagaacaccagaccttcatggaggaaatgaccagaaaacagcctgatgttgataaagtaacgaagacctataagaggagagctgctgatccttcctcattacaatcccatattccagtcttggataagggacgagcaggaagaaaacgctttccagcatcaagcttgtatccctctgggtcacagacacaaattgaaaccaaaaatcctagggtaaacttactggtgagcaaatggcagcaagtctggctcctggcgttggaaagaaggaggaaactcaatgatgccttggacagactagaggagctgagggaatttgctaactttgattttgatatctggcgcaaaaaatacatgcgatggatgaatcacaagaaatctcgagtgatggacttcttcaggagaattgataaagaccaggatgggaaaataacgcggcaggaatttattgatggaattctttcctcaaagtttccaaccagtcgcttggagatgagcgcagttgcagacatctttgacagagatggcgatggatatattgactactatgaatttgtagcagcccttcacccaaataaagatgcatataaacctatcacagatgccgacaaaatcgaagatgaggtgacaaggcaggtagctaagtgtaaatgtgcaaagcgatttcaagttgagcagattggtgataataaatacaggttcttcctgggaaatcagtttggagactcccagcaactgcgactggtccggatcctgcggagtactgtgatggttcgtgttggaggtggatggatggcacttgatgagttcttagtgaaaaatgatccttgcagggccaaaggaaggacaaacatggaactgcgtgagaagttcattttagcagatggtgccagccagggtatggctgctttccgaccccgaggccgaagatcccggccatcatcacgaggcgcttcacccaacagatccacttctgtgtccagtcaggctgcgcaggcggcctccccacaggtccctgccaccaccacacccaagattctccatcctttaacacgcaattatggtaaaccatggttgacaaacagcaaaatgtcaactccttgtaaagcagcagagtgctcagactttcccgtgccatctgcagagggaacgccaatacaaggaagcaagcttcgacttccaggatatttatcagggaaaggcttccactctggggaggacagtggcttgataacaactgcagctgccagagtccgaacacagtttgctgattccaagaagactcccagccgaccaggaagtcgagctggaagcaaagctggcagcagggccagcagccgccgaggcagtgatgcatcagactttgacatttcagaaatccagtccgtgtgctcagatgtggaaactgtcccccagacacacagacctacaccccgagcaggttctcggccatccacagcgaagccttcaaaaatccccacgccccagaggaaatcacctgccagcaaattggacaagtcctcaaagagatagtgcaattggttctaccaaggcccttccttgagcatttattatttaagtttgaacgatgtaaaatatggtgtagaaattcttgtgaaatattgcaagaggcgagtttaaaattctgcagatggccttatttgtgtatttgtctttttattttatctgtataattttttttgtcagatattctggggttaaagtcacatcatatgtgaggaggaaaagtttaacatgaactaacatttctgcactgtaacgtgccgggcacacactaaactcagttactgtacctacaggtaagtctacatcctctctgacagccacagcactacatcaatccctgacgttagggatacctcatgacattttcctgtttttatggaaactctgagaagctgaatgatacatgcaggggatattttttgagatgatttaaatgtaaaccaaaagatggaagacaaaaagacaaacacacccacacgcagtctttgcagtatctgacagagaactcacaggaagttacttcaagcacttgccagtactatgatattcaagtaccttgcagcatttctctgccattgctttcaatgaggccagaggcatcctggatattagacctattatactgtaagaatataagtataaagtgcgttcatatacatgtgaggttttcttttgcttgagtggacagtagcacctgtatcattgaactcattttgtatcagagcaattttgcttgcagaaagctatgaaataaaacacgtcccttaactgcattgctatggaattaattttttttccccagggaaaactagtgtatttttttatgagcaatatcaatttggagtgaccaaaagatacttaaaaatgggtttattttgatttctcatctgaaataatcatgttctggtattatatctatctatatttaataaatatatacattttaatttattatgtgtactcacatactatagaaagatattagtatgcatttaataaaacatattcacttgaatatatggaa

SEQ ID NO: 9066 - DNA, 23715 bp, Homo sapiens
  source 1..23715: mol_type = unassigned DNA
atggcgggttacctctcccctgctgcttacctgtacgtggaggagcaggagtatctccaggcctacgaggatgtcctggagaggtacaaagatgaacgggacaaagttcagaagaaaacatttacaaaatggataaatcagcatctcatgaaggttcgaaaacatgtgaatgatctctatgaagacttaagggatggacacaatttgatttctcttttagaggttctttcaggagataccttgcccagagaaaaaggtcggatgcgttttcacagactacagaatgtacaaattgcacttgactatttgaaaagacgccaggtgaaattagtgaatattagaaatgatgacataacagatggaaatcccaaattgactttgggattaatctggacaataattttgcactttcagatatctgatatccatgttactggagagtcagaggatatgtctgcaaaagagagattgctactctggacgcagcaggcaacagagggttatgctggaattcggtgtgaaaatttcactacctgctggagagatggaaaattatttaatgccatcattcataaatacaggccggacctgatagatatgaatactgttgctgttcaaagcaaccttgcaaatttagagcatgctttttacgtagcagaaaaaattggtgttataagacttctggaccctgaagatgtcgatgtctcctcacctgatgaaaaatcagtaataacttacgtgtcatctctctatgatgcatttcctaaagtccctgaaggtggggaaggcattggtgcaaatgatgttgaagtcaaatggattgaataccagaatatggtgaactacctcatccaatggattagacaccatgtgaccacaatgtctgagagaacatttcctaataatcctgtagaactgaaggcactttataatcagtatttacagtttaaagaaacagaaattccaccaaaggagacagaaaaatcaaaaattaaacgtctatataaattattagagatttggatagaatttggacgcatcaagctccttcaaggttatcatccaaatgacatagaaaaagagtgggggaaactcattattgccatgctagagagagagaaggcccttcgtccagaagtagaaaggttagaaatgttgcaacagattgccaacagagttcagagggacagtgtcatctgtgaagacaaactgattcttgctggaaatgctcttcagtctgattctaaaagattagaatcaggagtgcagtttcagaatgaagcagaaattgctgggtatatacttgaatgtgagaaccttttacgccagcatgtaattgatgtacagattcttattgatggaaaatactaccaggcagatcaattggtacagagggttgcaaaactgcgtgacgaaattatggccttaaggaacgaatgttcttctgtgtacagcaaaggacgcatactgacaacagaacagacaaagctcatgatatcaggaatcactcaaagtttaaactcaggatttgcacagaccttacaccctagtctgacctcagggctgacccagagtttaacaccttccctaacctcttctagtatgacttctggcctgtcatcagggatgacttcccgcctgactccatctgtcactccagcttatacacctggtttcccatcaggattagttccaaatttcagttcaggagtagagccaaattcattgcaaactttgaagttgatgcagatccgaaaaccccttctaaagtcttctttgctggatcaaaatttaacagaagaagaaatcaatatgaaatttgttcaggatcttttgaattgggttgatgagatgcaggtacaactggaccgcactgagtggggctcagatttgccaagtgttgaaagccatttagaaaatcataaaaatgttcatagagctattgaagaatttgaatctagtctcaaagaagctaaaatcagtgagattcaaatgacagcacctcttaaactgacttatgcagaaaagttgcacagattagagagtcagtatgcaaaactcttgaatacatccaggaatcaagaacggcaccttgatacactccataattttgtaagtcgtgcgactaatgaacttatttggttgaatgaaaaagaagaggaggaagttgcttatgactggagtgagagaaacaccaacatagctaggaaaaaagattatcatgctgaattaatgagagaacttgatcaaaaggaagaaaatattaaatcagttcaggagatagcagagcagctacttctagaaaatcatccagcccggttaactattgaggcctacagagcggcaatgcagacgcagtggagctggatcttacagctctgccagtgtgtggagcagcacataaaggagaacacagcgtatttcgagtttttcaatgatgccaaagaagctactgattacttaaggaatctaaaagatgccattcagcggaagtacagctgtgatagatcaagcagcattcacaagctagaagaccttgttcaggaatcaatggaagagaaagaagaacttctgcagtacaaaagcactatagcaaacctaatgggaaaagcaaaaacaataattcaactgaagccaaggaattctgactgtccactcaaaacttctattccgatcaaagctatctgtgactacagacaaattgagataaccatttacaaagacgatgaatgtgttttggcgaataactctcatcgtgctaaatggaaggtcattagtcctactgggaatgaggctatggtcccatctgtgtgcttcaccgttcctccaccaaacaaagaagcggtggaccttgccaacagaattgagcaacagtatcagaatgtcctgactctttggcatgagtctcacataaacatgaagagtgtagtatcctggcattatctcatcaatgaaattgatagaattcgagctagcaatgtggcttcaataaagacaatgctacctggtgaacatcagcaagttctaagtaatctacaatctcgttttgaagattttctggaagatagccaggaatcccaagtcttttcaggctcagatataacacaactggaaaaggaggttaatgtatgtaagcagtattatcaagaacttcttaaatctgcagaaagagaggagcaagaggaatcagtttataatctctacatctctgaagttcgaaacattagacttcggttagagaactgtgaagatcggctgattagacagattcgaactcccctggaaagagatgatttgcatgaaagtgtgttcagaatcacagaacaggagaaactaaagaaagagctggaacgacttaaagatgatttgggaacaatcacaaataagtgtgaggagtttttcagtcaagcagcagcctcttcatcagtccctaccctacgatcagagcttaatgtggtccttcagaacatgaaccaagtctattctatgtcttccacttacatagataagttgaaaactgttaacttggtgttaaaaaacactcaagctgcagaagccctcgtaaaactctatgaaactaaactgtgtgaagaagaagcagttatagctgacaagaataatattgagaatctaataagtactttaaagcaatggagatctgaagtagatgaaaagagacaggtattccatgccttagaggatgagttgcagaaagctaaagccatcagtgatgaaatgtttaaaacgtataaagaacgggaccttgattttgactggcacaaagaaaaagcagatcaattagttgaaaggtggcaaaatgttcatgtgcagattgacaacaggttacgggacttagagggcattggcaaatcactgaagtactacagagacacttaccatcctttagatgattggatccagcaggttgaaactactcagagaaagattcaggaaaatcagcctgaaaatagtaaaaccctagccacacagttgaatcaacagaagatgctggtgtccgaaatagaaatgaaacagagcaaaatggacgagtgtcaaaaatatgcagaacagtactcagctacagtgaaggactatgaattacaaacaatgacctaccgggccatggtagattcacaacaaaaatctccagtgaaacgccgaagaatgcagagttcagcagatctcattattcaagagttcatggacctaaggactcgatatactgccctggtcactctcatgacacaatatattaaatttgctggtgattcattgaagaggctggaagaggaggagaagtcactggaagaagaaaagaaagaacatgttgaaaaagccaaagaattgcaaaaatgggtatcaaatatcagcaagacattgaaagatgcagagaaggctggaaaacctcccttctctaagcaaaagatttccagtgaggaaatatcaaccaagaaggaacaattatcggaagcacttcaaactatacagctttttttggcaaaacatggagacaaaatgacagatgaagaaagaaatgaattggaaaaacaagtgaaaactcttcaggaaagttataatttattattcagtgaatctctgaaacagctacaagaatcacaaacctcaggagatgtaaaggtagaggagaagctggataaagtgattgcaggcaccattgatcagacaactggagaagtcctttcagtctttcaagcagttttaagaggcctcattgactatgacacaggaattaggttgcttgagacacagctaatgatttctggtctaatttcaccagaattaagaaagtgctttgaccttaaagatgccaaaagtcatggccttattgatgaacaaattctgtgccaactcaaagaactaagtaaagctaaggagattatttctgctgcgtcacctaccacaattccagtactggatgctctagctcaaagcatgataacagaatccatggccatcaaagttcttgagatactgctttctacaggctctctggttattccagccacaggagaacagttgaccctacagaaggctttccaacagaacttggtttcctcagcattattttctaaagttctggaaaggcaaaatatgtgcaaagatcttattgacccctgcacctctgagaaggtttctttaatagatatggtacaaagaagtactttacaggaaaacacagggatgtggcttctacctgtgagaccacaagaaggaggtagaataacattaaaatgtggaagaaacataagcattttaagagcagctcatgaaggtctcatagaccgtgaaaccatgtttaggttgttaagtgcacagcttctttctggaggtctgatcaattccaactctggccaaagaatgactgttgaagaagctgtcagagaaggggtgattgacagggacactgctagcagtatcctcacatatcaggttcaaactggtggaatcatccagtcaaaccctgccaagcgtttaactgtagacgaagcagtacagtgtgatttaataacttccagcagtgctcttctggtcctggaagctcagcgaggctatgttggactcatttggccccattctggtgaaatatttcccacatcatcttccttgcagcaagaattgattacaaatgaattggcctacaaaatcctgaatggcagacaaaaaatagctgctctttatattccagaaagttctcaagtcattggtttggatgctgctaaacagctaggaattatagacaacaacacagcatcaattttaaaaaatataacactgcctgataaaatgccagatttaggagatttagaagcttgtaaaaatgccagaagatggctctctttttgtaaatttcaaccctccacagttcatgattacagacaagaagaggatgtttttgatggagaagaacctgtcactactcagacctcagaagaaactaaaaaattatttctatcttatttaatgataaatagctatatggatgcaaacacagggcaaaggcttttgctgtacgatggagacttggatgaggctgttggcatgctactggaaggctgtcatgcagaatttgatggaaacacagccataaaagaatgtctcgatgtcttaagctcatctggtgtatttcttaataatgcttcaggtagagaaaaggatgaatgtacagctacaccaagtagtttcaataaatgtcactgtggagaacctgaacatgaagagactcctgaaaatagaaagtgtgctatagatgaagaatttaatgaaatgagaaatactgttatcaatagtgaattttctcagtcaggaaaactggcaagtacaatatcaattgatcctaaagttaacagttcacccagtgtgtgtgttcccagtctcatatcatatttaacacagactgaacttgcagacattagcatgcttagaagtgactctgaaaacatacttacaaactatgaaaatcaaagccgagtggaaacaaatgaacgtgcaaatgaatgtagtcattctaaaaacattcaaaactttccaagtgatttaatagaaaatcctattatgaaatcaaaaatgagtaaattctgtggtgtgaatgaaacagagaatgaagataatacaaacagggattcacctatctttgactattcccccaggctaagtgccttgttaagtcatgataaattgatgcacagtcagggaagttttaatgatacacacaccccagagagcaatggaaataagtgtgaagccccagccttatcattcagtgacaaaaccatgttgtcaggtcaaagaataggagaaaaatttcaagaccagtttctgggaattgcagctattaacatcagtttaccaggagagcagtatggacagaaatctttaaatatgatttctagtaatcctcaagtacaatatcacaatgataaatacatttcaaatacttctggtgaggatgaaaaaacacatccaggttttcagcagatgcctgaagacaaggaagatgagtctgaaatagaagagtattcctgtgctgtgactccagggggtgatactgataatgccattgtgtctcttacttgtgctacaccattgcttgatgaaaccatcagtgctagtgactatgaaacgtcactgctgaatgatcagcagaataacacaggaacagacactgatagtgatgatgatttttatgatactcccttgtttgaagatgatgaccatgattctttgcttcttgatggtgatgatcgtgattgcctgcaccctgaggactacgacacactgcaagaggaaaatgatgagacggcttctcctgctgatgttttttatgatgtctcaaaagagaatgaaaattccatggttccccagggggcaccagttggtagcttaagtgtgaagaacaaagcacattgtcttcaggatttccttatggatgttgagaaagatgaattagattctggtgaaaaaatacatttaaatcctgttggctcagataaggtgaatggacagtcactggaaactggatcagaaagggaatgcacaaatatccttgaaggtgatgaatctgactcattgactgattatgatattgtaggaggaaaagagagcttcactgcatcattaaaatttgatgacagtggcagttggagaggaagaaaggaagagtatgtaactggacaggaatttcactccgatactgatcatttagattctatgcaaagtgaagaaagttatggggattatatatatgacagtaatgatcaggatgacgatgatgatgatggcattgatgaagaaggaggaggtataagagatgagaatggaaagcccaggtgccaaaatgtggctgaagatatggatatccagttgtgtgcctctattttaaatgaaaacagtgatgaaaatgaaaatattaatacaatgattcttctggataaaatgcacagttgtagctctttagaaaaacagcaaagggtaaatgttgtacagctagcatcacctagtgaaaataacttagttactgaaaaaagcaaccttccagaatatacaactgagattgctggaaaaagcaaagaaaatctgttgaaccatgagatggtacttaaggatgtattgccgcctatcattaaagacactgaatctgaaaaaacttttggccctgcaagtatttcacatgataataataatatcagttcaacttctgaattaggtactgatctagcaaacacaaaggttaagttgattcaagggtcagaattgccagaattgactgattctgtgaaaggtaaagatgaatattttaagaatatgacaccaaaagttgactcatctcttgatcacatcatttgtactgagcctgatttaataggaaaacctgctgaggaaagccatttgtcattgatagcctctgtaactgacaaagatcctcaaggaaatggaagcgatctcattaaagggagagatggcaaaagtgatattctaatagaagatgaaacatcaattcagaaaatgtacttgggtgaaggagaagtgcttgtagaaggtctagtagaagaagaaaataggcatctcaaacttttgcctggtaaaaatacaagggatagtttcaagttaattaatagtcagtttccatttccacaaatcacaaacaatgaagaacttaatcagaaaggaagccttaaaaaagcaactgtaactcttaaagatgaaccaaataatctacaaataatagttagtaaaagtcctgttcagtttgagaatcttgaagaaatttttgacacatcagtttccaaagagattagtgatgacattacttcagacattacatcgtgggaagggaatacacattttgaggagtcattcactgatggacctgagaaagagcttgatctgtttacttacttaaaacattgtgctaaaaatataaaagcaaaagatgtagccaaaccaaatgaagatgtcccaagccatgttttaataactgcccctcccatgaaagaacatttacaattaggagttaataatacaaaagagaagtccactagtacccaaaaagactcacctcttaatgacatgatccaaagcaatgatctttgtagtaaagaaagcatctcaggaggaggaacagaaatttctcagttcacaccagaaagtattgaagccacactttcaatattatctcgtaaacatgtagaagatgttgggaaaaatgattttctgcagtcggagcggtgtgcaaatggattaggaaatgataactccagtaacactttaaatactgactattcattcttagaaattaataataagaaagaaagaattgagcaacagctaccaaaagaacaagccttgtctccaagatcccaagaaaaggaggttcagattcctgaattgtctcaggtatttgtggaggatgtaaaggatatcttaaaaagcaggttgaaagaaggtcatatgaaccctcaagaggttgaagaaccttcagcctgtgcagacactaaaattttaattcaaaatttaattaaaaggattaccacatcacagttggtaaatgaggcatctactgtgcccagcgactctcaaatgagtgactcttctggagtttcccccatgactaactcatcagaactaaagccagaaagtagagatgatcctttctgtattggaaatcttaagtctgagcttctccttaatatattgaagcaagatcaacatagccaaaaaattacaggagtatttgaattgatgagagaattaactcatatggagtatgacctagagaaaagaggcattacgtctaaagtacttccactgcagcttgaaaatattttctacaaactgcttgctgatggatattcagagaaaatagaacatgttggagactttaatcaaaaagcatgttctacatctgagatgatggaagaaaagccacatattcttggtgatattaaaagcaaagaaggaaactactattctcctaatttagaaactgtaaaagaaattggactagaaagctctactgtgtgggcatcaacattgccaagagatgagaagctcaaggatctgtgtaatgatttcccaagccatttggaatgtacttcagggtctaaagagatggcttctggagatagctcaaccgaacaattttccagtgaattacagcagtgtttacagcacactgaaaaaatgcatgagtatttgacattgcttcaagatatgaaaccccccttagacaaccaggaatctctggataacaacttggaagctttgaagaatcaacttagacagttggagacatttgaattgggattagctccaattgctgttattttaagaaaagatatgaagttggcagaagagtttttaaagtctcttcccagtgactttcccagaggccatgttgaagaattgagtattagccaccagagtttgaagaccgccttctcttccctcagcaacgtgtcttcagaaagaacgaaacagatcatgcttgcgatcgactctgaaatgtctaaactagcagtttcccatgaagaatttctgcataaacttaagtcattctcagattgggtatcagagaagagcaaatctgtgaaggatattgagattgtgaatgttcaagattctgagtatgtaaagaaacgtttggagtttctcaagaatgtattaaaagaccttggacataccaaaatgcagctggagactactgcctttgatgtgcagttcttcatttctgaatatgcacaggatctgtctcccaaccaaagcaaacaactgctgaggctcttaaatacaactcagaagtgttttcttgatgtacaggagtcagtaactacccaggtggaacgtttagagactcagttacatctagaacaagatcttgatgatcagaagattgtagcagagcgtcagcaggagtataaagagaaactccaagggatatgtgatcttcttacccaaactgaaaaccgcctaattggtcaccaagaagccttcatgattggagatggcacagttgagttaaagaaatatcagtccaagcaagaggaattacagaaagatatgcaaggaagtgcacaggcattggctgaagtagtgaaaaacacagagaacttcttaaaagagaatggtgaaaagctgtcacaggaagataaggctttgattgaacagaaacttaatgaagctaagataaagtgtgaacagcttaatttaaaagcagaacagtctaaaaaggagctggataaagttgtgacaacagcaatcaaggaagaaactgaaaaggtagcagcagtgaagcagctggaagagagcaaaaccaaaatagaaaaccttttggactggttgtcaaatgttgacaaagactcagaaagggcagggacaaaacacaaacaggtaatcgaacagaacgggacccattttcaagaaggtgatggcaagtcagcaattggagaagaggatgaagttaatggtaacctgttggagactgatgttgatgggcaagttggaaccactcaggagaatctgaatcagcaatatcagaaagttaaggcccaacacgagaagatcatctctcagcaccaagcagtgatcatagccactcagtctgcacaagtgttgcttgagaaacagggtcagtatctctctcctgaagaaaaagagaaactgcaaaagaacatgaaggaactgaaagtgcattatgaaactgcactggctgagtcagagaagaaaatgaagttaactcactctctgcaggaagaattagaaaagtttgatgctgactataccgagtttgagcactggctacagcagtcagaacaagaacttgaaaacctggaggcaggtgcagatgacatcaatggtttaatgaccaaattgaagaggcagaagagtttctcagaagacgttatttctcacaaaggtgacttgagatacatcacaatttctggaaacagagtgttggaagctgccaaatcttgcagcaagagagacggtggcaaggttgatacttctgcaacccacagagaagtgcagcgcaagttggatcatgctactgatcggttcaggtctctctactctaagtgcaatgttcttggaaataatcttaaagatctggtggataaatatcaacactatgaagatgcttcatgtggacttcttgctggactccaggcctgtgaggccacagcgagcaaacacttatctgaacctattgcggtggaccccaaaaatcttcaaaggcaattagaagagaccaaggctttgcaaggacagatatcaagtcagcaggttgctgtagagaaactgaagaaaacggctgaagtgcttttagatgccaggggatctttacttccagccaagaatgatatccagaaaacacttgatgacattgttgggagatatgaggatctgtccaagtctgttaatgaacgaaatgaaaaactccagataaccttgacccgttcactgagtgtgcaggatggcttggatgaaatgctggactggatgggaaatgtggaaagttctctgaaagaacaagatgttggaacaggatattgcaggtcgtcagagcagtataaatgccatgaatgaaaaagtgaagaaatttatggaaacaacagatccatccactgcatcctcactgcaagccaaaatgaaagacttgtctgctcggttttcagaagcaagtcataaacacaaagaaactcttgccaaaatggaggagctaaaaaccaaagtagaactgtttgagaacctctcagaaaagctccagacatttttagaaacaaaaactcaggctcttactgaagtagatgtgccaggaaaagatgttactgaattgtctcagtatatgcaggaatcaacttctgaatttttagaacacaagaaacatcttgaagttttgcatagtctcttgaaggagatatccagccatggcttaccaagtgataaggctttggtccttgaaaaaacaaataatttgtcaaagaaattcaaggaaatggaggataccatcaaagaaaaaaaagaagctgtaacttcttgtcaagaacagttggatgctttccaagttcttgttaaatcattgaagtcatggataaaagaaacaacaaaaaaagttcccattgtacagccttcttttggtgcagaggatttaggaaaatctttggaagacactaagaaattacaagaaaagtggagtttaaaaacaccagagattcagaaagtaaacaacagtgggatctcactatgtaacttaataagtgctgtgaccacccctgcaaaggcaatagcagcagttaaatcaggtggagcagtattaaatggtgaaggaacagccacaaatactgaggaattttgggcaaataaaggtttaacatccattaaaaaggacatgactgacataagtcatggttatgaagatcttggcctcttactcaaggacaaaatagcggaactgaacactaaactctccaaattgcaaaaggctcaggaagaatcaagtgcaatgatgcagtggttacagaaaatgaacaaaactgcaacaaaatggcagcagacacctgcacctacagatactgaagctgtgaagactcaagttgagcagaataagtcgtttgaggcagaactgaagcagaatgtaaacaaagtacaggagttgaaagacaaattgacagagctgttggaggagaacccagatactcctgaggcccccagatggaaacagatgttgacagaaatagattctaagtggcaagaactcaatcaattaacaattgatagacaacaaaaactggaagaatcctccaataatctaacccagttccagactgtagaggcccaattgaaacagtggcttgtggaaaaagaacttatggtcagtgttcttgggcccttgtcaattgacccaaatatgctaaacacacaaaggcagcaggtgcagattttgctgcaagaattcgccactcggaaacctcaatatgaacagctgacagcagctggtcagggcattctgagcaggcctggagaagacccttctttacgtgggattgtgaaagagcaactggcagctgtgacccaaaaatgggatagcctaacagggcaattgagtgacagatgtgactggattgaccaagccattgttaaaagcacacagtatcaaagcctgctgagaagcctttctgataaactgagtgacttggataataaactcagcagcagtctggctgtgagcacgcaccctgatgctatgaaccaacagttggaaacagcccaaaaaatgaagcaggagatacagcaggaaaagaagcagataaaagtggcccaggcactctgtgaggatttgtcagcactggttaaagaagagtacttgaaagcagaacttagtaggcaactagaaggcatcttaaaatcatttaaggatgttgaacagaaagcagagaatcatgtccagcaccttcagtcggcctgtgcaagctctcatcaatttcagcaaatgtctagagattttcaggcttggctggatacaaagaaagaagagcaaaacaaatctcatccaatatctgccaaactcgatgtcttggagtcattaattaaagatcataaagactttagtaaaactttgaccgctcagtctcatatgtatgaaaaaaccattgcagaaggtgaaaatctgttattaaaaacacaagggtctgagaaggcagccttacagttacagcttaatacaattaaaaccaattgggatacatttaataagcaggtgaaagaaagagaaaacaagttaaaagagtcattggaaaaagcccttaagtataaagagcaagtagagactctctggccatggatagacaaatgccaaaacaacctggaggaaataaaattttgcttggatcctgctgaaggagagaattctattgccaagttaaagtctctgcagaaggaaatggaccaacactttggtatggtagaattactgaacaacacagccaatagcttgctcagtgtctgtgagatagataaagaagttgttacagatgagaataagtcactgatccagaaggtggacatggtcactgaacaacttcacagtaagaaattctgtctggagaacatgactcagaagtttaaagaatttcaagaagtttccaaagaatctaaaaggcagcttcagtgtgcaaaggagcagctagatatccatgattcgctgggatcccaggcttacagtaacaaatacctgaccatgttgcaaactcagcagaaatcacttcaggccttgaagcatcaggtagatttggctaaaagacttgcacaggaccttgtggtagaggcctcagactcaaagggaacctctgatgttttattacaagtggaaaccatagctcaagagcatagtacactaagtcagcaggttgatgaaaagtgttctttcttagaaaccaagcttcagggcattgggcatttccagaataccattcgagaaatgttttctcagttcgcagagtttgatgatgaactggatagcatggctccagtggggagagatgcagaaacattgcaaaagcaaaaggaaactataaaagcctttctaaagaaactagaagccctcatggcaagcaatgacaatgccaataaaacctgcaagatgatgttagccacagaagaaacctctcctgaccttgttggaatcaaaagggacttggaggccttaagcaaacaatgcaacaagttactggaccgagcccaagccagagaagagcaggttgaagggacaattaagcgccttgaagaattttacagcaaattgaaagaattttctattctgctccagaaagccgaagaacatgaagagtcacaaggtcctgttggtatggaaacggagacaattaatcagcagcttaacatgttcaaggtattccagaaagaagagattgaacccttgcaaggtaaacagcaagatgtaaactggttaggtcaaggccttattcagagtgctgccaaaagcactagcactcagggcttggagcatgacctggatgatgtcaatgcacggtggaagactctcaataagaaggtggctcagcgagcagcccagctgcaggaggccttgctgcactgtgggaggttccaggatgccctggagtccctgctcagctggatggtggacactgaggagcttgtggccaatcagaagcccccgtcggctgagttcaaagtggtaaaggcccagatacaagaacaaaagcttctccagagattgttggatgaccgaaaatctacggtggaggtaatcaaacgagaaggagaaaaaattgctacaacagcagagcccgcagataaagtgaagattttgaaacagctcagtctcttggatagcagatgggaggcattgcttaataaagctgaaacaaggaatcgtcagttggaaggtatctcggtggtagcacagcaatttcatgaaaccttagaaccactgaacgagtggcttacaaccatagaaaagaggctggtgaattgtgaacccataggaacccaagcatctaaacttgaggaacaaattgcacagcacaaagccttagaagatgacatcatcaatcacaataaacatttacaccaggctgttagcattggccagtccttaaaggttttgagctccagggaggataaagatatggtgcagagtaaattagacttctctcaagtatggtacattgagattcaagagaaaagtcacagcaggtctgagctcctccagcaggccttatgtaatgctaagatttttggggaagatgaagttgaactgatgaactggctgaatgaagtgcatgacaaactgagcaagctctcagtccaggattacagcactgaggggctatggaagcagcagtctgaacttcgggttctgcaagaggacatcttactcaggaaacaaaatgtagatcaggctttactaaatggtttagaactacttaaacaaaccacaggtgatgaagttttaataattcaagataaattggaagccattaaagcaaggtacaaagacattactaaactgagcactgatgtggccaagactctggaacaggcgctgcagcttgcaaggcggctgcactccacacacgaagagctgtgtacctggctggacaaagtggaggtggaattactttcatatgaaactcaggttctgaaaggagaagaagcaagtcaagcacaaatgagaccaaaggaactgaaaaaggaagctaagaacaacaaagccttactggactcccttaatgaagtgagcagtgctttgctggaactggtaccatggagggcaagagaaggacttgagaaaatggtagctgaggacaatgagcgctaccgattagtgagcgacaccatcactcagaaggtggaggagatcgatgcagccattctgcgatcacagcagtttgaccaagcagctgatgctgagttatcctggattactgaaacagaaaaaaaattgatgtctctgggtgacatcaggcttgagcaagaccagacttctgctcagcttcaagttcaaaagacattcaccatggagattttgagacacaaggatattattgatgaccttgttaaatctgggcataaaatcatgaccgcatgcagtgaagaggaaaagcaatcaatgaagaaaaaactggacaaggtactgaagaactatgataccatctgccagattaattcagaaaggtatctgcagctggaacgggcacagtccctggttaaccaattctgggaaacatatgaagaactttggccatggctgacagaaacacaatcaatcatctctcagcttcccgccccagcccttgaatatgaaactctaaggcagcagcaggaagaacatcggcaactgcgtgagttgatagctgaacacaagcctcatatagataagatgaacaaaactgggccacagttactggaattgagccctggggaaggcttttctatccaagagaagtatgtggcagccgacaccctttacagtcaaattaaagaagatgtcaaaaagcgtgctgtggcactggatgaagccatttctcaatcaactcagttccatgacaagatagatcagatccttgagagcctggaacgcatcgtggaacgtctgaggcagccaccctctatctctgcagaggttgagaagatcaaggaacagatcagtgaaaataagaatgtgtcagtagacatggaaaagctacagccgttgtatgaaactcttaaacagaggggagaggaaatgattgctagatctggggggactgataaagacatatctgccaaagctgttcaggataagcttgaccaaatggttttcatttgggagaacatacacacactggtggaagagagggaagccaaactactggatgtgatggagctagcagaaaagttctggtgtgatcacatgtcattgatagttaccattaaagatactcaagatttcatccgggacctggaagatcctggaattgatccttcagtagtaaaacaacagcaagaagcagcagagaccataagggaagaaatagatggactacaggaggagctggatatagttattaacctaggttctgaactcattgcggcatgtggggagcctgataaacccattgtcaagaagagtatagatgagttaaattcagcatgggattctctaaataaagcttggaaagaccggattgacaaacttgaggaggcaatgcaggctgccgttcagtaccaggatggactgcaggcggtatttgactgggtagatattgcaggtggtaaattagcttcaatgtctccaattggaacagatctcgaaactgtcaagcagcagattgaagagctaaagcaatttaagtctgaggcctatcaacagcagatagaaatggaaagactgaatcatcaagcagagcttttgctaaagaaagtaacagaagagagtgacaaacacactgttcaagacccattaatggaactgaaattgatatgggatagcctggaggagagaatcatcaacagacagcataaactggagggtgctctattagccttgggtcagttccaacatgccctggatgagctcctggcatggctgacacacaccgagggcttgctaagtgagcagaaacctgttggaggagaccctaaagccattgaaattgaacttgccaagcatcatgtgctccaaaatgatgtattagcccatcagtccacagtggaagccgttaataaagcaggaaatgatctaattgaatcaagtgcaggagaagaagcaagcaaccttcagaacaagctagaggttttaaatcaacgctggcaaaatgttttggaaaaaacagaacaaaggaagcagcagctggatggtgccttgcgccaggccaaagggttccatggcgaaattgaggatttgcagcagtggctgactgacacggagcgtcatctgttggcatctaaaccgctgggaggtttaccggaaacagccaaggagcagcttaatgtccatatggaagtctgtgctgcctttgaagctaaagaagaaacatataagagtctgatgcagaaaggccagcagatgcttgcaagatgcccaaaatctgcagagacaaatattgaccaagacataaataacttgaaagaaaaatgggaatcggtggaaaccaaactcaatgaaaggaaaactaaactggaagaggctctcaacttggcaatggagttccacaattctctccaagacttcatcaactggcttactcaggctgaacagaccctaaatgtagcttctcggccaagtctcatcttggacacagtcttatttcaaattgacgaacacaaggtttttgccaatgaagtaaattctcatcgtgagcagataatagagctggacaaaactggaacccacctaaaatattttagtcagaaacaagatgttgttctaatcaagaatctacttatcagtgtacaaagtcgatgggaaaaagtggttcaacggttggtagagagaggaagatctttggatgatgcaaggaagagagccaagcagttccatgaagcttggagtaaacttatggagtggctagaagagtcagaaaagtctttggattctgaactggaaatcgcaaatgatccagacaaaataaaaacacaacttgcacaacataaggagtttcagaaatcactcggagccaagcattctgtctacgacaccaccaacaggactggacgttctctgaaggagaaaacctccctggctgatgacaacctgaaactggatgacatgctgagtgaactcagagacaaatgggataccatatgtggaaaatctgtggaaagacaaaacaaattggaggaagccctgttattttctggacaattcacagatgccctacaggctctcattgattggttatatagagttgaaccccagctggcagaagaccagcctgttcatggagacattgatttggtgatgaatctgatcgataatcacaaggccttccaaaaagagttggggaagaggaccagcagtgtgcaggccctgaagcgctcagcccgagaactcatagaaggcagtcgggatgactcctcctgggtcaaggtccagatgcaggaattaagcacacgctgggagaccgtgtgtgcactttctatatcaaagcaaacacggttagaagcagccctgcgtcaggcagaggaattccactcggtggtacatgccctcttggagtggctggctgaggcggagcaaaccctgcgtttccatggtgtcctcccagatgatgaggatgctctccggactctcattgatcagcataaagaattcatgaagaaactggaagaaaagagagctgaactaaataaagccaccactatgggcgacaccgttttggctatctgccaccccgactccatcactaccattaagcactggataacaatcatccgggcgaggtttgaggaggtgctggcctgggcaaagcaacatcagcagagattagcaagtgctctggctgggcttattgccaaacaggaattgttggaagctttgctggcttggttgcaatgggctgaaactacacttactgataaggataaagaagtcatcccccaggagatcgaagaggtgaaagcactcattgcagaacaccagaccttcatggaggaaatgaccagaaaacagcctgatgttgataaagtaacgaagacctataagaggagagctgctgatccttcctcattacaatcccatattccagtcttggataagggacgagcaggaagaaaacgctttccagcatcaagcttgtatccctctgggtcacagacacaaattgaaaccaaaaatcctagggtaaacttactggtgagcaaatggcagcaagtctggctcctggcgttggaaagaaggaggaaactcaatgatgccttggacagactagaggagctgagggaatttgctaactttgattttgatatctggcgcaaaaaatacatgcgatggatgaatcacaagaaatctcgagtgatggacttcttcaggagaattgataaagaccaggatgggaaaataacgcggcaggaatttattgatggaattctttcctcaaagtttccaaccagtcgcttggagatgagcgcagttgcagacatctttgacagagatggcgatggatatattgactactatgaatttgtagcagcccttcacccaaataaagatgcatataaacctatcacagatgccgacaaaatcgaagatgaggtgacaaggcaggtagctaagtgtaaatgtgcaaagcgatttcaagttgagcagattggtgataataaatacaggttcttcctgggaaatcagtttggagactcccagcaactgcgactggtccggatcctgcggagtactgtgatggttcgtgttggaggtggatggatggcacttgatgagttcttagtgaaaaatgatccttgcagggccaaaggaaggacaaacatggaactgcgtgagaagttcattttagcagatggtgccagccagggtatggctgctttccgaccccgaggccgaagatcccggccatcatcacgaggcgcttcacccaacagatccacttctgtgtccagtcaggctgcgcaggcggcctccccacaggtccctgccaccaccacacccaagattctccatcctttaacacgcaattatggtaaaccatggttgacaaacagcaaaatgtcaactccttgtaaagcagcagagtgctcagactttcccgtgccatctgcagagggaacgccaatacaaggaagcaagcttcgacttccaggatatttatcagggaaaggcttccactctggggaggacagtggcttgataacaactgcagctgccagagtccgaacacagtttgctgattccaagaagactcccagccgaccaggaagtcgagctggaagcaaagctggcagcagggccagcagccgccgaggcagtgatgcatcagactttgacatttcagaaatccagtccgtgtgctcagatgtggaaactgtcccccagacacacagacctacaccccgagcaggttctcggccatccacagcgaagccttcaaaaatccccacgccccagaggaaatcacctgccagcaaattggacaagtcctcaaagagatagtgcaattggttctaccaaggcccttccttgagcatttattatttaagtttgaacgatgtaaaatatggtgtagaaattcttgtgaaatattgcaagaggcgagtttaaaattctgcagatggccttatttgtgtatttgtctttttattttatctgtataattttttttgtcagatattctggggttaaagtcacatcatatgtgaggaggaaaagtttaacatgaactaacatttctgcactgtaacgtgccgggcacacactaaactcagttactgtacctacaggtaagtctacatcctctctgacagccacagcactacatcaatccctgacgttagggatacctcatgacattttcctgtttttatggaaactctgagaagctgaatgatacatgcaggggatattttttgagatgatttaaatgtaaaccaaaagatggaagacaaaaagacaaacacacccacacgcagtctttgcagtatctgacagagaactcacaggaagttacttcaagcacttgccagtactatgatattcaagtaccttgcagcatttctctgccattgctttcaatgaggccagaggcatcctggatattagacctattatactgtaagaatataagtataaagtgcgttcatatacatgtgaggttttcttttgcttgagtggacagtagcacctgtatcattgaactcattttgtatcagagcaattttgcttgcagaaagctatgaaataaaacacgtcccttaactgcattgctatggaattaattttttttccccagggaaaactagtgtatttttttatgagcaatatcaatttggagtgaccaaaagatacttaaaaatgggtttattttgatttctcatctgaaataatcatgttctggtattatatctatctatatttaataaatatatacattttaatttattatgtgtactcacatactatagaaagatattagtatgcatttaataaaacatattcacttgaatatatgg

SEQ ID NO: 9067 - DNA, 22431 bp, Homo sapiens
  source 1..22431: mol_type = unassigned DNA
acttcggcatggcgggttacctctcccctgctgcttacctgtacgtggaggagcaggagtatctccaggcctacgaggatgtcctggagaggtacaaagatgaacgggacaaagttcagaagaaaacatttacaaaatggataaatcagcatctcatgaaggttcgaaaacatgtgaatgatctctatgaagacttaagggatggacacaatttgatttctcttttagaggttctttcaggagataccttgcccagagaaaaaggtcggatgcgttttcacagactacagaatgtacaaattgcacttgactatttgaaaagacgccaggtgaaattagtgaatattagaaatgatgacataacagatggaaatcccaaattgactttgggattaatctggacaataattttgcactttcagatatctgatatccatgttactggagagtcagaggatatgtctgcaaaagagagattgctactctggacgcagcaggcaacagagggttatgctggaattcggtgtgaaaatttcactacctgctggagagatggaaaattatttaatgccatcattcataaatacaggccggacctgatagatatgaatactgttgctgttcaaagcaaccttgcaaatttagagcatgctttttacgtagcagaaaaaattggtgttataagacttctggaccctgaagatgtcgatgtctcctcacctgatgaaaaatcagtaataacttacgtgtcatctctctatgatgcatttcctaaagtccctgaaggtggggaaggcattggtgcaaatgatgttgaagtcaaatggattgaataccagaatatggtgaactacctcatccaatggattagacaccatgtgaccacaatgtctgagagaacatttcctaataatcctgtagaactgaaggcactttataatcagtatttacagtttaaagaaacagaaattccaccaaaggagacagaaaaatcaaaaattaaacgtctatataaattattagagatttggatagaatttggacgcatcaagctccttcaaggttatcatccaaatgacatagaaaaagagtgggggaaactcattattgccatgctagagagagagaaggcccttcgtccagaagtagaaaggttagaaatgttgcaacagattgccaacagagttcagagggacagtgtcatctgtgaagacaaactgattcttgctggaaatgctcttcagtctgattctaaaagattagaatcaggagtgcagtttcagaatgaagcagaaattgctgggtatatacttgaatgtgagaaccttttacgccagcatgtaattgatgtacagattcttattgatggaaaatactaccaggcagatcaattggtacagagggttgcaaaactgcgtgacgaaattatggccttaaggaacgaatgttcttctgtgtacagcaaaggacgcatactgacaacagaacagacaaagctcatgatatcaggaatcactcaaagtttaaactcaggatttgcacagaccttacaccctagtctgacctcagggctgacccagagtttaacaccttccctaacctcttctagtatgacttctggcctgtcatcagggatgacttcccgcctgactccatctgtcactccagcttatacacctggtttcccatcaggattagttccaaatttcagttcaggagtagagccaaattcattgcaaactttgaagttgatgcagatccgaaaaccccttctaaagtcttctttgctggatcaaaatttaacagaagaagaaatcaatatgaaatttgttcaggatcttttgaattgggttgatgagatgcaggtacaactggaccgcactgagtggggctcagatttgccaagtgttgaaagccatttagaaaatcataaaaatgttcatagagctattgaagaatttgaatctagtctcaaagaagctaaaatcagtgagattcaaatgacagcacctcttaaactgacttatgcagaaaagttgcacagattagagagtcagtatgcaaaactcttgaatacatccaggaatcaagaacggcaccttgatacactccataattttgtaagtcgtgcgactaatgaacttatttggttgaatgaaaaagaagaggaggaagttgcttatgactggagtgagagaaacaccaacatagctaggaaaaaagattatcatgctgaattaatgagagaacttgatcaaaaggaagaaaatattaaatcagttcaggagatagcagagcagctacttctagaaaatcatccagcccggttaactattgaggcctacagagcggcaatgcagacgcagtggagctggatcttacagctctgccagtgtgtggagcagcacataaaggagaacacagcgtatttcgagtttttcaatgatgccaaagaagctactgattacttaaggaatctaaaagatgccattcagcggaagtacagctgtgatagatcaagcagcattcacaagctagaagaccttgttcaggaatcaatggaagagaaagaagaacttctgcagtacaaaagcactatagcaaacctaatgggaaaagcaaaaacaataattcaactgaagccaaggaattctgactgtccactcaaaacttctattccgatcaaagctatctgtgactacagacaaattgagataaccatttacaaagacgatgaatgtgttttggcgaataactctcatcgtgctaaatggaaggtcattagtcctactgggaatgaggctatggtcccatctgtgtgcttcaccgttcctccaccaaacaaagaagcggtggaccttgccaacagaattgagcaacagtatcagaatgtcctgactctttggcatgagtctcacataaacatgaagagtgtagtatcctggcattatctcatcaatgaaattgatagaattcgagctagcaatgtggcttcaataaagacaatgctacctggtgaacatcagcaagttctaagtaatctacaatctcgttttgaagattttctggaagatagccaggaatcccaagtcttttcaggctcagatataacacaactggaaaaggaggttaatgtatgtaagcagtattatcaagaacttcttaaatctgcagaaagagaggagcaagaggaatcagtttataatctctacatctctgaagttcgaaacattagacttcggttagagaactgtgaagatcggctgattagacagattcgaactcccctggaaagagatgatttgcatgaaagtgtgttcagaatcacagaacaggagaaactaaagaaagagctggaacgacttaaagatgatttgggaacaatcacaaataagtgtgaggagtttttcagtcaagcagcagcctcttcatcagtccctaccctacgatcagagcttaatgtggtccttcagaacatgaaccaagtctattctatgtcttccacttacatagataagttgaaaactgttaacttggtgttaaaaaacactcaagctgcagaagccctcgtaaaactctatgaaactaaactgtgtgaagaagaagcagttatagctgacaagaataatattgagaatctaataagtactttaaagcaatggagatctgaagtagatgaaaagagacaggtattccatgccttagaggatgagttgcagaaagctaaagccatcagtgatgaaatgtttaaaacgtataaagaacgggaccttgattttgactggcacaaagaaaaagcagatcaattagttgaaaggtggcaaaatgttcatgtgcagattgacaacaggttacgggacttagagggcattggcaaatcactgaagtactacagagacacttaccatcctttagatgattggatccagcaggttgaaactactcagagaaagattcaggaaaatcagcctgaaaatagtaaaaccctagccacacagttgaatcaacagaagatgctggtgtccgaaatagaaatgaaacagagcaaaatggacgagtgtcaaaaatatgcagaacagtactcagctacagtgaaggactatgaattacaaacaatgacctaccgggccatggtagattcacaacaaaaatctccagtgaaacgccgaagaatgcagagttcagcagatctcattattcaagagttcatggacctaaggactcgatatactgccctggtcactctcatgacacaatatattaaatttgctggtgattcattgaagaggctggaagaggaggagaagtcactggaagaagaaaagaaagaacatgttgaaaaagccaaagaattgcaaaaatgggtatcaaatatcagcaagacattgaaagatgcagagaaggctggaaaacctcccttctctaagcaaaagatttccagtgaggaaatatcaaccaagaaggaacaattatcggaagcacttcaaactatacagctttttttggcaaaacatggagacaaaatgacagatgaagaaagaaatgaattggaaaaacaagtgaaaactcttcaggaaagttataatttattattcagtgaatctctgaaacagctacaagaatcacaaacctcaggagatgtaaaggtagaggagaagctggataaagtgattgcaggcaccattgatcagacaactggagaagtcctttcagtctttcaagcagttttaagaggcctcattgactatgacacaggaattaggttgcttgagacacagctaatgatttctggtctaatttcaccagaattaagaaagtgctttgaccttaaagatgccaaaagtcatggccttattgatgaacaaattctgtgccaactcaaagaactaagtaaagctaaggagattatttctgctgcgtcacctaccacaattccagtactggatgctctagctcaaagcatgataacagaatccatggccatcaaagttcttgagatactgctttctacaggctctctggttattccagccacaggagaacagttgaccctacagaaggctttccaacagaacttggtttcctcagcattattttctaaagttctggaaaggcaaaatatgtgcaaagatcttattgacccctgcacctctgagaaggtttctttaatagatatggtacaaagaagtactttacaggaaaacacagggatgtggcttctacctgtgagaccacaagaaggaggtagaataacattaaaatgtggaagaaacataagcattttaagagcagctcatgaaggtctcatagaccgtgaaaccatgtttaggttgttaagtgcacagcttctttctggaggtctgatcaattccaactctggccaaagaatgactgttgaagaagctgtcagagaaggggtgattgacagggacactgctagcagtatcctcacatatcaggttcaaactggtggaatcatccagtcaaaccctgccaagcgtttaactgtagacgaagcagtacagtgtgatttaataacttccagcagtgctcttctggtcctggaagctcagcgaggctatgttggactcatttggccccattctggtgaaatatttcccacatcatcttccttgcagcaagaattgattacaaatgaattggcctacaaaatcctgaatggcagacaaaaaatagctgctctttatattccagaaagttctcaagtcattggtttggatgctgctaaacagctaggaattatagacaacaacacagcatcaattttaaaaaatataacactgcctgataaaatgccagatttaggagatttagaagcttgtaaaaatgccagaagatggctctctttttgtaaatttcaaccctccacagttcatgattacagacaagaagaggatgtttttgatggagaagaacctgtcactactcagacctcagaagaaactaaaaaattatttctatcttatttaatgataaatagctatatggatgcaaacacagggcaaaggcttttgctgtacgatggagacttggatgaggctgttggcatgctactggaaggctgtcatgcagaatttgatggaaacacagccataaaagaatgtctcgatgtcttaagctcatctggtgtatttcttaataatgcttcaggtagagaaaaggatgaatgtacagctacaccaagtagtttcaataaatgtcactgtggagaacctgaacatgaagagactcctgaaaatagaaagtgtgctatagatgaagaatttaatgaaatgagaaatactgttatcaatagtgaattttctcagtcaggaaaactggcaagtacaatatcaattgatcctaaagttaacagttcacccagtgtgtgtgttcccagtctcatatcatatttaacacagactgaacttgcagacattagcatgcttagaagtgactctgaaaacatacttacaaactatgaaaatcaaagccgagtggaaacaaatgaacgtgcaaatgaatgtagtcattctaaaaacattcaaaactttccaagtgatttaatagaaaatcctattatgaaatcaaaaatgagtaaattctgtggtgtgaatgaaacagagaatgaagataatacaaacagggattcacctatctttgactattcccccaggctaagtgccttgttaagtcatgataaattgatgcacagtcagggaagttttaatgatacacacaccccagagagcaatggaaataagtgtgaagccccagccttatcattcagtgacaaaaccatgttgtcaggtcaaagaataggagaaaaatttcaagaccagtttctgggaattgcagctattaacatcagtttaccaggagagcagtatggacagaaatctttaaatatgatttctagtaatcctcaagtacaatatcacaatgataaatacatttcaaatacttctggtgaggatgaaaaaacacatccaggttttcagcagatgcctgaagacaaggaagatgagtctgaaatagaagagtattcctgtgctgtgactccagggggtgatactgataatgccattgtgtctcttacttgtgctacaccattgcttgatgaaaccatcagtgctagtgactatgaaacgtcactgctgaatgatcagcagaataacacaggaacagacactgatagtgatgatgatttttatgatactcccttgtttgaagatgatgaccatgattctttgcttcttgatggtgatgatcgtgattgcctgcaccctgaggactacgacacactgcaagaggaaaatgatgagacggcttctcctgctgatgttttttatgatgtctcaaaagagaatgaaaattccatggttccccagggggcaccagttggtagcttaagtgtgaagaacaaagcacattgtcttcaggatttccttatggatgttgagaaagatgaattagattctggtgaaaaaatacatttaaatcctgttggctcagataaggtgaatggacagtcactggaaactggatcagaaagggaatgcacaaatatccttgaaggtgatgaatctgactcattgactgattatgatattgtaggaggaaaagagagcttcactgcatcattaaaatttgatgacagtggcagttggagaggaagaaaggaagagtatgtaactggacaggaatttcactccgatactgatcatttagattctatgcaaagtgaagaaagttatggggattatatatatgacagtaatgatcaggatgacgatgatgatgatggcattgatgaagaaggaggaggtataagagatgagaatggaaagcccaggtgccaaaatgtggctgaagatatggatatccagttgtgtgcctctattttaaatgaaaacagtgatgaaaatgaaaatattaatacaatgattcttctggataaaatgcacagttgtagctctttagaaaaacagcaaagggtaaatgttgtacagctagcatcacctagtgaaaataacttagttactgaaaaaagcaaccttccagaatatacaactgagattgctggaaaaagcaaagaaaatctgttgaaccatgagatggtacttaaggatgtattgccgcctatcattaaagacactgaatctgaaaaaacttttggccctgcaagtatttcacatgataataataatatcagttcaacttctgaattaggtactgatctagcaaacacaaaggttaagttgattcaagggtcagaattgccagaattgactgattctgtgaaaggtaaagatgaatattttaagaatatgacaccaaaagttgactcatctcttgatcacatcatttgtactgagcctgatttaataggaaaacctgctgaggaaagccatttgtcattgatagcctctgtaactgacaaagatcctcaaggaaatggaagcgatctcattaaagggagagatggcaaaagtgatattctaatagaagatgaaacatcaattcagaaaatgtacttgggtgaaggagaagtgcttgtagaaggtctagtagaagaagaaaataggcatctcaaacttttgcctggtaaaaatacaagggatagtttcaagttaattaatagtcagtttccatttccacaaatcacaaacaatgaagaacttaatcagaaaggaagccttaaaaaagcaactgtaactcttaaagatgaaccaaataatctacaaataatagttagtaaaagtcctgttcagtttgagaatcttgaagaaatttttgacacatcagtttccaaagagattagtgatgacattacttcagacattacatcgtgggaagggaatacacattttgaggagtcattcactgatggacctgagaaagagcttgatctgtttacttacttaaaacattgtgctaaaaatataaaagcaaaagatgtagccaaaccaaatgaagatgtcccaagccatgttttaataactgcccctcccatgaaagaacatttacaattaggagttaataatacaaaagagaagtccactagtacccaaaaagactcacctcttaatgacatgatccaaagcaatgatctttgtagtaaagaaagcatctcaggaggaggaacagaaatttctcagttcacaccagaaagtattgaagccacactttcaatattatctcgtaaacatgtagaagatgttgggaaaaatgattttctgcagtcggagcggtgtgcaaatggattaggaaatgataactccagtaacactttaaatactgactattcattcttagaaattaataataagaaagaaagaattgagcaacagctaccaaaagaacaagccttgtctccaagatcccaagaaaaggaggttcagattcctgaattgtctcaggtatttgtggaggatgtaaaggatatcttaaaaagcaggttgaaagaaggtcatatgaaccctcaagaggttgaagaaccttcagcctgtgcagacactaaaattttaattcaaaatttaattaaaaggattaccacatcacagttggtaaatgaggcatctactgtgcccagcgactctcaaatgagtgactcttctggagtttcccccatgactaactcatcagaactaaagccagaaagtagagatgatcctttctgtattggaaatcttaagtctgagcttctccttaatatattgaagcaagatcaacatagccaaaaaattacaggagtatttgaattgatgagagaattaactcatatggagtatgacctagagaaaagaggcattacgtctaaagtacttccactgcagcttgaaaatattttctacaaactgcttgctgatggatattcagagaaaatagaacatgttggagactttaatcaaaaagcatgttctacatctgagatgatggaagaaaagccacatattcttggtgatattaaaagcaaagaaggaaactactattctcctaatttagaaactgtaaaagaaattggactagaaagctctactgtgtgggcatcaacattgccaagagatgagaagctcaaggatctgtgtaatgatttcccaagccatttggaatgtacttcagggtctaaagagatggcttctggagatagctcaaccgaacaattttccagtgaattacagcagtgtttacagcacactgaaaaaatgcatgagtatttgacattgcttcaagatatgaaaccccccttagacaaccaggaatctctggataacaacttggaagctttgaagaatcaacttagacagttggagacatttgaattgggattagctccaattgctgttattttaagaaaagatatgaagttggcagaagagtttttaaagtctcttcccagtgactttcccagaggccatgttgaagaattgagtattagccaccagagtttgaagaccgccttctcttccctcagcaacgtgtcttcagaaagaacgaaacagatcatgcttgcgatcgactctgaaatgtctaaactagcagtttcccatgaagaatttctgcataaacttaagtcattctcagattgggtatcagagaagagcaaatctgtgaaggatattgagattgtgaatgttcaagattctgagtatgtaaagaaacgtttggagtttctcaagaatgtattaaaagaccttggacataccaaaatgcagctggagactactgcctttgatgtgcagttcttcatttctgaatatgcacaggatctgtctcccaaccaaagcaaacaactgctgaggctcttaaatacaactcagaagtgttttcttgatgtacaggagtcagtaactacccaggtggaacgtttagagactcagttacatctagaacaagatcttgatgatcagaagattgtagcagagcgtcagcaggagtataaagagaaactccaagggatatgtgatcttcttacccaaactgaaaaccgcctaattggtcaccaagaagccttcatgattggagatggcacagttgagttaaagaaatatcagtccaagcaagaggaattacagaaagatatgcaaggaagtgcacaggcattggctgaagtagtgaaaaacacagagaacttcttaaaagagaatggtgaaaagctgtcacaggaagataaggctttgattgaacagaaacttaatgaagctaagataaagtgtgaacagcttaatttaaaagcagaacagtctaaaaaggagctggataaagttgtgacaacagcaatcaaggaagaaactgaaaaggtagcagcagtgaagcagctggaagagagcaaaaccaaaatagaaaaccttttggactggttgtcaaatgttgacaaagactcagaaagggcagggacaaaacacaaacaggtaatcgaacagaacgggacccattttcaagaaggtgatggcaagtcagcaattggagaagaggatgaagttaatggtaacctgttggagactgatgttgatgggcaagttggaaccactcaggagaatctgaatcagcaatatcagaaagttaaggcccaacacgagaagatcatctctcagcaccaagcagtgatcatagccactcagtctgcacaagtgttgcttgagaaacagggtcagtatctctctcctgaagaaaaagagaaactgcaaaagaacatgaaggaactgaaagtgcattatgaaactgcactggctgagtcagagaagaaaatgaagttaactcactctctgcaggaagaattagaaaagtttgatgctgactataccgagtttgagcactggctacagcagtcagaacaagaacttgaaaacctggaggcaggtgcagatgacatcaatggtttaatgaccaaattgaagaggcagaagagtttctcagaagacgttatttctcacaaaggtgacttgagatacatcacaatttctggaaacagagtgttggaagctgccaaatcttgcagcaagagagacggtggcaaggttgatacttctgcaacccacagagaagtgcagcgcaagttggatcatgctactgatcggttcaggtctctctactctaagtgcaatgttcttggaaataatcttaaagatctggtggataaatatcaacactatgaagatgcttcatgtggacttcttgctggactccaggcctgtgaggccacagcgagcaaacacttatctgaacctattgcggtggaccccaaaaatcttcaaaggcaattagaagagaccaaggctttgcaaggacagatatcaagtcagcaggttgctgtagagaaactgaagaaaacggctgaagtgcttttagatgccaggggatctttacttccagccaagaatgatatccagaaaacacttgatgacattgttgggagatatgaggatctgtccaagtctgttaatgaacgaaatgaaaaactccagataaccttgacccgttcactgagtgtgcaggatggcttggatgaaatgctggactggatgggaaatgtggaaagttctctgaaagaacaaggtcaagtgcctttaaactctactgctcttcaggatattatcagtaaaaacattatgttggaacaggatattgcaggtcgtcagagcagtataaatgccatgaatgaaaaagtgaagaaatttatggaaacaacagatccatccactgcatcctcactgcaagccaaaatgaaagacttgtctgctcggttttcagaagcaagtcataaacacaaagaaactcttgccaaaatggaggagctaaaaaccaaagtagaactgtttgagaacctctcagaaaagctccagacatttttagaaacaaaaactcaggctcttactgaagtagatgtgccaggaaaagatgttactgaattgtctcagtatatgcaggaatcaacttctgaatttttagaacacaagaaacatcttgaagttttgcatagtctcttgaaggagatatccagccatggcttaccaagtgataaggctttggtccttgaaaaaacaaataatttgtcaaagaaattcaaggaaatggaggataccatcaaagaaaaaaaagaagctgtaacttcttgtcaagaacagttggatgctttccaagttcttgttaaatcattgaagtcatggataaaagaaacaacaaaaaaagttcccattgtacagccttcttttggtgcagaggatttaggaaaatctttggaagacactaagaaattacaagaaaagtggagtttaaaaacaccagagattcagaaagtaaacaacagtgggatctcactatgtaacttaataagtgctgtgaccacccctgcaaaggcaatagcagcagttaaatcaggtggagcagtattaaatggtgaaggaacagccacaaatactgaggaattttgggcaaataaaggtttaacatccattaaaaaggacatgactgacataagtcatggttatgaagatcttggcctcttactcaaggacaaaatagcggaactgaacactaaactctccaaattgcaaaaggctcaggaagaatcaagtgcaatgatgcagtggttacagaaaatgaacaaaactgcaacaaaatggcagcagacacctgcacctacagatactgaagctgtgaagactcaagttgagcagaataagtcgtttgaggcagaactgaagcagaatgtaaacaaagtacaggagttgaaagacaaattgacagagctgttggaggagaacccagatactcctgaggcccccagatggaaacagatgttgacagaaatagattctaagtggcaagaactcaatcaattaacaattgatagacaacaaaaactggaagaatcctccaataatctaacccagttccagactgtagaggcccaattgaaacagtggcttgtggaaaaagaacttatggtcagtgttcttgggcccttgtcaattgacccaaatatgctaaacacacaaaggcagcaggtgcagattttgctgcaagaattcgccactcggaaacctcaatatgaacagctgacagcagctggtcagggcattctgagcaggcctggagaagacccttctttacgtgggattgtgaaagagcaactggcagctgtgacccaaaaatgggatagcctaacagggcaattgagtgacagatgtgactggattgaccaagccattgttaaaagcacacagtatcaaagcctgctgagaagcctttctgataaactgagtgacttggataataaactcagcagcagtctggctgtgagcacgcaccctgatgctatgaaccaacagttggaaacagcccaaaaaatgaagcaggagatacagcaggaaaagaagcagataaaagtggcccaggcactctgtgaggatttgtcagcactggttaaagaagagtacttgaaagcagaacttagtaggcaactagaaggcatcttaaaatcatttaaggatgttgaacagaaagcagagaatcatgtccagcaccttcagtcggcctgtgcaagctctcatcaatttcagcaaatgtctagagattttcaggcttggctggatacaaagaaagaagagcaaaacaaatctcatccaatatctgccaaactcgatgtcttggagtcattaattaaagatcataaagactttagtaaaactttgaccgctcagtctcatatgtatgaaaaaaccattgcagaaggtgaaaatctgttattaaaaacacaagggtctgagaaggcagccttacagttacagcttaatacaattaaaaccaattgggatacatttaataagcaggtgaaagaaagagaaaacaagttaaaagagtcattggaaaaagcccttaagtataaagagcaagtagagactctctggccatggatagacaaatgccaaaacaacctggaggaaataaaattttgcttggatcctgctgaaggagagaattctattgccaagttaaagtctctgcagaaggaaatggaccaacactttggtatggtagaattactgaacaacacagccaatagcttgctcagtgtctgtgagatagataaagaagttgttacagatgagaataagtcactgatccagaaggtggacatggtcactgaacaacttcacagtaagaaattctgtctggagaacatgactcagaagtttaaagaatttcaagaagtttccaaagaatctaaaaggcagcttcagtgtgcaaaggagcagctagatatccatgattcgctgggatcccaggcttacagtaacaaatacctgaccatgttgcaaactcagcagaaatcacttcaggccttgaagcatcaggtagatttggctaaaagacttgcacaggaccttgtggtagaggcctcagactcaaagggaacctctgatgttttattacaagtggaaaccatagctcaagagcatagtacactaagtcagcaggttgatgaaaagtgttctttcttagaaaccaagcttcagggcattgggcatttccagaataccattcgagaaatgttttctcagttcgcagagtttgatgatgaactggatagcatggctccagtggggagagatgcagaaacattgcaaaagcaaaaggaaactataaaagcctttctaaagaaactagaagccctcatggcaagcaatgacaatgccaataaaacctgcaagatgatgttagccacagaagaaacctctcctgaccttgttggaatcaaaagggacttggaggccttaagcaaacaatgcaacaagttactggaccgagcccaagccagagaagagcaggttgaagggacaattaagcgccttgaagaattttacagcaaattgaaagaattttctattctgctccagaaagccgaagaacatgaagagtcacaaggtcctgttggtatggaaacggagacaattaatcagcagcttaacatgttcaaggtattccagaaagaagagattgaacccttgcaaggtaaacagcaagatgtaaactggttaggtcaaggccttattcagagtgctgccaaaagcactagcactcagggcttggagcatgacctggatgatgtcaatgcacggtggaagactctcaataagaaggtggctcagcgagcagcccagctgcaggaggccttgctgcactgtgggaggttccaggatgccctggagtccctgctcagctggatggtggacactgaggagcttgtggccaatcagaagcccccgtcggctgagttcaaagtggtaaaggcccagatacaagaacaaaagcttctccagagattgttggatgaccgaaaatctacggtggaggtaatcaaacgagaaggagaaaaaattgctacaacagcagagcccgcagataaagtgaagattttgaaacagctcagtctcttggatagcagatgggaggcattgcttaataaagctgaaacaaggaatcgtcagttggaaggtatctcggtggtagcacagcaatttcatgaaaccttagaaccactgaacgagtggcttacaaccatagaaaagaggctggtgaattgtgaacccataggaacccaagcatctaaacttgaggaacaaattgcacagcacaaagttctgcaagaggacatcttactcaggaaacaaaatgtagatcaggctttactaaatggtttagaactacttaaacaaaccacaggtgatgaagttttaataattcaagataaattggaagccattaaagcaaggtacaaagacattactaaactgagcactgatgtggccaagactctggaacaggcgctgcagcttgcaaggcggctgcactccacacacgaagagctgtgtacctggctggacaaagtggaggtggaattactttcatatgaaactcaggttctgaaaggagaagaagcaagtcaagcacaaatgagaccaaaggaactgaaaaaggaagctaagaacaacaaagccttactggactcccttaatgaagtgagcagtgctttgctggaactggtaccatggagggcaagagaaggacttgagaaaatggtagctgaggacaatgagcgctaccgattagtgagcgacaccatcactcagaaggtggaggagatcgatgcagccattctgcgatcacagcagtttgaccaagcagctgatgctgagttatcctggattactgaaacagaaaaaaaattgatgtctctgggtgacatcaggcttgagcaagaccagacttctgctcagcttcaagttcaaaagacattcaccatggagattttgagacacaaggatattattgatgaccttgttaaatctgggcataaaatcatgaccgcatgcagtgaagaggaaaagcaatcaatgaagaaaaaactggacaaggtactgaagaactatgataccatctgccagattaattcagaaaggtatctgcagctggaacgggcacagtccctggttaaccaattctgggaaacatatgaagaactttggccatggctgacagaaacacaatcaatcatctctcagcttcccgccccagcccttgaatatgaaactctaaggcagcagcaggaagaacatcggcaactgcgtgagttgatagctgaacacaagcctcatatagataagatgaacaaaactgggccacagttactggaattgagccctggggaaggcttttctatccaagagaagtatgtggcagccgacaccctttacagtcaaattaaagaagatgtcaaaaagcgtgctgtggcactggatgaagccatttctcaatcaactcagttccatgacaagatagatcagatccttgagagcctggaacgcatcgtggaacgtctgaggcagccaccctctatctctgcagaggttgagaagatcaaggaacagatcagtgaaaataagaatgtgtcagtagacatggaaaagctacagccgttgtatgaaactcttaaacagaggggagaggaaatgattgctagatctggggggactgataaagacatatctgccaaagctgttcaggataagcttgaccaaatggttttcatttgggagaacatacacacactggtggaagagagggaagccaaactactggatgtgatggagctagcagaaaagttctggtgtgatcacatgtcattgatagttaccattaaagatactcaagatttcatccgggacctggaagatcctggaattgatccttcagtagtaaaacaacagcaagaagcagcagagaccataagggaagaaatagatggactacaggaggagctggatatagttattaacctaggttctgaactcattgcggcatgtggggagcctgataaacccattgtcaagaagagtatagatgagttaaattcagcatgggattctctaaataaagcttggaaagaccggattgacaaacttgaggaggcaatgcaggctgccgttcagtaccaggatggactgcaggcggtatttgactgggtagatattgcaggtggtaaattagcttcaatgtctccaattggaacagatctcgaaactgtcaagcagcagattgaagagctaaagcaatttaagtctgaggcctatcaacagcagatagaaatggaaagactgaatcatcaagcagagcttttgctaaagaaagtaacagaagagagtgacaaacacactgttcaagacccattaatggaactgaaattgatatgggatagcctggaggagagaatcatcaacagacagcataaactggagggtgctctattagccttgggtcagttccaacatgccctggatgagctcctggcatggctgacacacaccgagggcttgctaagtgagcagaaacctgttggaggagaccctaaagccattgaaattgaacttgccaagcatcatgtgctccaaaatgatgtattagcccatcagtccacagtggaagccgttaataaagcaggaaatgatctaattgaatcaagtgcaggagaagaagcaagcaaccttcagaacaagctagaggttttaaatcaacgctggcaaaatgttttggaaaaaacagaacaaaggaagcagcagctggatggtgccttgcgccaggccaaagggttccatggcgaaattgaggatttgcagcagtggctgactgacacggagcgtcatctgttggcatctaaaccgctgggaggtttaccggaaacagccaaggagcagcttaatgtccatatggaagtctgtgctgcctttgaagctaaagaagaaacatataagagtctgatgcagaaaggccagcagatgcttgcaagatgcccaaaatctgcagagacaaatattgaccaagacataaataacttgaaagaaaaatgggaatcggtggaaaccaaactcaatgaaaggaaaactaaactggaagaggctctcaacttggcaatggagttccacaattctctccaagacttcatcaactggcttactcaggctgaacagaccctaaatgtagcttctcggccaagtctcatcttggacacagtcttatttcaaattgacgaacacaaggtttttgccaatgaagtaaattctcatcgtgagcagataatagagctggacaaaactggaacccacctaaaatattttagtcagaaacaagatgttgttctaatcaagaatctacttatcagtgtacaaagtcgatgggaaaaagtggttcaacggttggtagagagaggaagatctttggatgatgcaaggaagagagccaagcagttccatgaagcttggagtaaacttatggagtggctagaagagtcagaaaagtctttggattctgaactggaaatcgcaaatgatccagacaaaataaaaacacaacttgcacaacataaggagtttcagaaatcactcggagccaagcattctgtctacgacaccaccaacaggactggacgttctctgaaggagaaaacctccctggctgatgacaacctgaaactggatgacatgctgagtgaactcagagacaaatgggataccatatgtggaaaatctgtggaaagacaaaacaaattggaggaagccctgttattttctggacaattcacagatgccctacaggctctcattgattggttatatagagttgaaccccagctggcagaagaccagcctgttcatggagacattgatttggtgatgaatctgatcgataatcacaaggccttccaaaaagagttggggaagaggaccagcagtgtgcaggccctgaagcgctcagcccgagaactcatagaaggcagtcgggatgactcctcctgggtcaaggtccagatgcaggaattaagcacacgctgggagaccgtgtgtgcactttctatatcaaagcaaacacggttagaagcagccctgcgtcaggcagaggaattccactcggtggtacatgccctcttggagtggctggctgaggcggagcaaaccctgcgtttccatggtgtcctcccagatgatgaggatgctctccggactctcattgatcagcataaagaattcatgaagaaactggaagaaaagagagctgaactaaataaagccaccactatgggcgacaccgttttggctatctgccaccccgactccatcactaccattaagcactggataacaatcatccgggcgaggtttgaggaggtgctggcctgggcaaagcaacatcagcagagattagcaagtgctctggctgggcttattgccaaacaggaattgttggaagctttgctggcttggttgcaatgggctgaaactacacttactgataaggataaagaagtcatcccccaggagatcgaagaggtgaaagcactcattgcagaacaccagaccttcatggaggaaatgaccagaaaacagcctgatgttgataaagtaacgaagacctataagaggagagctgctgatccttcctcattacaatcccatattccagtcttggataagggacgagcaggaagaaaacgctttccagcatcaagcttgtatccctctgggtcacagacacaaattgaaaccaaaaatcctagggtaaacttactggtgagcaaatggcagcaagtctggctcctggcgttggaaagaaggaggaaactcaatgatgccttggacagactagaggagctgagggaatttgctaactttgattttgatatctggcgcaaaaaatacatgcgatggatgaatcacaagaaatctcgagtgatggacttcttcaggagaattgataaagaccaggatgggaaaataacgcggcaggaatttattgatggaattctttcctcaaagtttccaaccagtcgcttggagatgagcgcagttgcagacatctttgacagagatggcgatggatatattgactactatgaatttgtagcagcccttcacccaaataaagatgcatataaacctatcacagatgccgacaaaatcgaagatgaggtgacaaggcaggtagctaagtgtaaatgtgcaaagcgatttcaagttgagcagattggtgataataaatacaggttcttcctgggaaatcagtttggagactcccagcaactgcgactggtccggatcctgcggagtactgtgatggttcgtgttggaggtggatggatggcacttgatgagttcttagtgaaaaatgatccttgcagggttcatcatcatgggagtaaaatgttacgttcggaatcaaactcttcaattactactactcagcctactatagccaaaggaaggacaaacatggaactgcgtgagaagttcattttagcagatggtgccagccagggtatggctgctttccgaccccgaggccgaagatcccggccatcatcacgaggcgcttcacccaacagatccacttctgtgtccagtcaggctgcgcaggcggcctccccacaggtccctgccaccaccacacccaagggaacgccaatacaaggaagcaagcttcgacttccaggatatttatcagggaaaggcttccactctggggaggacagtggcttgataacaactgcagctgccagagtccgaacacagtttgctgattccaagaagactcccagccgaccaggaagtcgagctggaagcaaagctggcagcagggccagcagccgccgaggcagtgatgcatcagactttgacatttcagaaatccagtccgtgtgctcagatgtggaaactgtcccccagacacacagacctacaccccgagcaggttctcggccatccacagcgaagccttcaaaaatccccacgccccagaggaaatcacctgccagcaaattggacaagtcctcaaagagatagtgcaattggttctaccaaggcccttccttgagcattt

SEQ ID NO: 9068 - DNA, 24269 bp, Homo sapiens
  source 1..24269: mol_type = unassigned DNA
atgatcgccgcggctttcctcgtcttgctgagaccctacagcatccaatgtgccctcttcctcttgttgcttctgctgggcaccatcgccaccatcgtcttcttctgctgctggcaccgcaagctccagaaagggaggcatccgatgaaatcggtcttctcgggtcgttcaagaagccgagatgctgttttgagatcgcaccactttcgttctgagggattcagagcaagccctcggcatcttagaagacgagttgcagcggccgcagctgcccgtctggaagaagtgaagcccgtggtggaagttcaccatcagagtgagcaagaaacttcagtgaggaaacgaagaatcaagaagagcagccgagtccagccagaattttatcactctgttcaaggtgcttcaatcaggaggcctagttccgggaacgcgtcctatcgctgctctatgtcttcctctgcggatttttccgatgaggatgatttcagccagaaatctggctccgcatccccagctccgggagacaccttaccctggaatttgcctaaacatgagagatcgaaaagaaagattcaagggggctcagtgctggaccctgccgagagggcagtgcttcggatagcagatgaacgggacaaagttcagaagaaaacatttacaaaatggataaatcagcatctcatgaaggttcgaaaacatgtgaatgatctctatgaagacttaagggatggacacaatttgatttctcttttagaggttctttcaggagataccttgcccagagaaaaaggtcggatgcgttttcacagactacagaatgtacaaattgcacttgactatttgaaaagacgccaggtgaaattagtgaatattagaaatgatgacataacagatggaaatcccaaattgactttgggattaatctggacaataattttgcactttcagatatctgatatccatgttactggagagtcagaggatatgtctgcaaaagagagattgctactctggacgcagcaggcaacagagggttatgctggaattcggtgtgaaaatttcactacctgctggagagatggaaaattatttaatgccatcattcataaatacaggccggacctgatagatatgaatactgttgctgttcaaagcaaccttgcaaatttagagcatgctttttacgtagcagaaaaaattggtgttataagacttctggaccctgaagatgtcgatgtctcctcacctgatgaaaaatcagtaataacttacgtgtcatctctctatgatgcatttcctaaagtccctgaaggtggggaaggcattggtgcaaatgatgttgaagtcaaatggattgaataccagaatatggtgaactacctcatccaatggattagacaccatgtgaccacaatgtctgagagaacatttcctaataatcctgtagaactgaaggcactttataatcagtatttacagtttaaagaaacagaaattccaccaaaggagacagaaaaatcaaaaattaaacgtctatataaattattagagatttggatagaatttggacgcatcaagctccttcaaggttatcatccaaatgacatagaaaaagagtgggggaaactcattattgccatgctagagagagagaaggcccttcgtccagaagtagaaaggttagaaatgttgcaacagattgccaacagagttcagagggacagtgtcatctgtgaagacaaactgattcttgctggaaatgctcttcagtctgattctaaaagattagaatcaggagtgcagtttcagaatgaagcagaaattgctgggtatatacttgaatgtgagaaccttttacgccagcatgtaattgatgtacagattcttattgatggaaaatactaccaggcagatcaattggtacagagggttgcaaaactgcgtgacgaaattatggccttaaggaacgaatgttcttctgtgtacagcaaaggacgcatactgacaacagaacagacaaagctcatgatatcaggaatcactcaaagtttaaactcaggatttgcacagaccttacaccctagtctgacctcagggctgacccagagtttaacaccttccctaacctcttctagtatgacttctggcctgtcatcagggatgacttcccgcctgactccatctgtcactccagcttatacacctggtttcccatcaggattagttccaaatttcagttcaggagtagagccaaattcattgcaaactttgaagttgatgcagatccgaaaaccccttctaaagtcttctttgctggatcaaaatttaacagaagaagaaatcaatatgaaatttgttcaggatcttttgaattgggttgatgagatgcaggtacaactggaccgcactgagtggggctcagatttgccaagtgttgaaagccatttagaaaatcataaaaatgttcatagagctattgaagaatttgaatctagtctcaaagaagctaaaatcagtgagattcaaatgacagcacctcttaaactgacttatgcagaaaagttgcacagattagagagtcagtatgcaaaactcttgaatacatccaggaatcaagaacggcaccttgatacactccataattttgtaagtcgtgcgactaatgaacttatttggttgaatgaaaaagaagaggaggaagttgcttatgactggagtgagagaaacaccaacatagctaggaaaaaagattatcatgctgaattaatgagagaacttgatcaaaaggaagaaaatattaaatcagttcaggagatagcagagcagctacttctagaaaatcatccagcccggttaactattgaggcctacagagcggcaatgcagacgcagtggagctggatcttacagctctgccagtgtgtggagcagcacataaaggagaacacagcgtatttcgagtttttcaatgatgccaaagaagctactgattacttaaggaatctaaaagatgccattcagcggaagtacagctgtgatagatcaagcagcattcacaagctagaagaccttgttcaggaatcaatggaagagaaagaagaacttctgcagtacaaaagcactatagcaaacctaatgggaaaagcaaaaacaataattcaactgaagccaaggaattctgactgtccactcaaaacttctattccgatcaaagctatctgtgactacagacaaattgagataaccatttacaaagacgatgaatgtgttttggcgaataactctcatcgtgctaaatggaaggtcattagtcctactgggaatgaggctatggtcccatctgtgtgcttcaccgttcctccaccaaacaaagaagcggtggaccttgccaacagaattgagcaacagtatcagaatgtcctgactctttggcatgagtctcacataaacatgaagagtgtagtatcctggcattatctcatcaatgaaattgatagaattcgagctagcaatgtggcttcaataaagacaatgctacctggtgaacatcagcaagttctaagtaatctacaatctcgttttgaagattttctggaagatagccaggaatcccaagtcttttcaggctcagatataacacaactggaaaaggaggttaatgtatgtaagcagtattatcaagaacttcttaaatctgcagaaagagaggagcaagaggaatcagtttataatctctacatctctgaagttcgaaacattagacttcggttagagaactgtgaagatcggctgattagacagattcgaactcccctggaaagagatgatttgcatgaaagtgtgttcagaatcacagaacaggagaaactaaagaaagagctggaacgacttaaagatgatttgggaacaatcacaaataagtgtgaggagtttttcagtcaagcagcagcctcttcatcagtccctaccctacgatcagagcttaatgtggtccttcagaacatgaaccaagtctattctatgtcttccacttacatagataagttgaaaactgttaacttggtgttaaaaaacactcaagctgcagaagccctcgtaaaactctatgaaactaaactgtgtgaagaagaagcagttatagctgacaagaataatattgagaatctaataagtactttaaagcaatggagatctgaagtagatgaaaagagacaggtattccatgccttagaggatgagttgcagaaagctaaagccatcagtgatgaaatgtttaaaacgtataaagaacgggaccttgattttgactggcacaaagaaaaagcagatcaattagttgaaaggtggcaaaatgttcatgtgcagattgacaacaggttacgggacttagagggcattggcaaatcactgaagtactacagagacacttaccatcctttagatgattggatccagcaggttgaaactactcagagaaagattcaggaaaatcagcctgaaaatagtaaaaccctagccacacagttgaatcaacagaagatgctggtgtccgaaatagaaatgaaacagagcaaaatggacgagtgtcaaaaatatgcagaacagtactcagctacagtgaaggactatgaattacaaacaatgacctaccgggccatggtagattcacaacaaaaatctccagtgaaacgccgaagaatgcagagttcagcagatctcattattcaagagttcatggacctaaggactcgatatactgccctggtcactctcatgacacaatatattaaatttgctggtgattcattgaagaggctggaagaggaggagaagtcactggaagaagaaaagaaagaacatgttgaaaaagccaaagaattgcaaaaatgggtatcaaatatcagcaagacattgaaagatgcagagaaggctggaaaacctcccttctctaagcaaaagatttccagtgaggaaatatcaaccaagaaggaacaattatcggaagcacttcaaactatacagctttttttggcaaaacatggagacaaaatgacagatgaagaaagaaatgaattggaaaaacaagtgaaaactcttcaggaaagttataatttattattcagtgaatctctgaaacagctacaagaatcacaaacctcaggagatgtaaaggtagaggagaagctggataaagtgattgcaggcaccattgatcagacaactggagaagtcctttcagtctttcaagcagttttaagaggcctcattgactatgacacaggaattaggttgcttgagacacagctaatgatttctggtctaatttcaccagaattaagaaagtgctttgaccttaaagatgccaaaagtcatggccttattgatgaacaaattctgtgccaactcaaagaactaagtaaagctaaggagattatttctgctgcgtcacctaccacaattccagtactggatgctctagctcaaagcatgataacagaatccatggccatcaaagttcttgagatactgctttctacaggctctctggttattccagccacaggagaacagttgaccctacagaaggctttccaacagaacttggtttcctcagcattattttctaaagttctggaaaggcaaaatatgtgcaaagatcttattgacccctgcacctctgagaaggtttctttaatagatatggtacaaagaagtactttacaggaaaacacagggatgtggcttctacctgtgagaccacaagaaggaggtagaataacattaaaatgtggaagaaacataagcattttaagagcagctcatgaaggtctcatagaccgtgaaaccatgtttaggttgttaagtgcacagcttctttctggaggtctgatcaattccaactctggccaaagaatgactgttgaagaagctgtcagagaaggggtgattgacagggacactgctagcagtatcctcacatatcaggttcaaactggtggaatcatccagtcaaaccctgccaagcgtttaactgtagacgaagcagtacagtgtgatttaataacttccagcagtgctcttctggtcctggaagctcagcgaggctatgttggactcatttggccccattctggtgaaatatttcccacatcatcttccttgcagcaagaattgattacaaatgaattggcctacaaaatcctgaatggcagacaaaaaatagctgctctttatattccagaaagttctcaagtcattggtttggatgctgctaaacagctaggaattatagacaacaacacagcatcaattttaaaaaatataacactgcctgataaaatgccagatttaggagatttagaagcttgtaaaaatgccagaagatggctctctttttgtaaatttcaaccctccacagttcatgattacagacaagaagaggatgtttttgatggagaagaacctgtcactactcagacctcagaagaaactaaaaaattatttctatcttatttaatgataaatagctatatggatgcaaacacagggcaaaggcttttgctgtacgatggagacttggatgaggctgttggcatgctactggaaggctgtcatgcagaatttgatggaaacacagccataaaagaatgtctcgatgtcttaagctcatctggtgtatttcttaataatgcttcaggtagagaaaaggatgaatgtacagctacaccaagtagtttcaataaatgtcactgtggagaacctgaacatgaagagactcctgaaaatagaaagtgtgctatagatgaagaatttaatgaaatgagaaatactgttatcaatagtgaattttctcagtcaggaaaactggcaagtacaatatcaattgatcctaaagttaacagttcacccagtgtgtgtgttcccagtctcatatcatatttaacacagactgaacttgcagacattagcatgcttagaagtgactctgaaaacatacttacaaactatgaaaatcaaagccgagtggaaacaaatgaacgtgcaaatgaatgtagtcattctaaaaacattcaaaactttccaagtgatttaatagaaaatcctattatgaaatcaaaaatgagtaaattctgtggtgtgaatgaaacagagaatgaagataatacaaacagggattcacctatctttgactattcccccaggctaagtgccttgttaagtcatgataaattgatgcacagtcagggaagttttaatgatacacacaccccagagagcaatggaaataagtgtgaagccccagccttatcattcagtgacaaaaccatgttgtcaggtcaaagaataggagaaaaatttcaagaccagtttctgggaattgcagctattaacatcagtttaccaggagagcagtatggacagaaatctttaaatatgatttctagtaatcctcaagtacaatatcacaatgataaatacatttcaaatacttctggtgaggatgaaaaaacacatccaggttttcagcagatgcctgaagacaaggaagatgagtctgaaatagaagagtattcctgtgctgtgactccagggggtgatactgataatgccattgtgtctcttacttgtgctacaccattgcttgatgaaaccatcagtgctagtgactatgaaacgtcactgctgaatgatcagcagaataacacaggaacagacactgatagtgatgatgatttttatgatactcccttgtttgaagatgatgaccatgattctttgcttcttgatggtgatgatcgtgattgcctgcaccctgaggactacgacacactgcaagaggaaaatgatgagacggcttctcctgctgatgttttttatgatgtctcaaaagagaatgaaaattccatggttccccagggggcaccagttggtagcttaagtgtgaagaacaaagcacattgtcttcaggatttccttatggatgttgagaaagatgaattagattctggtgaaaaaatacatttaaatcctgttggctcagataaggtgaatggacagtcactggaaactggatcagaaagggaatgcacaaatatccttgaaggtgatgaatctgactcattgactgattatgatattgtaggaggaaaagagagcttcactgcatcattaaaatttgatgacagtggcagttggagaggaagaaaggaagagtatgtaactggacaggaatttcactccgatactgatcatttagattctatgcaaagtgaagaaagttatggggattatatatatgacagtaatgatcaggatgacgatgatgatgatggcattgatgaagaaggaggaggtataagagatgagaatggaaagcccaggtgccaaaatgtggctgaagatatggatatccagttgtgtgcctctattttaaatgaaaacagtgatgaaaatgaaaatattaatacaatgattcttctggataaaatgcacagttgtagctctttagaaaaacagcaaagggtaaatgttgtacagctagcatcacctagtgaaaataacttagttactgaaaaaagcaaccttccagaatatacaactgagattgctggaaaaagcaaagaaaatctgttgaaccatgagatggtacttaaggatgtattgccgcctatcattaaagacactgaatctgaaaaaacttttggccctgcaagtatttcacatgataataataatatcagttcaacttctgaattaggtactgatctagcaaacacaaaggttaagttgattcaagggtcagaattgccagaattgactgattctgtgaaaggtaaagatgaatattttaagaatatgacaccaaaagttgactcatctcttgatcacatcatttgtactgagcctgatttaataggaaaacctgctgaggaaagccatttgtcattgatagcctctgtaactgacaaagatcctcaaggaaatggaagcgatctcattaaagggagagatggcaaaagtgatattctaatagaagatgaaacatcaattcagaaaatgtacttgggtgaaggagaagtgcttgtagaaggtctagtagaagaagaaaataggcatctcaaacttttgcctggtaaaaatacaagggatagtttcaagttaattaatagtcagtttccatttccacaaatcacaaacaatgaagaacttaatcagaaaggaagccttaaaaaagcaactgtaactcttaaagatgaaccaaataatctacaaataatagttagtaaaagtcctgttcagtttgagaatcttgaagaaatttttgacacatcagtttccaaagagattagtgatgacattacttcagacattacatcgtgggaagggaatacacattttgaggagtcattcactgatggacctgagaaagagcttgatctgtttacttacttaaaacattgtgctaaaaatataaaagcaaaagatgtagccaaaccaaatgaagatgtcccaagccatgttttaataactgcccctcccatgaaagaacatttacaattaggagttaataatacaaaagagaagtccactagtacccaaaaagactcacctcttaatgacatgatccaaagcaatgatctttgtagtaaagaaagcatctcaggaggaggaacagaaatttctcagttcacaccagaaagtattgaagccacactttcaatattatctcgtaaacatgtagaagatgttgggaaaaatgattttctgcagtcggagcggtgtgcaaatggattaggaaatgataactccagtaacactttaaatactgactattcattcttagaaattaataataagaaagaaagaattgagcaacagctaccaaaagaacaagccttgtctccaagatcccaagaaaaggaggttcagattcctgaattgtctcaggtatttgtggaggatgtaaaggatatcttaaaaagcaggttgaaagaaggtcatatgaaccctcaagaggttgaagaaccttcagcctgtgcagacactaaaattttaattcaaaatttaattaaaaggattaccacatcacagttggtaaatgaggcatctactgtgcccagcgactctcaaatgagtgactcttctggagtttcccccatgactaactcatcagaactaaagccagaaagtagagatgatcctttctgtattggaaatcttaagtctgagcttctccttaatatattgaagcaagatcaacatagccaaaaaattacaggagtatttgaattgatgagagaattaactcatatggagtatgacctagagaaaagaggcattacgtctaaagtacttccactgcagcttgaaaatattttctacaaactgcttgctgatggatattcagagaaaatagaacatgttggagactttaatcaaaaagcatgttctacatctgagatgatggaagaaaagccacatattcttggtgatattaaaagcaaagaaggaaactactattctcctaatttagaaactgtaaaagaaattggactagaaagctctactgtgtgggcatcaacattgccaagagatgagaagctcaaggatctgtgtaatgatttcccaagccatttggaatgtacttcagggtctaaagagatggcttctggagatagctcaaccgaacaattttccagtgaattacagcagtgtttacagcacactgaaaaaatgcatgagtatttgacattgcttcaagatatgaaaccccccttagacaaccaggaatctctggataacaacttggaagctttgaagaatcaacttagacagttggagacatttgaattgggattagctccaattgctgttattttaagaaaagatatgaagttggcagaagagtttttaaagtctcttcccagtgactttcccagaggccatgttgaagaattgagtattagccaccagagtttgaagaccgccttctcttccctcagcaacgtgtcttcagaaagaacgaaacagatcatgcttgcgatcgactctgaaatgtctaaactagcagtttcccatgaagaatttctgcataaacttaagtcattctcagattgggtatcagagaagagcaaatctgtgaaggatattgagattgtgaatgttcaagattctgagtatgtaaagaaacgtttggagtttctcaaggcaaataatgtattaaaagaccttggacataccaaaatgcagctggagactactgcctttgatgtgcagttcttcatttctgaatatgcacaggatctgtctcccaaccaaagcaaacaactgctgaggctcttaaatacaactcagaagtgttttcttgatgtacaggagtcagtaactacccaggtggaacgtttagagactcagttacatctagaacaagatcttgatgatcagaagattgtagcagagcgtcagcaggagtataaagagaaactccaagggatatgtgatcttcttacccaaactgaaaaccgcctaattggtcaccaagaagccttcatgattggagatggcacagttgagttaaagaaatatcagtccaagcaagaggaattacagaaagatatgcaaggaagtgcacaggcattggctgaagtagtgaaaaacacagagaacttcttaaaagagaatggtgaaaagctgtcacaggaagataaggctttgattgaacagaaacttaatgaagctaagataaagtgtgaacagcttaatttaaaagcagaacagtctaaaaaggagctggataaagttgtgacaacagcaatcaaggaagaaactgaaaaggtagcagcagtgaagcagctggaagagagcaaaaccaaaatagaaaaccttttggactggttgtcaaatgttgacaaagactcagaaagggcagggacaaaacacaaacaggtaatcgaacagaacgggacccattttcaagaaggtgatggcaagtcagcaattggagaagaggatgaagttaatggtaacctgttggagactgatgttgatgggcaagttggaaccactcaggagaatctgaatcagcaatatcagaaagttaaggcccaacacgagaagatcatctctcagcaccaagcagtgatcatagccactcagtctgcacaagtgttgcttgagaaacagggtcagtatctctctcctgaagaaaaagagaaactgcaaaagaacatgaaggaactgaaagtgcattatgaaactgcactggctgagtcagagaagaaaatgaagttaactcactctctgcaggaagaattagaaaagtttgatgctgactataccgagtttgagcactggctacagcagtcagaacaagaacttgaaaacctggaggcaggtgcagatgacatcaatggtttaatgaccaaattgaagaggcagaagagtttctcagaagacgttatttctcacaaaggtgacttgagatacatcacaatttctggaaacagagtgttggaagctgccaaatcttgcagcaagagagacggtggcaaggttgatacttctgcaacccacagagaagtgcagcgcaagttggatcatgctactgatcggttcaggtctctctactctaagtgcaatgttcttggaaataatcttaaagatctggtggataaatatcaacactatgaagatgcttcatgtggacttcttgctggactccaggcctgtgaggccacagcgagcaaacacttatctgaacctattgcggtggaccccaaaaatcttcaaaggcaattagaagagaccaaggctttgcaaggacagatatcaagtcagcaggttgctgtagagaaactgaagaaaacggctgaagtgcttttagatgccaggggatctttacttccagccaagaatgatatccagaaaacacttgatgacattgttgggagatatgaggatctgtccaagtctgttaatgaacgaaatgaaaaactccagataaccttgacccgttcactgagtgtgcaggatggcttggatgaaatgctggactggatgggaaatgtggaaagttctctgaaagaacaaggtcaagtgcctttaaactctactgctcttcaggatattatcagtaaaaacattatgttggaacaggatattgcaggtcgtcagagcagtataaatgccatgaatgaaaaagtgaagaaatttatggaaacaacagatccatccactgcatcctcactgcaagccaaaatgaaagacttgtctgctcggttttcagaagcaagtcataaacacaaagaaactcttgccaaaatggaggagctaaaaaccaaagtagaactgtttgagaacctctcagaaaagctccagacatttttagaaacaaaaactcaggctcttactgaagtagatgtgccaggaaaagatgttactgaattgtctcagtatatgcaggaatcaacttctgaatttttagaacacaagaaacatcttgaagttttgcatagtctcttgaaggagatatccagccatggcttaccaagtgataaggctttggtccttgaaaaaacaaataatttgtcaaagaaattcaaggaaatggaggataccatcaaagaaaaaaaagaagctgtaacttcttgtcaagaacagttggatgctttccaagttcttgttaaatcattgaagtcatggataaaagaaacaacaaaaaaagttcccattgtacagccttcttttggtgcagaggatttaggaaaatctttggaagacactaagaaattacaagaaaagtggagtttaaaaacaccagagattcagaaagtaaacaacagtgggatctcactatgtaacttaataagtgctgtgaccacccctgcaaaggcaatagcagcagttaaatcaggtggagcagtattaaatggtgaaggaacagccacaaatactgaggaattttgggcaaataaaggtttaacatccattaaaaaggacatgactgacataagtcatggttatgaagatcttggcctcttactcaaggacaaaatagcggaactgaacactaaactctccaaattgcaaaaggctcaggaagaatcaagtgcaatgatgcagtggttacagaaaatgaacaaaactgcaacaaaatggcagcagacacctgcacctacagatactgaagctgtgaagactcaagttgagcagaataagtcgtttgaggcagaactgaagcagaatgtaaacaaagtacaggagttgaaagacaaattgacagagctgttggaggagaacccagatactcctgaggcccccagatggaaacagatgttgacagaaatagattctaagtggcaagaactcaatcaattaacaattgatagacaacaaaaactggaagaatcctccaataatctaacccagttccagactgtagaggcccaattgaaacagtggcttgtggaaaaagaacttatggtcagtgttcttgggcccttgtcaattgacccaaatatgctaaacacacaaaggcagcaggtgcagattttgctgcaagaattcgccactcggaaacctcaatatgaacagctgacagcagctggtcagggcattctgagcaggcctggagaagacccttctttacgtgggattgtgaaagagcaactggcagctgtgacccaaaaatgggatagcctaacagggcaattgagtgacagatgtgactggattgaccaagccattgttaaaagcacacagtatcaaagcctgctgagaagcctttctgataaactgagtgacttggataataaactcagcagcagtctggctgtgagcacgcaccctgatgctatgaaccaacagttggaaacagcccaaaaaatgaagcaggagatacagcaggaaaagaagcagataaaagtggcccaggcactctgtgaggatttgtcagcactggttaaagaagagtacttgaaagcagaacttagtaggcaactagaaggcatcttaaaatcatttaaggatgttgaacagaaagcagagaatcatgtccagcaccttcagtcggcctgtgcaagctctcatcaatttcagcaaatgtctagagattttcaggcttggctggatacaaagaaagaagagcaaaacaaatctcatccaatatctgccaaactcgatgtcttggagtcattaattaaagatcataaagactttagtaaaactttgaccgctcagtctcatatgtatgaaaaaaccattgcagaaggtgaaaatctgttattaaaaacacaagggtctgagaaggcagccttacagttacagcttaatacaattaaaaccaattgggatacatttaataagcaggtgaaagaaagagaaaacaagttaaaagagtcattggaaaaagcccttaagtataaagagcaagtagagactctctggccatggatagacaaatgccaaaacaacctggaggaaataaaattttgcttggatcctgctgaaggagagaattctattgccaagttaaagtctctgcagaaggaaatggaccaacactttggtatggtagaattactgaacaacacagccaatagcttgctcagtgtctgtgagatagataaagaagttgttacagatgagaataagtcactgatccagaaggtggacatggtcactgaacaacttcacagtaagaaattctgtctggagaacatgactcagaagtttaaagaatttcaagaagtttccaaagaatctaaaaggcagcttcagtgtgcaaaggagcagctagatatccatgattcgctgggatcccaggcttacagtaacaaatacctgaccatgttgcaaactcagcagaaatcacttcaggccttgaagcatcaggtagatttggctaaaagacttgcacaggaccttgtggtagaggcctcagactcaaagggaacctctgatgttttattacaagtggaaaccatagctcaagagcatagtacactaagtcagcaggttgatgaaaagtgttctttcttagaaaccaagcttcagggcattgggcatttccagaataccattcgagaaatgttttctcagttcgcagagtttgatgatgaactggatagcatggctccagtggggagagatgcagaaacattgcaaaagcaaaaggaaactataaaagcctttctaaagaaactagaagccctcatggcaagcaatgacaatgccaataaaacctgcaagatgatgttagccacagaagaaacctctcctgaccttgttggaatcaaaagggacttggaggccttaagcaaacaatgcaacaagttactggaccgagcccaagccagagaagagcaggttgaagggacaattaagcgccttgaagaattttacagcaaattgaaagaattttctattctgctccagaaagccgaagaacatgaagagtcacaaggtcctgttggtatggaaacggagacaattaatcagcagcttaacatgttcaaggtattccagaaagaagagattgaacccttgcaaggtaaacagcaagatgtaaactggttaggtcaaggccttattcagagtgctgccaaaagcactagcactcagggcttggagcatgacctggatgatgtcaatgcacggtggaagactctcaataagaaggtggctcagcgagcagcccagctgcaggaggccttgctgcactgtgggaggttccaggatgccctggagtccctgctcagctggatggtggacactgaggagcttgtggccaatcagaagcccccgtcggctgagttcaaagtggtaaaggcccagatacaagaacaaaagcttctccagagattgttggatgaccgaaaatctacggtggaggtaatcaaacgagaaggagaaaaaattgctacaacagcagagcccgcagataaagtgaagattttgaaacagctcagtctcttggatagcagatgggaggcattgcttaataaagctgaaacaaggaatcgtcagttggaaggtatctcggtggtagcacagcaatttcatgaaaccttagaaccactgaacgagtggcttacaaccatagaaaagaggctggtgaattgtgaacccataggaacccaagcatctaaacttgaggaacaaattgcacagcacaaagccttagaagatgacatcatcaatcacaataaacatttacaccaggctgttagcattggccagtccttaaaggttttgagctccagggaggataaagatatggtgcagagtaaattagacttctctcaagtatggtacattgagattcaagagaaaagtcacagcaggtctgagctcctccagcaggccttatgtaatgctaagatttttggggaagatgaagttgaactgatgaactggctgaatgaagtgcatgacaaactgagcaagctctcagtccaggattacagcactgaggggctatggaagcagcagtctgaacttcgggttctgcaagaggacatcttactcaggaaacaaaatgtagatcaggctttactaaatggtttagaactacttaaacaaaccacaggtgatgaagttttaataattcaagataaattggaagccattaaagcaaggtacaaagacattactaaactgagcactgatgtggccaagactctggaacaggcgctgcagcttgcaaggcggctgcactccacacacgaagagctgtgtacctggctggacaaagtggaggtggaattactttcatatgaaactcaggttctgaaaggagaagaagcaagtcaagcacaaatgagaccaaaggaactgaaaaaggaagctaagaacaacaaagccttactggactcccttaatgaagtgagcagtgctttgctggaactggtaccatggagggcaagagaaggacttgagaaaatggtagctgaggacaatgagcgctaccgattagtgagcgacaccatcactcagaaggtggaggagatcgatgcagccattctgcgatcacagcagtttgaccaagcagctgatgctgagttatcctggattactgaaacagaaaaaaaattgatgtctctgggtgacatcaggcttgagcaagaccagacttctgctcagcttcaagttcaaaagacattcaccatggagattttgagacacaaggatattattgatgaccttgttaaatctgggcataaaatcatgaccgcatgcagtgaagaggaaaagcaatcaatgaagaaaaaactggacaaggtactgaagaactatgataccatctgccagattaattcagaaaggtatctgcagctggaacgggcacagtccctggttaaccaattctgggaaacatatgaagaactttggccatggctgacagaaacacaatcaatcatctctcagcttcccgccccagcccttgaatatgaaactctaaggcagcagcaggaagaacatcggcaactgcgtgagttgatagctgaacacaagcctcatatagataagatgaacaaaactgggccacagttactggaattgagccctggggaaggcttttctatccaagagaagtatgtggcagccgacaccctttacagtcaaattaaagaagatgtcaaaaagcgtgctgtggcactggatgaagccatttctcaatcaactcagttccatgacaagatagatcagatccttgagagcctggaacgcatcgtggaacgtctgaggcagccaccctctatctctgcagaggttgagaagatcaaggaacagatcagtgaaaataagaatgtgtcagtagacatggaaaagctacagccgttgtatgaaactcttaaacagaggggagaggaaatgattgctagatctggggggactgataaagacatatctgccaaagctgttcaggataagcttgaccaaatggttttcatttgggagaacatacacacactggtggaagagagggaagccaaactactggatgtgatggagctagcagaaaagttctggtgtgatcacatgtcattgatagttaccattaaagatactcaagatttcatccgggacctggaagatcctggaattgatccttcagtagtaaaacaacagcaagaagcagcagagaccataagggaagaaatagatggactacaggaggagctggatatagttattaacctaggttctgaactcattgcggcatgtggggagcctgataaacccattgtcaagaagagtatagatgagttaaattcagcatgggattctctaaataaagcttggaaagaccggattgacaaacttgaggaggcaatgcaggctgccgttcagtaccaggatggactgcaggcggtatttgactgggtagatattgcaggtggtaaattagcttcaatgtctccaattggaacagatctcgaaactgtcaagcagcagattgaagagctaaagcaatttaagtctgaggcctatcaacagcagatagaaatggaaagactgaatcatcaagcagagcttttgctaaagaaagtaacagaagagagtgacaaacacactgttcaagacccattaatggaactgaaattgatatgggatagcctggaggagagaatcatcaacagacagcataaactggagggtgctctattagccttgggtcagttccaacatgccctggatgagctcctggcatggctgacacacaccgagggcttgctaagtgagcagaaacctgttggaggagaccctaaagccattgaaattgaacttgccaagcatcatgtgctccaaaatgatgtattagcccatcagtccacagtggaagccgttaataaagcaggaaatgatctaattgaatcaagtgcaggagaagaagcaagcaaccttcagaacaagctagaggttttaaatcaacgctggcaaaatgttttggaaaaaacagaacaaaggaagcagcagctggatggtgccttgcgccaggccaaagggttccatggcgaaattgaggatttgcagcagtggctgactgacacggagcgtcatctgttggcatctaaaccgctgggaggtttaccggaaacagccaaggagcagcttaatgtccatatggaagtctgtgctgcctttgaagctaaagaagaaacatataagagtctgatgcagaaaggccagcagatgcttgcaagatgcccaaaatctgcagagacaaatattgaccaagacataaataacttgaaagaaaaatgggaatcggtggaaaccaaactcaatgaaaggaaaactaaactggaagaggctctcaacttggcaatggagttccacaattctctccaagacttcatcaactggcttactcaggctgaacagaccctaaatgtagcttctcggccaagtctcatcttggacacagtcttatttcaaattgacgaacacaaggtttttgccaatgaagtaaattctcatcgtgagcagataatagagctggacaaaactggaacccacctaaaatattttagtcagaaacaagatgttgttctaatcaagaatctacttatcagtgtacaaagtcgatgggaaaaagtggttcaacggttggtagagagaggaagatctttggatgatgcaaggaagagagccaagcagttccatgaagcttggagtaaacttatggagtggctagaagagtcagaaaagtctttggattctgaactggaaatcgcaaatgatccagacaaaataaaaacacaacttgcacaacataaggagtttcagaaatcactcggagccaagcattctgtctacgacaccaccaacaggactggacgttctctgaaggagaaaacctccctggctgatgacaacctgaaactggatgacatgctgagtgaactcagagacaaatgggataccatatgtggaaaatctgtggaaagacaaaacaaattggaggaagccctgttattttctggacaattcacagatgccctacaggctctcattgattggttatatagagttgaaccccagctggcagaagaccagcctgttcatggagacattgatttggtgatgaatctgatcgataatcacaaggccttccaaaaagagttggggaagaggaccagcagtgtgcaggccctgaagcgctcagcccgagaactcatagaaggcagtcgggatgactcctcctgggtcaaggtccagatgcaggaattaagcacacgctgggagaccgtgtgtgcactttctatatcaaagcaaacacggttagaagcagccctgcgtcaggcagaggaattccactcggtggtacatgccctcttggagtggctggctgaggcggagcaaaccctgcgtttccatggtgtcctcccagatgatgaggatgctctccggactctcattgatcagcataaagaattcatgaagaaactggaagaaaagagagctgaactaaataaagccaccactatgggcgacaccgttttggctatctgccaccccgactccatcactaccattaagcactggataacaatcatccgggcgaggtttgaggaggtgctggcctgggcaaagcaacatcagcagagattagcaagtgctctggctgggcttattgccaaacaggaattgttggaagctttgctggcttggttgcaatgggctgaaactacacttactgataaggataaagaagtcatcccccaggagatcgaagaggtgaaagcactcattgcagaacaccagaccttcatggaggaaatgaccagaaaacagcctgatgttgataaagtaacgaagacctataagaggagagctgctgatccttcctcattacaatcccatattccagtcttggataagggacgagcaggaagaaaacgctttccagcatcaagcttgtatccctctgggtcacagacacaaattgaaaccaaaaatcctagggtaaacttactggtgagcaaatggcagcaagtctggctcctggcgttggaaagaaggaggaaactcaatgatgccttggacagactagaggagctgagggaatttgctaactttgattttgatatctggcgcaaaaaatacatgcgatggatgaatcacaagaaatctcgagtgatggacttcttcaggagaattgataaagaccaggatgggaaaataacgcggcaggaatttattgatggaattctttcctcaaagtttccaaccagtcgcttggagatgagcgcagttgcagacatctttgacagagatggcgatggatatattgactactatgaatttgtagcagcccttcacccaaataaagatgcatataaacctatcacagatgccgacaaaatcgaagatgaggtgacaaggcaggtagctaagtgtaaatgtgcaaagcgatttcaagttgagcagattggtgataataaatacagggtaagttttcaaagtaattttggagactcccagcaactgcgactggtccggatcctgcggagtactgtgatggttcgtgttggaggtggatggatggcacttgatgagttcttagtgaaaaatgatccttgcagggttcatcatcatgggagtaaaatgttacgttcggaatcaaactcttcaattactactactcagcctactatagccaaaggaaggacaaacatggaactgcgtgagaagttcattttagcagatggtgccagccagggtatggctgctttccgaccccgaggccgaagatcccggccatcatcacgaggcgcttcacccaacagatccacttctgtgtccagtcaggctgcgcaggcggcctccccacaggtccctgccaccaccacacccaagggaacgccaatacaaggaagcaagcttcgacttccaggatatttatcagggaaaggcttccactctggggaggacagtggcttgataacaactgcagctgccagagtccgaacacagtttgctgattccaagaagactcccagccgaccaggaagtcgagctggaagcaaagctggcagcagggccagcagccgccgaggcagtgatgcatcagactttgacatttcagaaatccagtccgtgtgctcagatgtggaaactgtcccccagacacacagacctacaccccgagcaggttctcggccatccacagcgaagccttcaaaaatccccacgccccagaggaaatcacctgccagcaaattggacaagtcctcaaagagatagtgcaattggttctaccaaggcccttccttgagcatttattatttaagtttgaacgatgtaaaatatggtgtagaaattcttgtgaaatattgcaagaggcgagtttaaaattctgcagatggccttatttgtgtatttgtctttttattttatctgtataattttttttgtcagatattctggggttaaagtcacatcatatgtgaggaggaaaagtttaacatgaactaacatttctgcactgtaacgtgccgggcacacactaaactcagttactgtacctacaggtaagtctacatcctctctgacagccacagcactacatcaatccctgacgttagggatacctcatgacattttcctgtttttatggaaactctgagaagctgaatgatacatgcaggggatattttttgagatgatttaaatgtaaaccaaaagatggaagacaaaaagacaaacacacccacacgcagtctttgcagtatctgacagagaactcacaggaagttacttcaagcacttgccagtactatgatattcaagtaccttgcagcatttctctgccattgctttcaatgaggccagaggcatcctggatattagacctattatactgtaagaatataagtataaagtgcgttcatatacatgtgaggttttcttttgcttgagtggacagtagcacctgtatcattgaactcattttgtatcagagcaattttgcttgcagaaagctatgaaataaaacacgtcccttaactgcattgctatggaattaattttttttccccagggaaaactagtgtatttttttatgagcaatatcaatttggagtgaccaaaagatacttaaaaatgggtttattttgatttctcatctgaaataatcatgttctggtattatatctatctatatttaataaatatatacattttaatttattatgtgtactcacatactatagaaagatattagtatgcatttaataaaacatattcacttgaatatatgg

SEQ ID NO: 9069 - DNA, 8999 bp, Homo sapiens
  source 1..8999: mol_type = unassigned DNA
aatattcagctgccacttttcaccgttagaagtagagctttttccagacctcctaccttttagtctactttgaaaggtgaaagaaagaacatcgtttcaggaataaaaatgcacagtagtagttatagttaccgtagcagtgattctgtgtttagtaacactaccagcactcgaaccagtcttgattcaaatgaaaatcttctcttggttcattgtggtccaacactgatcaactcttgcattagcttcggcagtgaatcctttgatggacacaggttagaaatgttgcaacagattgccaacagagttcagagggacagtgtcatctgtgaagacaaactgattcttgctggaaatgctcttcagtctgattctaaaagattagaatcaggagtgcagtttcagaatgaagcagaaattgctgggtatatacttgaatgtgagaaccttttacgccagcatgtaattgatgtacagattcttattgatggaaaatactaccaggcagatcaattggtacagagggttgcaaaactgcgtgacgaaattatggccttaaggaacgaatgttcttctgtgtacagcaaaggacgcatactgacaacagaacagacaaagctcatgatatcaggaatcactcaaagtttaaactcaggatttgcacagaccttacaccctagtctgacctcagggctgacccagagtttaacaccttccctaacctcttctagtatgacttctggcctgtcatcagggatgacttcccgcctgactccatctgtcactccagcttatacacctggtttcccatcaggattagttccaaatttcagttcaggagtagagccaaattcattgcaaactttgaagttgatgcagatccgaaaaccccttctaaagtcttctttgctggatcaaaatttaacagaagaagaaatcaatatgaaatttgttcaggatcttttgaattgggttgatgagatgcaggtacaactggaccgcactgagtggggctcagatttgccaagtgttgaaagccatttagaaaatcataaaaatgttcatagagctattgaagaatttgaatctagtctcaaagaagctaaaatcagtgagattcaaatgacagcacctcttaaactgacttatgcagaaaagttgcacagattagagagtcagtatgcaaaactcttgaatacatccaggaatcaagaacggcaccttgatacactccataattttgtaagtcgtgcgactaatgaacttatttggttgaatgaaaaagaagaggaggaagttgcttatgactggagtgagagaaacaccaacatagctaggaaaaaagattatcatgctgaattaatgagagaacttgatcaaaaggaagaaaatattaaatcagttcaggagatagcagagcagctacttctagaaaatcatccagcccggttaactattgaggcctacagagcggcaatgcagacgcagtggagctggatcttacagctctgccagtgtgtggagcagcacataaaggagaacacagcgtatttcgagtttttcaatgatgccaaagaagctactgattacttaaggaatctaaaagatgccattcagcggaagtacagctgtgatagatcaagcagcattcacaagctagaagaccttgttcaggaatcaatggaagagaaagaagaacttctgcagtacaaaagcactatagcaaacctaatgggaaaagcaaaaacaataattcaactgaagccaaggaattctgactgtccactcaaaacttctattccgatcaaagctatctgtgactacagacaaattgagataaccatttacaaagacgatgaatgtgttttggcgaataactctcatcgtgctaaatggaaggtcattagtcctactgggaatgaggctatggtcccatctgtgtgcttcaccgttcctccaccaaacaaagaagcggtggaccttgccaacagaattgagcaacagtatcagaatgtcctgactctttggcatgagtctcacataaacatgaagagtgtagtatcctggcattatctcatcaatgaaattgatagaattcgagctagcaatgtggcttcaataaagacaatgctacctggtgaacatcagcaagttctaagtaatctacaatctcgttttgaagattttctggaagatagccaggaatcccaagtcttttcaggctcagatataacacaactggaaaaggaggttaatgtatgtaagcagtattatcaagaacttcttaaatctgcagaaagagaggagcaagaggaatcagtttataatctctacatctctgaagttcgaaacattagacttcggttagagaactgtgaagatcggctgattagacagattcgaactcccctggaaagagatgatttgcatgaaagtgtgttcagaatcacagaacaggagaaactaaagaaagagctggaacgacttaaagatgatttgggaacaatcacaaataagtgtgaggagtttttcagtcaagcagcagcctcttcatcagtccctaccctacgatcagagcttaatgtggtccttcagaacatgaaccaagtctattctatgtcttccacttacatagataagttgaaaactgttaacttggtgttaaaaaacactcaagctgcagaagccctcgtaaaactctatgaaactaaactgtgtgaagaagaagcagttatagctgacaagaataatattgagaatctaataagtactttaaagcaatggagatctgaagtagatgaaaagagacaggtattccatgccttagaggatgagttgcagaaagctaaagccatcagtgatgaaatgtttaaaacgtataaagaacgggaccttgattttgactggcacaaagaaaaagcagatcaattagttgaaaggtggcaaaatgttcatgtgcagattgacaacaggttacgggacttagagggcattggcaaatcactgaagtactacagagacacttaccatcctttagatgattggatccagcaggttgaaactactcagagaaagattcaggaaaatcagcctgaaaatagtaaaaccctagccacacagttgaatcaacagaagatgctggtgtccgaaatagaaatgaaacagagcaaaatggacgagtgtcaaaaatatgcagaacagtactcagctacagtgaaggactatgaattacaaacaatgacctaccgggccatggtagattcacaacaaaaatctccagtgaaacgccgaagaatgcagagttcagcagatctcattattcaagagttcatggacctaaggactcgatatactgccctggtcactctcatgacacaatatattaaatttgctggtgattcattgaagaggctggaagaggaggagattaaaaggtgtaaggagacttctgaacatggggcatattcagatctgcttcagcgtcagaaggcaacagtgcttgagaatagcaaacttacaggaaagataagtgagttggaaagaatggtagctgaactaaagaaacaaaagtcccgagtagaggaagaacttccgaaggtcagggaggctgcagaaaatgaattgagaaagcagcagagaaatgtagaagatatctctctgcagaagataagggctgaaagtgaagccaagcagtaccgcagggaacttgaaaccattgtgagagagaaggaagccgctgaaagagaactggagcgggtgaggcagctcaccatagaggccgaggctaaaagagctgccgtggaagagaacctcctgaattttcgcaatcagttggaggaaaacacctttaccagacgaacactggaagatcatcttaaaagaaaagatttaagtctcaatgatttggagcaacaaaaaaataaattaatggaagaattaagaagaaagagagacaatgaggaagaactcttgaagctgataaagcagatggaaaaagaccttgcatttcagaaacaggtagcagagaaacagttgaaagaaaagcagaaaattgaattggaagcaagaagaaaaataactgaaattcagtatacatgtagagaaaatgcattgccagtgtgtccgatcacacaggctacatcatgcagggcagtaacgggtctccagcaagaacatgacaagcagaaagcagaagaactcaaacagcaggtagatgaactaacagctgccaatagaaaggctgaacaagacatgagagagctgacatatgaacttaatgccctccagcttgaaaaaacgtcatctgaggaaaaggctcgtttgctaaaagataaactagatgaaacaaataatacactcagatgccttaagttggagctggaaaggaaggatcaggcggagaaagggtattctcaacaactcagagagcttggtaggcaattgaatcaaaccacaggtaaagctgaagaagccatgcaagaagctagtgatctcaagaaaataaagcgcaattatcagttagaattagaatctcttaatcatgaaaaagggaaactacaaagagaagtagacagaatcacaagggcacatgctgtagctgagaagaatattcagcatttaaattcacaaattcattcttttcgagatgagaaagaattagaaagactacaaatctgccagagaaaatcagatcatctaaaagaacaatttgagaaaagccatgagcagttgcttcaaaatatcaaagctgaaaaagaaaataatgataaaatccaaaggctcaatgaagaattggagaaaagtaatgagtgtgcagagatgctaaaacaaaaagtagaggagcttactaggcagaataatgaaaccaaattaatgatgcagagaattcaggcagaatcagagaatatagttttagagaaacaaactatccagcaaagatgtgaagcactgaaaattcaggcagatggttttaaagatcagctacgcagcacaaatgaacacttgcataaacagacaaaaacagagcaggattttcaaagaaaaattaaatgcctagaagaagacctggcgaaaagtcaaaatttggtaagtgaatttaagcaaaagtgtgaccaacagaacattatcatccagaataccaagaaagaagttagaaatctgaatgcggaactgaatgcttccaaagaagagaagcgacgcggggagcagaaagttcagctacaacaagctcaggtgcaagagttaaataacaggttgaaaaaagtacaagacgaattacacttaaagaccatagaggagcagatgacccacagaaagatggttctgtttcaggaagaatctggtaaattcaaacaatcagcagaggagtttcggaagaagatggaaaaattaatggagtccaaagtcatcactgaaaatgatatttcaggcattaggcttgactttgtgtctcttcaacaagaaaactctagagcccaagaaaatgctaagctttgtgaaacaaacattaaagaacttgaaagacagcttcaacagtatcgtgaacaaatgcagcaagggcagcacatggaagcaaatcattaccaaaaatgtcagaaacttgaggatgagctgatagcccagaagcgtgaggttgaaaacctgaagcaaaaaatggaccaacagatcaaagagcatgaacatcaattagttttgctccagtgtgaaattcaaaaaaagagcacagccaaagactgtaccttcaaaccagattttgagatgacagtgaaggagtgccagcactctggagagctgtcctctagaaacactggacaccttcacccaacacccagatcccctctgttgagatggactcaagaaccacagccattggaagagaagtggcagcatcgggttgttgaacagatacccaaagaagtccaattccagccaccaggggctccactcgagaaagagaaaagccagcagtgttactctgagtacttttctcagacaagcaccgagttacagataacttttgatgagacaaaccccattacaagactgtctgaaattgagaagataagagaccaagccctgaacaattctagaccacctgttaggtatcaagataacgcatgtgaaatggaactggtgaaggttttgacacccttagagatagctaagaacaagcagtatgatatgcatacagaagtcacaacattaaaacaagaaaagaacccagttcccagtgctgaagaatggatgcttgaagggtgcagagcatctggtggactcaagaaaggggatttccttaagaagggcttagaaccagagaccttccagaactttgatggtgatcatgcatgttcagtcagggatgatgaatttaaattccaagggcttaggcacactgtgactgccaggcagttggtggaagctaagcttctggacatgagaacaattgagcagctgcgactcggtcttaagactgttgaagaagttcagaaaactcttaacaagtttctgacgaaagccacctcaattgcagggctttacctagaatctacaaaagaaaagatttcatttgcctcagcggccgagagaatcataatagacaaaatggtggctttggcatttttagaagctcaggctgcaacaggttttataattgatcccatttcaggtcagacatattctgttgaagatgcagttcttaaaggagttgttgaccccgaattcagaattaggcttcttgaggcagagaaggcagctgtgggatattcttattcttctaagacattgtcagtgtttcaagctatggaaaatagaatgcttgacagacaaaaaggtaaacatatcttggaagcccagattgccagtgggggtgtcattgaccctgtgagaggcattcgtgttcctccagaaattgctctgcagcaggggttgttgaataatgccatcttacagtttttacatgagccatccagcaacacaagagttttccctaatcccaataacaagcaagctctgtattactcagaattactgcgaatgtgtgtatttgatgtagagtcccaatgctttctgtttccatttggggagaggaacatttccaatctcaatgtcaagaaaacacatagaatttctgtagtagatactaaaacaggatcagaattgaccgtgtatgaggctttccagagaaacctgattgagaaaagtatatatcttgaactttcagggcagcaatatcagtggaaggaagctatgttttttgaatcctatgggcattcttctcatatgctgactgatactaaaacaggattacacttcaatattaatgaggctatagagcagggaacaattgacaaagccttggtcaaaaagtatcaggaaggcctcatcacacttacagaacttgctgattctttgctgagccggttagtccccaagaaagatttgcacagtcctgttgcagggtattggctgactgctagtggggaaaggatctctgtactaaaagcctcccgtagaaatttggttgatcggattactgccctccgatgccttgaagcccaagtcagtacagggggcataattgatcctcttactggcaaaaagtaccgggtggccgaagctttgcatagaggcctggttgatgaggggtttgcccagcagctgcgacagtgtgaattagtaatcacagggattggccatcccatcactaacaaaatgatgtcagtggtggaagctgtgaatgcaaatattataaataaggaaatgggaatccgatgtttggaatttcagtacttgacaggagggttgatagagccacaggttcactctcggttatcaatagaagaggctctccaagtaggtattatagatgtcctcattgccacaaaactcaaagatcaaaagtcatatgtcagaaatataatatgccctcagacaaaaagaaagttgacatataaagaagccttagaaaaagctgattttgatttccacacaggacttaaactgttagaagtatctgagcccctgatgacaggaatttctagcctctactattcttcctaatgggacatgtttaaataactgtgcaaggggtgatgcaggctggttcatgccactttttcagagtatgatgatatcggctacatatgcagtctgtgaattatgtaacatactctatttcttgagggctgcaaattgctaagtgctcaaaatagagtaagttttaaattgaaaattacataagatttaatgcccttcaaatggtttcatttagccttgagaatggttttttgaaacttggccacactaaaatgtttttttttttacgtagaatgtgggataaacttgatgaactccaagttcacagtgtcatttcttcagaactccccttcattgaatagtgatcatttattaaatgataaattgcactcgctgaaagagcacgtcatgaagcaccatggaatcaaagagaaagatataaattcgttcccacagccttcaagctgcagtgttttagattgcttcaaaaaatgaaaaagttttgcctttttctgtatatagtgaccttctttgcatattaaaatgtttaccacaatgtcccatttctagttaagtcttcgcacttgaaagctaacattatgaatattatgtgttggaggaggggaaggattttcttcattctgtgtattttccttacatgtacagtagacgttctctattctatcagccttctatggtacctttttgtcaggacaattaggattgtaatgctaatgcaaaggcagcaattcaaagatcttctagtgcctcatgaataaagttgagatttaaaatttgtaacattgatggaacagctgggaggttagaccaatcattaaggaatgtatgccatagctttctttgctaccataaacattttggaggtgcatctgctatgtgacatggtaaatatggttaagtgaatgaataaaatgttttagtaacctgtgtgtgatgaaaaaaaa

SEQ ID NO: 9070 - DNA, 23735 bp, Homo sapiens
  source 1..23735: mol_type = unassigned DNA
atggcgggttacctctcccctgctgcttacctgtacgtggaggagcaggagtatctccaggcctacgaggatgtcctggagaggtacaaagatgaacgggacaaagttcagaagaaaacatttacaaaatggataaatcagcatctcatgaaggttcgaaaacatgtgaatgatctctatgaagacttaagggatggacacaatttgatttctcttttagaggttctttcaggagataccttgcccagagaaaaaggtcggatgcgttttcacagactacagaatgtacaaattgcacttgactatttgaaaagacgccaggtgaaattagtgaatattagaaatgatgacataacagatggaaatcccaaattgactttgggattaatctggacaataattttgcactttcagatatctgatatccatgttactggagagtcagaggatatgtctgcaaaagagagattgctactctggacgcagcaggcaacagagggttatgctggaattcggtgtgaaaatttcactacctgctggagagatggaaaattatttaatgccatcattcataaatacaggccggacctgatagatatgaatactgttgctgttcaaagcaaccttgcaaatttagagcatgctttttacgtagcagaaaaaattggtgttataagacttctggaccctgaagatgtcgatgtctcctcacctgatgaaaaatcagtaataacttacgtgtcatctctctatgatgcatttcctaaagtccctgaaggtggggaaggcattggtgcaaatgatgttgaagtcaaatggattgaataccagaatatggtgaactacctcatccaatggattagacaccatgtgaccacaatgtctgagagaacatttcctaataatcctgtagaactgaaggcactttataatcagtatttacagtttaaagaaacagaaattccaccaaaggagacagaaaaatcaaaaattaaacgtctatataaattattagagatttggatagaatttggacgcatcaagctccttcaaggttatcatccaaatgacatagaaaaagagtgggggaaactcattattgccatgctagagagagagaaggcccttcgtccagaagtagaaaggttagaaatgttgcaacagattgccaacagagttcagagggacagtgtcatctgtgaagacaaactgattcttgctggaaatgctcttcagtctgattctaaaagattagaatcaggagtgcagtttcagaatgaagcagaaattgctgggtatatacttgaatgtgagaaccttttacgccagcatgtaattgatgtacagattcttattgatggaaaatactaccaggcagatcaattggtacagagggttgcaaaactgcgtgacgaaattatggccttaaggaacgaatgttcttctgtgtacagcaaaggacgcatactgacaacagaacagacaaagctcatgatatcaggaatcactcaaagtttaaactcaggatttgcacagaccttacaccctagtctgacctcagggctgacccagagtttaacaccttccctaacctcttctagtatgacttctggcctgtcatcagggatgacttcccgcctgactccatctgtcactccagcttatacacctggtttcccatcaggattagttccaaatttcagttcaggagtagagccaaattcattgcaaactttgaagttgatgcagatccgaaaaccccttctaaagtcttctttgctggatcaaaatttaacagaagaagaaatcaatatgaaatttgttcaggatcttttgaattgggttgatgagatgcaggtacaactggaccgcactgagtggggctcagatttgccaagtgttgaaagccatttagaaaatcataaaaatgttcatagagctattgaagaatttgaatctagtctcaaagaagctaaaatcagtgagattcaaatgacagcacctcttaaactgacttatgcagaaaagttgcacagattagagagtcagtatgcaaaactcttgaatacatccaggaatcaagaacggcaccttgatacactccataattttgtaagtcgtgcgactaatgaacttatttggttgaatgaaaaagaagaggaggaagttgcttatgactggagtgagagaaacaccaacatagctaggaaaaaagattatcatgctgaattaatgagagaacttgatcaaaaggaagaaaatattaaatcagttcaggagatagcagagcagctacttctagaaaatcatccagcccggttaactattgaggcctacagagcggcaatgcagacgcagtggagctggatcttacagctctgccagtgtgtggagcagcacataaaggagaacacagcgtatttcgagtttttcaatgatgccaaagaagctactgattacttaaggaatctaaaagatgccattcagcggaagtacagctgtgatagatcaagcagcattcacaagctagaagaccttgttcaggaatcaatggaagagaaagaagaacttctgcagtacaaaagcactatagcaaacctaatgggaaaagcaaaaacaataattcaactgaagccaaggaattctgactgtccactcaaaacttctattccgatcaaagctatctgtgactacagacaaattgagataaccatttacaaagacgatgaatgtgttttggcgaataactctcatcgtgctaaatggaaggtcattagtcctactgggaatgaggctatggtcccatctgtgtgcttcaccgttcctccaccaaacaaagaagcggtggaccttgccaacagaattgagcaacagtatcagaatgtcctgactctttggcatgagtctcacataaacatgaagagtgtagtatcctggcattatctcatcaatgaaattgatagaattcgagctagcaatgtggcttcaataaagacaatgctacctggtgaacatcagcaagttctaagtaatctacaatctcgttttgaagattttctggaagatagccaggaatcccaagtcttttcaggctcagatataacacaactggaaaaggaggttaatgtatgtaagcagtattatcaagaacttcttaaatctgcagaaagagaggagcaagaggaatcagtttataatctctacatctctgaagttcgaaacattagacttcggttagagaactgtgaagatcggctgattagacagattcgaactcccctggaaagagatgatttgcatgaaagtgtgttcagaatcacagaacaggagaaactaaagaaagagctggaacgacttaaagatgatttgggaacaatcacaaataagtgtgaggagtttttcagtcaagcagcagcctcttcatcagtccctaccctacgatcagagcttaatgtggtccttcagaacatgaaccaagtctattctatgtcttccacttacatagataagttgaaaactgttaacttggtgttaaaaaacactcaagctgcagaagccctcgtaaaactctatgaaactaaactgtgtgaagaagaagcagttatagctgacaagaataatattgagaatctaataagtactttaaagcaatggagatctgaagtagatgaaaagagacaggtattccatgccttagaggatgagttgcagaaagctaaagccatcagtgatgaaatgtttaaaacgtataaagaacgggaccttgattttgactggcacaaagaaaaagcagatcaattagttgaaaggtggcaaaatgttcatgtgcagattgacaacaggttacgggacttagagggcattggcaaatcactgaagtactacagagacacttaccatcctttagatgattggatccagcaggttgaaactactcagagaaagattcaggaaaatcagcctgaaaatagtaaaaccctagccacacagttgaatcaacagaagatgctggtgtccgaaatagaaatgaaacagagcaaaatggacgagtgtcaaaaatatgcagaacagtactcagctacagtgaaggactatgaattacaaacaatgacctaccgggccatggtagattcacaacaaaaatctccagtgaaacgccgaagaatgcagagttcagcagatctcattattcaagagttcatggacctaaggactcgatatactgccctggtcactctcatgacacaatatattaaatttgctggtgattcattgaagaggctggaagaggaggagaagtcactggaagaagaaaagaaagaacatgttgaaaaagccaaagaattgcaaaaatgggtatcaaatatcagcaagacattgaaagatgcagagaaggctggaaaacctcccttctctaagcaaaagatttccagtgaggaaatatcaaccaagaaggaacaattatcggaagcacttcaaactatacagctttttttggcaaaacatggagacaaaatgacagatgaagaaagaaatgaattggaaaaacaagtgaaaactcttcaggaaagttataatttattattcagtgaatctctgaaacagctacaagaatcacaaacctcaggagatgtaaaggtagaggagaagctggataaagtgattgcaggcaccattgatcagacaactggagaagtcctttcagtctttcaagcagttttaagaggcctcattgactatgacacaggaattaggttgcttgagacacagctaatgatttctggtctaatttcaccagaattaagaaagtgctttgaccttaaagatgccaaaagtcatggccttattgatgaacaaattctgtgccaactcaaagaactaagtaaagctaaggagattatttctgctgcgtcacctaccacaattccagtactggatgctctagctcaaagcatgataacagaatccatggccatcaaagttcttgagatactgctttctacaggctctctggttattccagccacaggagaacagttgaccctacagaaggctttccaacagaacttggtttcctcagcattattttctaaagttctggaaaggcaaaatatgtgcaaagatcttattgacccctgcacctctgagaaggtttctttaatagatatggtacaaagaagtactttacaggaaaacacagggatgtggcttctacctgtgagaccacaagaaggaggtagaataacattaaaatgtggaagaaacataagcattttaagagcagctcatgaaggtctcatagaccgtgaaaccatgtttaggttgttaagtgcacagcttctttctggaggtctgatcaattccaactctggccaaagaatgactgttgaagaagctgtcagagaaggggtgattgacagggacactgctagcagtatcctcacatatcaggttcaaactggtggaatcatccagtcaaaccctgccaagcgtttaactgtagacgaagcagtacagtgtgatttaataacttccagcagtgctcttctggtcctggaagctcagcgaggctatgttggactcatttggccccattctggtgaaatatttcccacatcatcttccttgcagcaagaattgattacaaatgaattggcctacaaaatcctgaatggcagacaaaaaatagctgctctttatattccagaaagttctcaagtcattggtttggatgctgctaaacagctaggaattatagacaacaacacagcatcaattttaaaaaatataacactgcctgataaaatgccagatttaggagatttagaagcttgtaaaaatgccagaagatggctctctttttgtaaatttcaaccctccacagttcatgattacagacaagaagaggatgtttttgatggagaagaacctgtcactactcagacctcagaagaaactaaaaaattatttctatcttatttaatgataaatagctatatggatgcaaacacagggcaaaggcttttgctgtacgatggagacttggatgaggctgttggcatgctactggaaggctgtcatgcagaatttgatggaaacacagccataaaagaatgtctcgatgtcttaagctcatctggtgtatttcttaataatgcttcaggtagagaaaaggatgaatgtacagctacaccaagtagtttcaataaatgtcactgtggagaacctgaacatgaagagactcctgaaaatagaaagtgtgctatagatgaagaatttaatgaaatgagaaatactgttatcaatagtgaattttctcagtcaggaaaactggcaagtacaatatcaattgatcctaaagttaacagttcacccagtgtgtgtgttcccagtctcatatcatatttaacacagactgaacttgcagacattagcatgcttagaagtgactctgaaaacatacttacaaactatgaaaatcaaagccgagtggaaacaaatgaacgtgcaaatgaatgtagtcattctaaaaacattcaaaactttccaagtgatttaatagaaaatcctattatgaaatcaaaaatgagtaaattctgtggtgtgaatgaaacagagaatgaagataatacaaacagggattcacctatctttgactattcccccaggctaagtgccttgttaagtcatgataaattgatgcacagtcagggaagttttaatgatacacacaccccagagagcaatggaaataagtgtgaagccccagccttatcattcagtgacaaaaccatgttgtcaggtcaaagaataggagaaaaatttcaagaccagtttctgggaattgcagctattaacatcagtttaccaggagagcagtatggacagaaatctttaaatatgatttctagtaatcctcaagtacaatatcacaatgataaatacatttcaaatacttctggtgaggatgaaaaaacacatccaggttttcagcagatgcctgaagacaaggaagatgagtctgaaatagaagagtattcctgtgctgtgactccagggggtgatactgataatgccattgtgtctcttacttgtgctacaccattgcttgatgaaaccatcagtgctagtgactatgaaacgtcactgctgaatgatcagcagaataacacaggaacagacactgatagtgatgatgatttttatgatactcccttgtttgaagatgatgaccatgattctttgcttcttgatggtgatgatcgtgattgcctgcaccctgaggactacgacacactgcaagaggaaaatgatgagacggcttctcctgctgatgttttttatgatgtctcaaaagagaatgaaaattccatggttccccagggggcaccagttggtagcttaagtgtgaagaacaaagcacattgtcttcaggatttccttatggatgttgagaaagatgaattagattctggtgaaaaaatacatttaaatcctgttggctcagataaggtgaatggacagtcactggaaactggatcagaaagggaatgcacaaatatccttgaaggtgatgaatctgactcattgactgattatgatattgtaggaggaaaagagagcttcactgcatcattaaaatttgatgacagtggcagttggagaggaagaaaggaagagtatgtaactggacaggaatttcactccgatactgatcatttagattctatgcaaagtgaagaaagttatggggattatatatatgacagtaatgatcaggatgacgatgatgatgatggcattgatgaagaaggaggaggtataagagatgagaatggaaagcccaggtgccaaaatgtggctgaagatatggatatccagttgtgtgcctctattttaaatgaaaacagtgatgaaaatgaaaatattaatacaatgattcttctggataaaatgcacagttgtagctctttagaaaaacagcaaagggtaaatgttgtacagctagcatcacctagtgaaaataacttagttactgaaaaaagcaaccttccagaatatacaactgagattgctggaaaaagcaaagaaaatctgttgaaccatgagatggtacttaaggatgtattgccgcctatcattaaagacactgaatctgaaaaaacttttggccctgcaagtatttcacatgataataataatatcagttcaacttctgaattaggtactgatctagcaaacacaaaggttaagttgattcaagggtcagaattgccagaattgactgattctgtgaaaggtaaagatgaatattttaagaatatgacaccaaaagttgactcatctcttgatcacatcatttgtactgagcctgatttaataggaaaacctgctgaggaaagccatttgtcattgatagcctctgtaactgacaaagatcctcaaggaaatggaagcgatctcattaaagggagagatggcaaaagtgatattctaatagaagatgaaacatcaattcagaaaatgtacttgggtgaaggagaagtgcttgtagaaggtctagtagaagaagaaaataggcatctcaaacttttgcctggtaaaaatacaagggatagtttcaagttaattaatagtcagtttccatttccacaaatcacaaacaatgaagaacttaatcagaaaggaagccttaaaaaagcaactgtaactcttaaagatgaaccaaataatctacaaataatagttagtaaaagtcctgttcagtttgagaatcttgaagaaatttttgacacatcagtttccaaagagattagtgatgacattacttcagacattacatcgtgggaagggaatacacattttgaggagtcattcactgatggacctgagaaagagcttgatctgtttacttacttaaaacattgtgctaaaaatataaaagcaaaagatgtagccaaaccaaatgaagatgtcccaagccatgttttaataactgcccctcccatgaaagaacatttacaattaggagttaataatacaaaagagaagtccactagtacccaaaaagactcacctcttaatgacatgatccaaagcaatgatctttgtagtaaagaaagcatctcaggaggaggaacagaaatttctcagttcacaccagaaagtattgaagccacactttcaatattatctcgtaaacatgtagaagatgttgggaaaaatgattttctgcagtcggagcggtgtgcaaatggattaggaaatgataactccagtaacactttaaatactgactattcattcttagaaattaataataagaaagaaagaattgagcaacagctaccaaaagaacaagccttgtctccaagatcccaagaaaaggaggttcagattcctgaattgtctcaggtatttgtggaggatgtaaaggatatcttaaaaagcaggttgaaagaaggtcatatgaaccctcaagaggttgaagaaccttcagcctgtgcagacactaaaattttaattcaaaatttaattaaaaggattaccacatcacagttggtaaatgaggcatctactgtgcccagcgactctcaaatgagtgactcttctggagtttcccccatgactaactcatcagaactaaagccagaaagtagagatgatcctttctgtattggaaatcttaagtctgagcttctccttaatatattgaagcaagatcaacatagccaaaaaattacaggagtatttgaattgatgagagaattaactcatatggagtatgacctagagaaaagaggcattacgtctaaagtacttccactgcagcttgaaaatattttctacaaactgcttgctgatggatattcagagaaaatagaacatgttggagactttaatcaaaaagcatgttctacatctgagatgatggaagaaaagccacatattcttggtgatattaaaagcaaagaaggaaactactattctcctaatttagaaactgtaaaagaaattggactagaaagctctactgtgtgggcatcaacattgccaagagatgagaagctcaaggatctgtgtaatgatttcccaagccatttggaatgtacttcagggtctaaagagatggcttctggagatagctcaaccgaacaattttccagtgaattacagcagtgtttacagcacactgaaaaaatgcatgagtatttgacattgcttcaagatatgaaaccccccttagacaaccaggaatctctggataacaacttggaagctttgaagaatcaacttagacagttggagacatttgaattgggattagctccaattgctgttattttaagaaaagatatgaagttggcagaagagtttttaaagtctcttcccagtgactttcccagaggccatgttgaagaattgagtattagccaccagagtttgaagaccgccttctcttccctcagcaacgtgtcttcagaaagaacgaaacagatcatgcttgcgatcgactctgaaatgtctaaactagcagtttcccatgaagaatttctgcataaacttaagtcattctcagattgggtatcagagaagagcaaatctgtgaaggatattgagattgtgaatgttcaagattctgagtatgtaaagaaacgtttggagtttctcaaggcaaataatgtattaaaagaccttggacataccaaaatgcagctggagactactgcctttgatgtgcagttcttcatttctgaatatgcacaggatctgtctcccaaccaaagcaaacaactgctgaggctcttaaatacaactcagaagtgttttcttgatgtacaggagtcagtaactacccaggtggaacgtttagagactcagttacatctagaacaagatcttgatgatcagaagattgtagcagagcgtcagcaggagtataaagagaaactccaagggatatgtgatcttcttacccaaactgaaaaccgcctaattggtcaccaagaagccttcatgattggagatggcacagttgagttaaagaaatatcagtccaagcaagaggaattacagaaagatatgcaaggaagtgcacaggcattggctgaagtagtgaaaaacacagagaacttcttaaaagagaatggtgaaaagctgtcacaggaagataaggctttgattgaacagaaacttaatgaagctaagataaagtgtgaacagcttaatttaaaagcagaacagtctaaaaaggagctggataaagttgtgacaacagcaatcaaggaagaaactgaaaaggtagcagcagtgaagcagctggaagagagcaaaaccaaaatagaaaaccttttggactggttgtcaaatgttgacaaagactcagaaagggcagggacaaaacacaaacaggtaatcgaacagaacgggacccattttcaagaaggtgatggcaagtcagcaattggagaagaggatgaagttaatggtaacctgttggagactgatgttgatgggcaagttggaaccactcaggagaatctgaatcagcaatatcagaaagttaaggcccaacacgagaagatcatctctcagcaccaagcagtgatcatagccactcagtctgcacaagtgttgcttgagaaacagggtcagtatctctctcctgaagaaaaagagaaactgcaaaagaacatgaaggaactgaaagtgcattatgaaactgcactggctgagtcagagaagaaaatgaagttaactcactctctgcaggaagaattagaaaagtttgatgctgactataccgagtttgagcactggctacagcagtcagaacaagaacttgaaaacctggaggcaggtgcagatgacatcaatggtttaatgaccaaattgaagaggcagaagagtttctcagaagacgttatttctcacaaaggtgacttgagatacatcacaatttctggaaacagagtgttggaagctgccaaatcttgcagcaagagagacggtggcaaggttgatacttctgcaacccacagagaagtgcagcgcaagttggatcatgctactgatcggttcaggtctctctactctaagtgcaatgttcttggaaataatcttaaagatctggtggataaatatcaacactatgaagatgcttcatgtggacttcttgctggactccaggcctgtgaggccacagcgagcaaacacttatctgaacctattgcggtggaccccaaaaatcttcaaaggcaattagaagagaccaaggctttgcaaggacagatatcaagtcagcaggttgctgtagagaaactgaagaaaacggctgaagtgcttttagatgccaggggatctttacttccagccaagaatgatatccagaaaacacttgatgacattgttgggagatatgaggatctgtccaagtctgttaatgaacgaaatgaaaaactccagataaccttgacccgttcactgagtgtgcaggatggcttggatgaaatgctggactggatgggaaatgtggaaagttctctgaaagaacaaggtcaagtgcctttaaactctactgctcttcaggatattatcagtaaaaacattatgttggaacaggatattgcaggtcgtcagagcagtataaatgccatgaatgaaaaagtgaagaaatttatggaaacaacagatccatccactgcatcctcactgcaagccaaaatgaaagacttgtctgctcggttttcagaagcaagtcataaacacaaagaaactcttgccaaaatggaggagctaaaaaccaaagtagaactgtttgagaacctctcagaaaagctccagacatttttagaaacaaaaactcaggctcttactgaagtagatgtgccaggaaaagatgttactgaattgtctcagtatatgcaggaatcaacttctgaatttttagaacacaagaaacatcttgaagttttgcatagtctcttgaaggagatatccagccatggcttaccaagtgataaggctttggtccttgaaaaaacaaataatttgtcaaagaaattcaaggaaatggaggataccatcaaagaaaaaaaagaagctgtaacttcttgtcaagaacagttggatgctttccaagttcttgttaaatcattgaagtcatggataaaagaaacaacaaaaaaagttcccattgtacagccttcttttggtgcagaggatttaggaaaatctttggaagacactaagaaattacaagaaaagtggagtttaaaaacaccagagattcagaaagtaaacaacagtgggatctcactatgtaacttaataagtgctgtgaccacccctgcaaaggcaatagcagcagttaaatcaggtggagcagtattaaatggtgaaggaacagccacaaatactgaggaattttgggcaaataaaggtttaacatccattaaaaaggacatgactgacataagtcatggttatgaagatcttggcctcttactcaaggacaaaatagcggaactgaacactaaactctccaaattgcaaaaggctcaggaagaatcaagtgcaatgatgcagtggttacagaaaatgaacaaaactgcaacaaaatggcagcagacacctgcacctacagatactgaagctgtgaagactcaagttgagcagaataagtcgtttgaggcagaactgaagcagaatgtaaacaaagtacaggagttgaaagacaaattgacagagctgttggaggagaacccagatactcctgaggcccccagatggaaacagatgttgacagaaatagattctaagtggcaagaactcaatcaattaacaattgatagacaacaaaaactggaagaatcctccaataatctaacccagttccagactgtagaggcccaattgaaacagtggcttgtggaaaaagaacttatggtcagtgttcttgggcccttgtcaattgacccaaatatgctaaacacacaaaggcagcaggtgcagattttgctgcaagaattcgccactcggaaacctcaatatgaacagctgacagcagctggtcagggcattctgagcaggcctggagaagacccttctttacgtgggattgtgaaagagcaactggcagctgtgacccaaaaatgggatagcctaacagggcaattgagtgacagatgtgactggattgaccaagccattgttaaaagcacacagtatcaaagcctgctgagaagcctttctgataaactgagtgacttggataataaactcagcagcagtctggctgtgagcacgcaccctgatgctatgaaccaacagttggaaacagcccaaaaaatgaagcaggagatacagcaggaaaagaagcagataaaagtggcccaggcactctgtgaggatttgtcagcactggttaaagaagagtacttgaaagcagaacttagtaggcaactagaaggcatcttaaaatcatttaaggatgttgaacagaaagcagagaatcatgtccagcaccttcagtcggcctgtgcaagctctcatcaatttcagcaaatgtctagagattttcaggcttggctggatacaaagaaagaagagcaaaacaaatctcatccaatatctgccaaactcgatgtcttggagtcattaattaaagatcataaagactttagtaaaactttgaccgctcagtctcatatgtatgaaaaaaccattgcagaaggtgaaaatctgttattaaaaacacaagggtctgagaaggcagccttacagttacagcttaatacaattaaaaccaattgggatacatttaataagcaggtgaaagaaagagaaaacaagttaaaagagtcattggaaaaagcccttaagtataaagagcaagtagagactctctggccatggatagacaaatgccaaaacaacctggaggaaataaaattttgcttggatcctgctgaaggagagaattctattgccaagttaaagtctctgcagaaggaaatggaccaacactttggtatggtagaattactgaacaacacagccaatagcttgctcagtgtctgtgagatagataaagaagttgttacagatgagaataagtcactgatccagaaggtggacatggtcactgaacaacttcacagtaagaaattctgtctggagaacatgactcagaagtttaaagaatttcaagaagtttccaaagaatctaaaaggcagcttcagtgtgcaaaggagcagctagatatccatgattcgctgggatcccaggcttacagtaacaaatacctgaccatgttgcaaactcagcagaaatcacttcaggccttgaagcatcaggtagatttggctaaaagacttgcacaggaccttgtggtagaggcctcagactcaaagggaacctctgatgttttattacaagtggaaaccatagctcaagagcatagtacactaagtcagcaggttgatgaaaagtgttctttcttagaaaccaagcttcagggcattgggcatttccagaataccattcgagaaatgttttctcagttcgcagagtttgatgatgaactggatagcatggctccagtggggagagatgcagaaacattgcaaaagcaaaaggaaactataaaagcctttctaaagaaactagaagccctcatggcaagcaatgacaatgccaataaaacctgcaagatgatgttagccacagaagaaacctctcctgaccttgttggaatcaaaagggacttggaggccttaagcaaacaatgcaacaagttactggaccgagcccaagccagagaagagcaggttgaagggacaattaagcgccttgaagaattttacagcaaattgaaagaattttctattctgctccagaaagccgaagaacatgaagagtcacaaggtcctgttggtatggaaacggagacaattaatcagcagcttaacatgttcaaggtattccagaaagaagagattgaacccttgcaaggtaaacagcaagatgtaaactggttaggtcaaggccttattcagagtgctgccaaaagcactagcactcagggcttggagcatgacctggatgatgtcaatgcacggtggaagactctcaataagaaggtggctcagcgagcagcccagctgcaggaggccttgctgcactgtgggaggttccaggatgccctggagtccctgctcagctggatggtggacactgaggagcttgtggccaatcagaagcccccgtcggctgagttcaaagtggtaaaggcccagatacaagaacaaaagcttctccagagattgttggatgaccgaaaatctacggtggaggtaatcaaacgagaaggagaaaaaattgctacaacagcagagcccgcagataaagtgaagattttgaaacagctcagtctcttggatagcagatgggaggcattgcttaataaagctgaaacaaggaatcgtcagttggaaggtatctcggtggtagcacagcaatttcatgaaaccttagaaccactgaacgagtggcttacaaccatagaaaagaggctggtgaattgtgaacccataggaacccaagcatctaaacttgaggaacaaattgcacagcacaaagccttagaagatgacatcatcaatcacaataaacatttacaccaggctgttagcattggccagtccttaaaggttttgagctccagggaggataaagatatggtgcagagtaaattagacttctctcaagtatggtacattgagattcaagagaaaagtcacagcaggtctgagctcctccagcaggccttatgtaatgctaagatttttggggaagatgaagttgaactgatgaactggctgaatgaagtgcatgacaaactgagcaagctctcagtccaggattacagcactgaggggctatggaagcagcagtctgaacttcgggttctgcaagaggacatcttactcaggaaacaaaatgtagatcaggctttactaaatggtttagaactacttaaacaaaccacaggtgatgaagttttaataattcaagataaattggaagccattaaagcaaggtacaaagacattactaaactgagcactgatgtggccaagactctggaacaggcgctgcagcttgcaaggcggctgcactccacacacgaagagctgtgtacctggctggacaaagtggaggtggaattactttcatatgaaactcaggttctgaaaggagaagaagcaagtcaagcacaaatgagaccaaaggaactgaaaaaggaagctaagaacaacaaagccttactggactcccttaatgaagtgagcagtgctttgctggaactggtaccatggagggcaagagaaggacttgagaaaatggtagctgaggacaatgagcgctaccgattagtgagcgacaccatcactcagaaggtggaggagatcgatgcagccattctgcgatcacagcagtttgaccaagcagctgatgctgagttatcctggattactgaaacagaaaaaaaattgatgtctctgggtgacatcaggcttgagcaagaccagacttctgctcagcttcaagttcaaaagacattcaccatggagattttgagacacaaggatattattgatgaccttgttaaatctgggcataaaatcatgaccgcatgcagtgaagaggaaaagcaatcaatgaagaaaaaactggacaaggtactgaagaactatgataccatctgccagattaattcagaaaggtatctgcagctggaacgggcacagtccctggttaaccaattctgggaaacatatgaagaactttggccatggctgacagaaacacaatcaatcatctctcagcttcccgccccagcccttgaatatgaaactctaaggcagcagcaggaagaacatcggcaactgcgtgagttgatagctgaacacaagcctcatatagataagatgaacaaaactgggccacagttactggaattgagccctggggaaggcttttctatccaagagaagtatgtggcagccgacaccctttacagtcaaattaaagaagatgtcaaaaagcgtgctgtggcactggatgaagccatttctcaatcaactcagttccatgacaagatagatcagatccttgagagcctggaacgcatcgtggaacgtctgaggcagccaccctctatctctgcagaggttgagaagatcaaggaacagatcagtgaaaataagaatgtgtcagtagacatggaaaagctacagccgttgtatgaaactcttaaacagaggggagaggaaatgattgctagatctggggggactgataaagacatatctgccaaagctgttcaggataagcttgaccaaatggttttcatttgggagaacatacacacactggtggaagagagggaagccaaactactggatgtgatggagctagcagaaaagttctggtgtgatcacatgtcattgatagttaccattaaagatactcaagatttcatccgggacctggaagatcctggaattgatccttcagtagtaaaacaacagcaagaagcagcagagaccataagggaagaaatagatggactacaggaggagctggatatagttattaacctaggttctgaactcattgcggcatgtggggagcctgataaacccattgtcaagaagagtatagatgagttaaattcagcatgggattctctaaataaagcttggaaagaccggattgacaaacttgaggaggcaatgcaggctgccgttcagtaccaggatggactgcaggcggtatttgactgggtagatattgcaggtggtaaattagcttcaatgtctccaattggaacagatctcgaaactgtcaagcagcagattgaagagctaaagcaatttaagtctgaggcctatcaacagcagatagaaatggaaagactgaatcatcaagcagagcttttgctaaagaaagtaacagaagagagtgacaaacacactgttcaagacccattaatggaactgaaattgatatgggatagcctggaggagagaatcatcaacagacagcataaactggagggtgctctattagccttgggtcagttccaacatgccctggatgagctcctggcatggctgacacacaccgagggcttgctaagtgagcagaaacctgttggaggagaccctaaagccattgaaattgaacttgccaagcatcatgtgctccaaaatgatgtattagcccatcagtccacagtggaagccgttaataaagcaggaaatgatctaattgaatcaagtgcaggagaagaagcaagcaaccttcagaacaagctagaggttttaaatcaacgctggcaaaatgttttggaaaaaacagaacaaaggaagcagcagctggatggtgccttgcgccaggccaaagggttccatggcgaaattgaggatttgcagcagtggctgactgacacggagcgtcatctgttggcatctaaaccgctgggaggtttaccggaaacagccaaggagcagcttaatgtccatatggaagtctgtgctgcctttgaagctaaagaagaaacatataagagtctgatgcagaaaggccagcagatgcttgcaagatgcccaaaatctgcagagacaaatattgaccaagacataaataacttgaaagaaaaatgggaatcggtggaaaccaaactcaatgaaaggaaaactaaactggaagaggctctcaacttggcaatggagttccacaattctctccaagacttcatcaactggcttactcaggctgaacagaccctaaatgtagcttctcggccaagtctcatcttggacacagtcttatttcaaattgacgaacacaaggtttttgccaatgaagtaaattctcatcgtgagcagataatagagctggacaaaactggaacccacctaaaatattttagtcagaaacaagatgttgttctaatcaagaatctacttatcagtgtacaaagtcgatgggaaaaagtggttcaacggttggtagagagaggaagatctttggatgatgcaaggaagagagccaagcagttccatgaagcttggagtaaacttatggagtggctagaagagtcagaaaagtctttggattctgaactggaaatcgcaaatgatccagacaaaataaaaacacaacttgcacaacataaggagtttcagaaatcactcggagccaagcattctgtctacgacaccaccaacaggactggacgttctctgaaggagaaaacctccctggctgatgacaacctgaaactggatgacatgctgagtgaactcagagacaaatgggataccatatgtggaaaatctgtggaaagacaaaacaaattggaggaagccctgttattttctggacaattcacagatgccctacaggctctcattgattggttatatagagttgaaccccagctggcagaagaccagcctgttcatggagacattgatttggtgatgaatctgatcgataatcacaaggccttccaaaaagagttggggaagaggaccagcagtgtgcaggccctgaagcgctcagcccgagaactcatagaaggcagtcgggatgactcctcctgggtcaaggtccagatgcaggaattaagcacacgctgggagaccgtgtgtgcactttctatatcaaagcaaacacggttagaagcagccctgcgtcaggcagaggaattccactcggtggtacatgccctcttggagtggctggctgaggcggagcaaaccctgcgtttccatggtgtcctcccagatgatgaggatgctctccggactctcattgatcagcataaagaattcatgaagaaactggaagaaaagagagctgaactaaataaagccaccactatgggcgacaccgttttggctatctgccaccccgactccatcactaccattaagcactggataacaatcatccgggcgaggtttgaggaggtgctggcctgggcaaagcaacatcagcagagattagcaagtgctctggctgggcttattgccaaacaggaattgttggaagctttgctggcttggttgcaatgggctgaaactacacttactgataaggataaagaagtcatcccccaggagatcgaagaggtgaaagcactcattgcagaacaccagaccttcatggaggaaatgaccagaaaacagcctgatgttgataaagtaacgaagacctataagaggagagctgctgatccttcctcattacaatcccatattccagtcttggataagggacgagcaggaagaaaacgctttccagcatcaagcttgtatccctctgggtcacagacacaaattgaaaccaaaaatcctagggtaaacttactggtgagcaaatggcagcaagtctggctcctggcgttggaaagaaggaggaaactcaatgatgccttggacagactagaggagctgagggaatttgctaactttgattttgatatctggcgcaaaaaatacatgcgatggatgaatcacaagaaatctcgagtgatggacttcttcaggagaattgataaagaccaggatgggaaaataacgcggcaggaatttattgatggaattctttcctcaaagtttccaaccagtcgcttggagatgagcgcagttgcagacatctttgacagagatggcgatggatatattgactactatgaatttgtagcagcccttcacccaaataaagatgcatataaacctatcacagatgccgacaaaatcgaagatgaggtgacaaggcaggtagctaagtgtaaatgtgcaaagcgatttcaagttgagcagattggtgataataaatacagggtaagttttcaaagtaattttggagactcccagcaactgcgactggtccggatcctgcggagtactgtgatggttcgtgttggaggtggatggatggcacttgatgagttcttagtgaaaaatgatccttgcagggttcatcatcatgggagtaaaatgttacgttcggaatcaaactcttcaattactactactcagcctactatagccaaaggaaggacaaacatggaactgcgtgagaagttcattttagcagatggtgccagccagggtatggctgctttccgaccccgaggccgaagatcccggccatcatcacgaggcgcttcacccaacagatccacttctgtgtccagtcaggctgcgcaggcggcctccccacaggtccctgccaccaccacacccaagggaacgccaatacaaggaagcaagcttcgacttccaggatatttatcagggaaaggcttccactctggggaggacagtggcttgataacaactgcagctgccagagtccgaacacagtttgctgattccaagaagactcccagccgaccaggaagtcgagctggaagcaaagctggcagcagggccagcagccgccgaggcagtgatgcatcagactttgacatttcagaaatccagtccgtgtgctcagatgtggaaactgtcccccagacacacagacctacaccccgagcaggttctcggccatccacagcgaagccttcaaaaatccccacgccccagaggaaatcacctgccagcaaattggacaagtcctcaaagagatagtgcaattggttctaccaaggcccttccttgagcatttattatttaagtttgaacgatgtaaaatatggtgtagaaattcttgtgaaatattgcaagaggcgagtttaaaattctgcagatggccttatttgtgtatttgtctttttattttatctgtataattttttttgtcagatattctggggttaaagtcacatcatatgtgaggaggaaaagtttaacatgaactaacatttctgcactgtaacgtgccgggcacacactaaactcagttactgtacctacaggtaagtctacatcctctctgacagccacagcactacatcaatccctgacgttagggatacctcatgacattttcctgtttttatggaaactctgagaagctgaatgatacatgcaggggatattttttgagatgatttaaatgtaaaccaaaagatggaagacaaaaagacaaacacacccacacgcagtctttgcagtatctgacagagaactcacaggaagttacttcaagcacttgccagtactatgatattcaagtaccttgcagcatttctctgccattgctttcaatgaggccagaggcatcctggatattagacctattatactgtaagaatataagtataaagtgcgttcatatacatgtgaggttttcttttgcttgagtggacagtagcacctgtatcattgaactcattttgtatcagagcaattttgcttgcagaaagctatgaaataaaacacgtcccttaactgcattgctatggaattaattttttttccccagggaaaactagtgtatttttttatgagcaatatcaatttggagtgaccaaaagatacttaaaaatgggtttattttgatttctcatctgaaataatcatgttctggtattatatctatctatatttaataaatatatacattttaatttattatgtgtactcacatactatagaaagatattagtatgcatttaataaaacatattcacttgaatatatgg

SEQ ID NO: 9071 - DNA, 17390 bp, Homo sapiens
  source 1..17390: mol_type = unassigned DNA
atggcgggttacctctcccctgctgcttacctgtacgtggaggagcaggagtatctccaggcctacgaggatgtcctggagaggtacaaagatgaacgggacaaagttcagaagaaaacatttacaaaatggataaatcagcatctcatgaaggttcgaaaacatgtgaatgatctctatgaagacttaagggatggacacaatttgatttctcttttagaggttctttcaggagataccttgcccagagaaaaaggtcggatgcgttttcacagactacagaatgtacaaattgcacttgactatttgaaaagacgccaggtgaaattagtgaatattagaaatgatgacataacagatggaaatcccaaattgactttgggattaatctggacaataattttgcactttcagatatctgatatccatgttactggagagtcagaggatatgtctgcaaaagagagattgctactctggacgcagcaggcaacagagggttatgctggaattcggtgtgaaaatttcactacctgctggagagatggaaaattatttaatgccatcattcataaatacaggccggacctgatagatatgaatactgttgctgttcaaagcaaccttgcaaatttagagcatgctttttacgtagcagaaaaaattggtgttataagacttctggaccctgaagatgtcgatgtctcctcacctgatgaaaaatcagtaataacttacgtgtcatctctctatgatgcatttcctaaagtccctgaaggtggggaaggcattggtgcaaatgatgttgaagtcaaatggattgaataccagaatatggtgaactacctcatccaatggattagacaccatgtgaccacaatgtctgagagaacatttcctaataatcctgtagaactgaaggcactttataatcagtatttacagtttaaagaaacagaaattccaccaaaggagacagaaaaatcaaaaattaaacgtctatataaattattagagatttggatagaatttggacgcatcaagctccttcaaggttatcatccaaatgacatagaaaaagagtgggggaaactcattattgccatgctagagagagagaaggcccttcgtccagaagtagaaaggttagaaatgttgcaacagattgccaacagagttcagagggacagtgtcatctgtgaagacaaactgattcttgctggaaatgctcttcagtctgattctaaaagattagaatcaggagtgcagtttcagaatgaagcagaaattgctgggtatatacttgaatgtgagaaccttttacgccagcatgtaattgatgtacagattcttattgatggaaaatactaccaggcagatcaattggtacagagggttgcaaaactgcgtgacgaaattatggccttaaggaacgaatgttcttctgtgtacagcaaaggacgcatactgacaacagaacagacaaagctcatgatatcaggaatcactcaaagtttaaactcaggatttgcacagaccttacaccctagtctgacctcagggctgacccagagtttaacaccttccctaacctcttctagtatgacttctggcctgtcatcagggatgacttcccgcctgactccatctgtcactccagcttatacacctggtttcccatcaggattagttccaaatttcagttcaggagtagagccaaattcattgcaaactttgaagttgatgcagatccgaaaaccccttctaaagtcttctttgctggatcaaaatttaacagaagaagaaatcaatatgaaatttgttcaggatcttttgaattgggttgatgagatgcaggtacaactggaccgcactgagtggggctcagatttgccaagtgttgaaagccatttagaaaatcataaaaatgttcatagagctattgaagaatttgaatctagtctcaaagaagctaaaatcagtgagattcaaatgacagcacctcttaaactgacttatgcagaaaagttgcacagattagagagtcagtatgcaaaactcttgaatacatccaggaatcaagaacggcaccttgatacactccataattttgtaagtcgtgcgactaatgaacttatttggttgaatgaaaaagaagaggaggaagttgcttatgactggagtgagagaaacaccaacatagctaggaaaaaagattatcatgctgaattaatgagagaacttgatcaaaaggaagaaaatattaaatcagttcaggagatagcagagcagctacttctagaaaatcatccagcccggttaactattgaggcctacagagcggcaatgcagacgcagtggagctggatcttacagctctgccagtgtgtggagcagcacataaaggagaacacagcgtatttcgagtttttcaatgatgccaaagaagctactgattacttaaggaatctaaaagatgccattcagcggaagtacagctgtgatagatcaagcagcattcacaagctagaagaccttgttcaggaatcaatggaagagaaagaagaacttctgcagtacaaaagcactatagcaaacctaatgggaaaagcaaaaacaataattcaactgaagccaaggaattctgactgtccactcaaaacttctattccgatcaaagctatctgtgactacagacaaattgagataaccatttacaaagacgatgaatgtgttttggcgaataactctcatcgtgctaaatggaaggtcattagtcctactgggaatgaggctatggtcccatctgtgtgcttcaccgttcctccaccaaacaaagaagcggtggaccttgccaacagaattgagcaacagtatcagaatgtcctgactctttggcatgagtctcacataaacatgaagagtgtagtatcctggcattatctcatcaatgaaattgatagaattcgagctagcaatgtggcttcaataaagacaatgctacctggtgaacatcagcaagttctaagtaatctacaatctcgttttgaagattttctggaagatagccaggaatcccaagtcttttcaggctcagatataacacaactggaaaaggaggttaatgtatgtaagcagtattatcaagaacttcttaaatctgcagaaagagaggagcaagaggaatcagtttataatctctacatctctgaagttcgaaacattagacttcggttagagaactgtgaagatcggctgattagacagattcgaactcccctggaaagagatgatttgcatgaaagtgtgttcagaatcacagaacaggagaaactaaagaaagagctggaacgacttaaagatgatttgggaacaatcacaaataagtgtgaggagtttttcagtcaagcagcagcctcttcatcagtccctaccctacgatcagagcttaatgtggtccttcagaacatgaaccaagtctattctatgtcttccacttacatagataagttgaaaactgttaacttggtgttaaaaaacactcaagctgcagaagccctcgtaaaactctatgaaactaaactgtgtgaagaagaagcagttatagctgacaagaataatattgagaatctaataagtactttaaagcaatggagatctgaagtagatgaaaagagacaggtattccatgccttagaggatgagttgcagaaagctaaagccatcagtgatgaaatgtttaaaacgtataaagaacgggaccttgattttgactggcacaaagaaaaagcagatcaattagttgaaaggtggcaaaatgttcatgtgcagattgacaacaggttacgggacttagagggcattggcaaatcactgaagtactacagagacacttaccatcctttagatgattggatccagcaggttgaaactactcagagaaagattcaggaaaatcagcctgaaaatagtaaaaccctagccacacagttgaatcaacagaagatgctggtgtccgaaatagaaatgaaacagagcaaaatggacgagtgtcaaaaatatgcagaacagtactcagctacagtgaaggactatgaattacaaacaatgacctaccgggccatggtagattcacaacaaaaatctccagtgaaacgccgaagaatgcagagttcagcagatctcattattcaagagttcatggacctaaggactcgatatactgccctggtcactctcatgacacaatatattaaatttgctggtgattcattgaagaggctggaagaggaggagaagtcactggaagaagaaaagaaagaacatgttgaaaaagccaaagaattgcaaaaatgggtatcaaatatcagcaagacattgaaagatgcagagaaggctggaaaacctcccttctctaagcaaaagatttccagtgaggaaatatcaaccaagaaggaacaattatcggaagcacttcaaactatacagctttttttggcaaaacatggagacaaaatgacagatgaagaaagaaatgaattggaaaaacaagtgaaaactcttcaggaaagttataatttattattcagtgaatctctgaaacagctacaagaatcacaaacctcaggagatgtaaaggtagaggagaagattgtagcagagcgtcagcaggagtataaagagaaactccaagggatatgtgatcttcttacccaaactgaaaaccgcctaattggtcaccaagaagccttcatgattggagatggcacagttgagttaaagaaatatcagtccaagcaagaggaattacagaaagatatgcaaggaagtgcacaggcattggctgaagtagtgaaaaacacagagaacttcttaaaagagaatggtgaaaagctgtcacaggaagataaggctttgattgaacagaaacttaatgaagctaagataaagtgtgaacagcttaatttaaaagcagaacagtctaaaaaggagctggataaagttgtgacaacagcaatcaaggaagaaactgaaaaggtagcagcagtgaagcagctggaagagagcaaaaccaaaatagaaaaccttttggactggttgtcaaatgttgacaaagactcagaaagggcagggacaaaacacaaacaggtaatcgaacagaacgggacccattttcaagaaggtgatggcaagtcagcaattggagaagaggatgaagttaatggtaacctgttggagactgatgttgatgggcaagttggaaccactcaggagaatctgaatcagcaatatcagaaagttaaggcccaacacgagaagatcatctctcagcaccaagcagtgatcatagccactcagtctgcacaagtgttgcttgagaaacagggtcagtatctctctcctgaagaaaaagagaaactgcaaaagaacatgaaggaactgaaagtgcattatgaaactgcactggctgagtcagagaagaaaatgaagttaactcactctctgcaggaagaattagaaaagtttgatgctgactataccgagtttgagcactggctacagcagtcagaacaagaacttgaaaacctggaggcaggtgcagatgacatcaatggtttaatgaccaaattgaagaggcagaagagtttctcagaagacgttatttctcacaaaggtgacttgagatacatcacaatttctggaaacagagtgttggaagctgccaaatcttgcagcaagagagacggtggcaaggttgatacttctgcaacccacagagaagtgcagcgcaagttggatcatgctactgatcggttcaggtctctctactctaagtgcaatgttcttggaaataatcttaaagatctggtggataaatatcaacactatgaagatgcttcatgtggacttcttgctggactccaggcctgtgaggccacagcgagcaaacacttatctgaacctattgcggtggaccccaaaaatcttcaaaggcaattagaagagaccaaggctttgcaaggacagatatcaagtcagcaggttgctgtagagaaactgaagaaaacggctgaagtgcttttagatgccaggggatctttacttccagccaagaatgatatccagaaaacacttgatgacattgttgggagatatgaggatctgtccaagtctgttaatgaacgaaatgaaaaactccagataaccttgacccgttcactgagtgtgcaggatggcttggatgaaatgctggactggatgggaaatgtggaaagttctctgaaagaacaaggtcaagtgcctttaaactctactgctcttcaggatattatcagtaaaaacattatgttggaacaggatattgcaggtcgtcagagcagtataaatgccatgaatgaaaaagtgaagaaatttatggaaacaacagatccatccactgcatcctcactgcaagccaaaatgaaagacttgtctgctcggttttcagaagcaagtcataaacacaaagaaactcttgccaaaatggaggagctaaaaaccaaagtagaactgtttgagaacctctcagaaaagctccagacatttttagaaacaaaaactcaggctcttactgaagtagatgtgccaggaaaagatgttactgaattgtctcagtatatgcaggaatcaacttctgaatttttagaacacaagaaacatcttgaagttttgcatagtctcttgaaggagatatccagccatggcttaccaagtgataaggctttggtccttgaaaaaacaaataatttgtcaaagaaattcaaggaaatggaggataccatcaaagaaaaaaaagaagctgtaacttcttgtcaagaacagttggatgctttccaagttcttgttaaatcattgaagtcatggataaaagaaacaacaaaaaaagttcccattgtacagccttcttttggtgcagaggatttaggaaaatctttggaagacactaagaaattacaagaaaagtggagtttaaaaacaccagagattcagaaagtaaacaacagtgggatctcactatgtaacttaataagtgctgtgaccacccctgcaaaggcaatagcagcagttaaatcaggtggagcagtattaaatggtgaaggaacagccacaaatactgaggaattttgggcaaataaaggtttaacatccattaaaaaggacatgactgacataagtcatggttatgaagatcttggcctcttactcaaggacaaaatagcggaactgaacactaaactctccaaattgcaaaaggctcaggaagaatcaagtgcaatgatgcagtggttacagaaaatgaacaaaactgcaacaaaatggcagcagacacctgcacctacagatactgaagctgtgaagactcaagttgagcagaataagtcgtttgaggcagaactgaagcagaatgtaaacaaagtacaggagttgaaagacaaattgacagagctgttggaggagaacccagatactcctgaggcccccagatggaaacagatgttgacagaaatagattctaagtggcaagaactcaatcaattaacaattgatagacaacaaaaactggaagaatcctccaataatctaacccagttccagactgtagaggcccaattgaaacagtggcttgtggaaaaagaacttatggtcagtgttcttgggcccttgtcaattgacccaaatatgctaaacacacaaaggcagcaggtgcagattttgctgcaagaattcgccactcggaaacctcaatatgaacagctgacagcagctggtcagggcattctgagcaggcctggagaagacccttctttacgtgggattgtgaaagagcaactggcagctgtgacccaaaaatgggatagcctaacagggcaattgagtgacagatgtgactggattgaccaagccattgttaaaagcacacagtatcaaagcctgctgagaagcctttctgataaactgagtgacttggataataaactcagcagcagtctggctgtgagcacgcaccctgatgctatgaaccaacagttggaaacagcccaaaaaatgaagcaggagatacagcaggaaaagaagcagataaaagtggcccaggcactctgtgaggatttgtcagcactggttaaagaagagtacttgaaagcagaacttagtaggcaactagaaggcatcttaaaatcatttaaggatgttgaacagaaagcagagaatcatgtccagcaccttcagtcggcctgtgcaagctctcatcaatttcagcaaatgtctagagattttcaggcttggctggatacaaagaaagaagagcaaaacaaatctcatccaatatctgccaaactcgatgtcttggagtcattaattaaagatcataaagactttagtaaaactttgaccgctcagtctcatatgtatgaaaaaaccattgcagaaggtgaaaatctgttattaaaaacacaagggtctgagaaggcagccttacagttacagcttaatacaattaaaaccaattgggatacatttaataagcaggtgaaagaaagagaaaacaagttaaaagagtcattggaaaaagcccttaagtataaagagcaagtagagactctctggccatggatagacaaatgccaaaacaacctggaggaaataaaattttgcttggatcctgctgaaggagagaattctattgccaagttaaagtctctgcagaaggaaatggaccaacactttggtatggtagaattactgaacaacacagccaatagcttgctcagtgtctgtgagatagataaagaagttgttacagatgagaataagtcactgatccagaaggtggacatggtcactgaacaacttcacagtaagaaattctgtctggagaacatgactcagaagtttaaagaatttcaagaagtttccaaagaatctaaaaggcagcttcagtgtgcaaaggagcagctagatatccatgattcgctgggatcccaggcttacagtaacaaatacctgaccatgttgcaaactcagcagaaatcacttcaggccttgaagcatcaggtagatttggctaaaagacttgcacaggaccttgtggtagaggcctcagactcaaagggaacctctgatgttttattacaagtggaaaccatagctcaagagcatagtacactaagtcagcaggttgatgaaaagtgttctttcttagaaaccaagcttcagggcattgggcatttccagaataccattcgagaaatgttttctcagttcgcagagtttgatgatgaactggatagcatggctccagtggggagagatgcagaaacattgcaaaagcaaaaggaaactataaaagcctttctaaagaaactagaagccctcatggcaagcaatgacaatgccaataaaacctgcaagatgatgttagccacagaagaaacctctcctgaccttgttggaatcaaaagggacttggaggccttaagcaaacaatgcaacaagttactggaccgagcccaagccagagaagagcaggttgaagggacaattaagcgccttgaagaattttacagcaaattgaaagaattttctattctgctccagaaagccgaagaacatgaagagtcacaaggtcctgttggtatggaaacggagacaattaatcagcagcttaacatgttcaaggtattccagaaagaagagattgaacccttgcaaggtaaacagcaagatgtaaactggttaggtcaaggccttattcagagtgctgccaaaagcactagcactcagggcttggagcatgacctggatgatgtcaatgcacggtggaagactctcaataagaaggtggctcagcgagcagcccagctgcaggaggccttgctgcactgtgggaggttccaggatgccctggagtccctgctcagctggatggtggacactgaggagcttgtggccaatcagaagcccccgtcggctgagttcaaagtggtaaaggcccagatacaagaacaaaagcttctccagagattgttggatgaccgaaaatctacggtggaggtaatcaaacgagaaggagaaaaaattgctacaacagcagagcccgcagataaagtgaagattttgaaacagctcagtctcttggatagcagatgggaggcattgcttaataaagctgaaacaaggaatcgtcagttggaaggtatctcggtggtagcacagcaatttcatgaaaccttagaaccactgaacgagtggcttacaaccatagaaaagaggctggtgaattgtgaacccataggaacccaagcatctaaacttgaggaacaaattgcacagcacaaagccttagaagatgacatcatcaatcacaataaacatttacaccaggctgttagcattggccagtccttaaaggttttgagctccagggaggataaagatatggtgcagagtaaattagacttctctcaagtatggtacattgagattcaagagaaaagtcacagcaggtctgagctcctccagcaggccttatgtaatgctaagatttttggggaagatgaagttgaactgatgaactggctgaatgaagtgcatgacaaactgagcaagctctcagtccaggattacagcactgaggggctatggaagcagcagtctgaacttcgggttctgcaagaggacatcttactcaggaaacaaaatgtagatcaggctttactaaatggtttagaactacttaaacaaaccacaggtgatgaagttttaataattcaagataaattggaagccattaaagcaaggtacaaagacattactaaactgagcactgatgtggccaagactctggaacaggcgctgcagcttgcaaggcggctgcactccacacacgaagagctgtgtacctggctggacaaagtggaggtggaattactttcatatgaaactcaggttctgaaaggagaagaagcaagtcaagcacaaatgagaccaaaggaactgaaaaaggaagctaagaacaacaaagccttactggactcccttaatgaagtgagcagtgctttgctggaactggtaccatggagggcaagagaaggacttgagaaaatggtagctgaggacaatgagcgctaccgattagtgagcgacaccatcactcagaaggtggaggagatcgatgcagccattctgcgatcacagcagtttgaccaagcagctgatgctgagttatcctggattactgaaacagaaaaaaaattgatgtctctgggtgacatcaggcttgagcaagaccagacttctgctcagcttcaagttcaaaagacattcaccatggagattttgagacacaaggatattattgatgaccttgttaaatctgggcataaaatcatgaccgcatgcagtgaagaggaaaagcaatcaatgaagaaaaaactggacaaggtactgaagaactatgataccatctgccagattaattcagaaaggtatctgcagctggaacgggcacagtccctggttaaccaattctgggaaacatatgaagaactttggccatggctgacagaaacacaatcaatcatctctcagcttcccgccccagcccttgaatatgaaactctaaggcagcagcaggaagaacatcggcaactgcgtgagttgatagctgaacacaagcctcatatagataagatgaacaaaactgggccacagttactggaattgagccctggggaaggcttttctatccaagagaagtatgtggcagccgacaccctttacagtcaaattaaagaagatgtcaaaaagcgtgctgtggcactggatgaagccatttctcaatcaactcagttccatgacaagatagatcagatccttgagagcctggaacgcatcgtggaacgtctgaggcagccaccctctatctctgcagaggttgagaagatcaaggaacagatcagtgaaaataagaatgtgtcagtagacatggaaaagctacagccgttgtatgaaactcttaaacagaggggagaggaaatgattgctagatctggggggactgataaagacatatctgccaaagctgttcaggataagcttgaccaaatggttttcatttgggagaacatacacacactggtggaagagagggaagccaaactactggatgtgatggagctagcagaaaagttctggtgtgatcacatgtcattgatagttaccattaaagatactcaagatttcatccgggacctggaagatcctggaattgatccttcagtagtaaaacaacagcaagaagcagcagagaccataagggaagaaatagatggactacaggaggagctggatatagttattaacctaggttctgaactcattgcggcatgtggggagcctgataaacccattgtcaagaagagtatagatgagttaaattcagcatgggattctctaaataaagcttggaaagaccggattgacaaacttgaggaggcaatgcaggctgccgttcagtaccaggatggactgcaggcggtatttgactgggtagatattgcaggtggtaaattagcttcaatgtctccaattggaacagatctcgaaactgtcaagcagcagattgaagagctaaagcaatttaagtctgaggcctatcaacagcagatagaaatggaaagactgaatcatcaagcagagcttttgctaaagaaagtaacagaagagagtgacaaacacactgttcaagacccattaatggaactgaaattgatatgggatagcctggaggagagaatcatcaacagacagcataaactggagggtgctctattagccttgggtcagttccaacatgccctggatgagctcctggcatggctgacacacaccgagggcttgctaagtgagcagaaacctgttggaggagaccctaaagccattgaaattgaacttgccaagcatcatgtgctccaaaatgatgtattagcccatcagtccacagtggaagccgttaataaagcaggaaatgatctaattgaatcaagtgcaggagaagaagcaagcaaccttcagaacaagctagaggttttaaatcaacgctggcaaaatgttttggaaaaaacagaacaaaggaagcagcagctggatggtgccttgcgccaggccaaagggttccatggcgaaattgaggatttgcagcagtggctgactgacacggagcgtcatctgttggcatctaaaccgctgggaggtttaccggaaacagccaaggagcagcttaatgtccatatggaagtctgtgctgcctttgaagctaaagaagaaacatataagagtctgatgcagaaaggccagcagatgcttgcaagatgcccaaaatctgcagagacaaatattgaccaagacataaataacttgaaagaaaaatgggaatcggtggaaaccaaactcaatgaaaggaaaactaaactggaagaggctctcaacttggcaatggagttccacaattctctccaagacttcatcaactggcttactcaggctgaacagaccctaaatgtagcttctcggccaagtctcatcttggacacagtcttatttcaaattgacgaacacaaggtttttgccaatgaagtaaattctcatcgtgagcagataatagagctggacaaaactggaacccacctaaaatattttagtcagaaacaagatgttgttctaatcaagaatctacttatcagtgtacaaagtcgatgggaaaaagtggttcaacggttggtagagagaggaagatctttggatgatgcaaggaagagagccaagcagttccatgaagcttggagtaaacttatggagtggctagaagagtcagaaaagtctttggattctgaactggaaatcgcaaatgatccagacaaaataaaaacacaacttgcacaacataaggagtttcagaaatcactcggagccaagcattctgtctacgacaccaccaacaggactggacgttctctgaaggagaaaacctccctggctgatgacaacctgaaactggatgacatgctgagtgaactcagagacaaatgggataccatatgtggaaaatctgtggaaagacaaaacaaattggaggaagccctgttattttctggacaattcacagatgccctacaggctctcattgattggttatatagagttgaaccccagctggcagaagaccagcctgttcatggagacattgatttggtgatgaatctgatcgataatcacaaggccttccaaaaagagttggggaagaggaccagcagtgtgcaggccctgaagcgctcagcccgagaactcatagaaggcagtcgggatgactcctcctgggtcaaggtccagatgcaggaattaagcacacgctgggagaccgtgtgtgcactttctatatcaaagcaaacacggttagaagcagccctgcgtcaggcagaggaattccactcggtggtacatgccctcttggagtggctggctgaggcggagcaaaccctgcgtttccatggtgtcctcccagatgatgaggatgctctccggactctcattgatcagcataaagaattcatgaagaaactggaagaaaagagagctgaactaaataaagccaccactatgggcgacaccgttttggctatctgccaccccgactccatcactaccattaagcactggataacaatcatccgggcgaggtttgaggaggtgctggcctgggcaaagcaacatcagcagagattagcaagtgctctggctgggcttattgccaaacaggaattgttggaagctttgctggcttggttgcaatgggctgaaactacacttactgataaggataaagaagtcatcccccaggagatcgaagaggtgaaagcactcattgcagaacaccagaccttcatggaggaaatgaccagaaaacagcctgatgttgataaagtaacgaagacctataagaggagagctgctgatccttcctcattacaatcccatattccagtcttggataagggacgagcaggaagaaaacgctttccagcatcaagcttgtatccctctgggtcacagacacaaattgaaaccaaaaatcctagggtaaacttactgctgagggaatttgctaactttgattttgatatctggcgcaaaaaatacatgcgatggatgaatcacaagaaatctcgagtgatggacttcttcaggagaattgataaagaccaggatgggaaaataacgcggcaggaatttattgatggaattctttcctcaaagtttccaaccagtcgcttggagatgagcgcagttgcagacatctttgacagagatggcgatggatatattgactactatgaatttgtagcagcccttcacccaaataaagatgcatataaacctatcacagatgccgacaaaatcgaagatgaggtgacaaggcaggtagctaagtgtaaatgtgcaaagcgatttcaagttgagcagattggtgataataaatacagggtaagttttcaaagtaattttggagactcccagcaactgcgactggtccggatcctgcggagtactgtgatggttcgtgttggaggtggatggatggcacttgatgagttcttagtgaaaaatgatccttgcagggttcatcatcatgggagtaaaatgttacgttcggaatcaaactcttcaattactactactcagcctactatagccaaaggaaggacaaacatggaactgcgtgagaagttcattttagcagatggtgccagccagggtatggctgctttccgaccccgaggccgaagatcccggccatcatcacgaggcgcttcacccaacagatccacttctgtgtccagtcaggctgcgcaggcggcctccccacaggtccctgccaccaccacacccaagggaacgccaatacaaggaagcaagcttcgacttccaggatatttatcagggaaaggcttccactctggggaggacagtggcttgataacaactgcagctgccagagtccgaacacagtttgctgattccaagaagactcccagccgaccaggaagtcgagctggaagcaaagctggcagcagggccagcagccgccgaggcagtgatgcatcagactttgacatttcagaaatccagtccgtgtgctcagatgtggaaactgtcccccagacacacagacctacaccccgagcaggttctcggccatccacagcgaagccttcaaaaatccccacgccccagaggaaatcacctgccagcaaattggacaagtcctcaaagagatagtgcaattggttctaccaaggcccttccttgagcatttattatttaagtttgaacgatgtaaaatatggtgtagaaattcttgtgaaatattgcaagaggcgagtttaaaattctgcagatggccttatttgtgtatttgtctttttattttatctgtataattttttttgtcagatattctggggttaaagtcacatcatatgtgaggaggaaaagtttaacatgaactaacatttctgcactgtaacgtgccgggcacacactaaactcagttactgtacctacaggtaagtctacatcctctctgacagccacagcactacatcaatccctgacgttagggatacctcatgacattttcctgtttttatggaaactctgagaagctgaatgatacatgcaggggatattttttgagatgatttaaatgtaaaccaaaagatggaagacaaaaagacaaacacacccacacgcagtctttgcagtatctgacagagaactcacaggaagttacttcaagcacttgccagtactatgatattcaagtaccttgcagcatttctctgccattgctttcaatgaggccagaggcatcctggatattagacctattatactgtaagaatataagtataaagtgcgttcatatacatgtgaggttttcttttgcttgagtggacagtagcacctgtatcattgaactcattttgtatcagagcaattttgcttgcagaaagctatgaaataaaacacgtcccttaactgcattgctatggaattaattttttttccccagggaaaactagtgtatttttttatgagcaatatcaatttggagtgaccaaaagatacttaaaaatgggtttattttgatttctcatctgaaataatcatgttctggtattatatctatctatatttaataaatatatacattttaatttattatgtgtactcacatactatagaaagatattagtatgcatttaataaaacatattcacttgaatatatgg

SEQ ID NO: 9072 - DNA, 9180 bp, Homo sapiens
  source 1..9180: mol_type = unassigned DNA
atgcacagtagtagttatagttaccgtagcagtgattctgtgtttagtaacactaccagcactcgaaccagtcttgattcaaatgaaaatcttctcttggttcattgtggtccaacactgatcaactcttgcattagcttcggcagtgaatcctttgatggacacaggttagaaatgttgcaacagattgccaacagagttcagagggacagtgtcatctgtgaagacaaactgattcttgctggaaatgctcttcagtctgattctaaaagattagaatcaggagtgcagtttcagaatgaagcagaaattgctgggtatatacttgaatgtgagaaccttttacgccagcatgtaattgatgtacagattcttattgatggaaaatactaccaggcagatcaattggtacagagggttgcaaaactgcgtgacgaaattatggccttaaggaacgaatgttcttctgtgtacagcaaaggacgcatactgacaacagaacagacaaagctcatgatatcaggaatcactcaaagtttaaactcaggatttgcacagaccttacaccctagtctgacctcagggctgacccagagtttaacaccttccctaacctcttctagtatgacttctggcctgtcatcagggatgacttcccgcctgactccatctgtcactccagcttatacacctggtttcccatcaggattagttccaaatttcagttcaggagtagagccaaattcattgcaaactttgaagttgatgcagatccgaaaaccccttctaaagtcttctttgctggatcaaaatttaacagaagaagaaatcaatatgaaatttgttcaggatcttttgaattgggttgatgagatgcaggtacaactggaccgcactgagtggggctcagatttgccaagtgttgaaagccatttagaaaatcataaaaatgttcatagagctattgaagaatttgaatctagtctcaaagaagctaaaatcagtgagattcaaatgacagcacctcttaaactgacttatgcagaaaagttgcacagattagagagtcagtatgcaaaactcttgaatacatccaggaatcaagaacggcaccttgatacactccataattttgtaagtcgtgcgactaatgaacttatttggttgaatgaaaaagaagaggaggaagttgcttatgactggagtgagagaaacaccaacatagctaggaaaaaagattatcatgctgaattaatgagagaacttgatcaaaaggaagaaaatattaaatcagttcaggagatagcagagcagctacttctagaaaatcatccagcccggttaactattgaggcctacagagcggcaatgcagacgcagtggagctggatcttacagctctgccagtgtgtggagcagcacataaaggagaacacagcgtatttcgagtttttcaatgatgccaaagaagctactgattacttaaggaatctaaaagatgccattcagcggaagtacagctgtgatagatcaagcagcattcacaagctagaagaccttgttcaggaatcaatggaagagaaagaagaacttctgcagtacaaaagcactatagcaaacctaatgggaaaagcaaaaacaataattcaactgaagccaaggaattctgactgtccactcaaaacttctattccgatcaaagctatctgtgactacagacaaattgagataaccatttacaaagacgatgaatgtgttttggcgaataactctcatcgtgctaaatggaaggtcattagtcctactgggaatgaggctatggtcccatctgtgtgcttcaccgttcctccaccaaacaaagaagcggtggaccttgccaacagaattgagcaacagtatcagaatgtcctgactctttggcatgagtctcacataaacatgaagagtgtagtatcctggcattatctcatcaatgaaattgatagaattcgagctagcaatgtggcttcaataaagacaatgctacctggtgaacatcagcaagttctaagtaatctacaatctcgttttgaagattttctggaagatagccaggaatcccaagtcttttcaggctcagatataacacaactggaaaaggaggttaatgtatgtaagcagtattatcaagaacttcttaaatctgcagaaagagaggagcaagaggaatcagtttataatctctacatctctgaagttcgaaacattagacttcggttagagaactgtgaagatcggctgattagacagattcgaactcccctggaaagagatgatttgcatgaaagtgtgttcagaatcacagaacaggagaaactaaagaaagagctggaacgacttaaagatgatttgggaacaatcacaaataagtgtgaggagtttttcagtcaagcagcagcctcttcatcagtccctaccctacgatcagagcttaatgtggtccttcagaacatgaaccaagtctattctatgtcttccacttacatagataagttgaaaactgttaacttggtgttaaaaaacactcaagctgcagaagccctcgtaaaactctatgaaactaaactgtgtgaagaagaagcagttatagctgacaagaataatattgagaatctaataagtactttaaagcaatggagatctgaagtagatgaaaagagacaggtattccatgccttagaggatgagttgcagaaagctaaagccatcagtgatgaaatgtttaaaacgtataaagaacgggaccttgattttgactggcacaaagaaaaagcagatcaattagttgaaaggtggcaaaatgttcatgtgcagattgacaacaggttacgggacttagagggcattggcaaatcactgaagtactacagagacacttaccatcctttagatgattggatccagcaggttgaaactactcagagaaagattcaggaaaatcagcctgaaaatagtaaaaccctagccacacagttgaatcaacagaagatgctggtgtccgaaatagaaatgaaacagagcaaaatggacgagtgtcaaaaatatgcagaacagtactcagctacagtgaaggactatgaattacaaacaatgacctaccgggccatggtagattcacaacaaaaatctccagtgaaacgccgaagaatgcagagttcagcagatctcattattcaagagttcatggacctaaggactcgatatactgccctggtcactctcatgacacaatatattaaatttgctggtgattcattgaagaggctggaagaggaggagaagtcactggaagaagaaaagaaagaacatgttgaaaaagccaaagaattgcaaaaatgggtatcaaatatcagcaagacattgaaagatgcagagaaggctggaaaacctcccttctctaagcaaaagatttccagtgaggaaatatcaaccaagaaggaacaattatcggaagcacttcaaactatacagctttttttggcaaaacatggagacaaaatgacagatgaagaaagaaatgaattggaaaaacaagtgaaaactcttcaggaaagttataatttattattcagtgaatctctgaaacagctacaagaatcacaaacctcaggagatgtaaaggtagaggagaagctggataaagtgattgcaggcaccattgatcagacaactggagaagtcctttcagtctttcaagcagttttaagaggcctcattgactatgacacaggaattaggttgcttgagacacagctaatgatttctggtctaatttcaccagaattaagaaagtgctttgaccttaaagatgccaaaagtcatggccttattgatgaacaaattctgtgccaactcaaagaactaagtaaagctaaggagattatttctgctgcgtcacctaccacaattccagtactggatgctctagctcaaagcatgataacagaatccatggccatcaaagttcttgagatactgctttctacaggctctctggttattccagccacaggagaacagttgaccctacagaaggctttccaacagaacttggtttcctcagcattattttctaaagttctggaaaggcaaaatatgtgcaaagatcttattgacccctgcacctctgagaaggtttctttaatagatatggtacaaagaagtactttacaggaaaacacagggatgtggcttctacctgtgagaccacaagaaggaggtagaataacattaaaatgtggaagaaacataagcattttaagagcagctcatgaaggtctcatagaccgtgaaaccatgtttaggttgttaagtgcacagcttctttctggaggtctgatcaattccaactctggccaaagaatgactgttgaagaagctgtcagagaaggggtgattgacagggacactgctagcagtatcctcacatatcaggttcaaactggtggaatcatccagtcaaaccctgccaagcgtttaactgtagacgaagcagtacagtgtgatttaataacttccagcagtgctcttctggtcctggaagctcagcgaggctatgttggactcatttggccccattctggtgaaatatttcccacatcatcttccttgcagcaagaattgattacaaatgaattggcctacaaaatcctgaatggcagacaaaaaatagctgctctttatattccagaaagttctcaagtcattggtttggatgctgctaaacagctaggaattatagacaacaacacagcatcaattttaaaaaatataacactgcctgataaaatgccagatttaggagatttagaagcttgtaaaaatgccagaagatggctctctttttgtaaatttcaaccctccacagttcatgattacagacaagaagaggatgtttttgatggagaagaacctgtcactactcagacctcagaagaaactaaaaaattatttctatcttatttaatgataaatagctatatggatgcaaacacagggcaaaggcttttgctgtacgatggagacttggatgaggctgttggcatgctactggaaggctgtcatgcagaatttgatggaaacacagccataaaagaatgtctcgatgtcttaagctcatctggtgtatttcttaataatgcttcaggtagagaaaaggatgaatgtacagctacaccaagtagtttcaataaatgtcactgtggagaacctgaacatgaagagactcctgaaaatagaaagtgtgctatagatgaagaatttaatgaaatgagaaatactgttatcaatagtgaattttctcagtcaggaaaactggcaagtacaatatcaattgatcctaaagttaacagttcacccagtgtgtgtgttcccagtctcatatcatatttaacacagactgaacttgcagacattagcatgcttagaagtgactctgaaaacatacttacaaactatgaaaatcaaagccgagtggaaacaaatgaacgtgcaaatgaatgtagtcattctaaaaacattcaaaactttccaagtgatttaatagaaaatcctattatgaaatcaaaaatgagtaaattctgtggtgtgaatgaaacagagaatgaagataatacaaacagggattcacctatctttgactattcccccaggctaagtgccttgttaagtcatgataaattgatgcacagtcagggaagttttaatgatacacacaccccagagagcaatggaaataagtgtgaagccccagccttatcattcagtgacaaaaccatgttgtcaggtcaaagaataggagaaaaatttcaagaccagtttctgggaattgcagctattaacatcagtttaccaggagagcagtatggacagaaatctttaaatatgatttctagtaatcctcaagtacaatatcacaatgataaatacatttcaaatacttctggtgaggatgaaaaaacacatccaggttttcagcagatgcctgaagacaaggaagatgagtctgaaatagaagagtattcctgtgctgtgactccagggggtgatactgataatgccattgtgtctcttacttgtgctacaccattgcttgatgaaaccatcagtgctagtgactatgaaacgtcactgctgaatgatcagcagaataacacaggaacagacactgatagtgatgatgatttttatgatactcccttgtttgaagatgatgaccatgattctttgcttcttgatggtgatgatcgtgattgcctgcaccctgaggactacgacacactgcaagaggaaaatgatgagacggcttctcctgctgatgttttttatgatgtctcaaaagagaatgaaaattccatggttccccagggggcaccagttggtagcttaagtgtgaagaacaaagcacattgtcttcaggatttccttatggatgttgagaaagatgaattagattctggtgaaaaaatacatttaaatcctgttggctcagataaggtgaatggacagtcactggaaactggatcagaaagggaatgcacaaatatccttgaaggtgatgaatctgactcattgactgattatgatattgtaggaggaaaagagagcttcactgcatcattaaaatttgatgacagtggcagttggagaggaagaaaggaagagtatgtaactggacaggaatttcactccgatactgatcatttagattctatgcaaagtgaagaaagttatggggattatatatatgacagtaatgatcaggatgacgatgatgatgatggcattgatgaagaaggaggaggtataagagatgagaatggaaagcccaggtgccaaaatgtggctgaagatatggatatccagttgtgtgcctctattttaaatgaaaacagtgatgaaaatgaaaatattaatacaatgattcttctggataaaatgcacagttgtagctctttagaaaaacagcaaagggtaaatgttgtacagctagcatcacctagtgaaaataacttagttactgaaaaaagcaaccttccagaatatacaactgagattgctggaaaaagcaaagaaaatctgttgaaccatgagatggtacttaaggatgtattgccgcctatcattaaagacactgaatctgaaaaaacttttggccctgcaagtatttcacatgataataataatatcagttcaacttctgaattaggtactgatctagcaaacacaaaggttaagttgattcaagggtcagaattgccagaattgactgattctgtgaaaggtaaagatgaatattttaagaatatgacaccaaaagttgactcatctcttgatcacatcatttgtactgagcctgatttaataggaaaacctgctgaggaaagccatttgtcattgatagcctctgtaactgacaaagatcctcaaggaaatggaagcgatctcattaaagggagagatggcaaaagtgatattctaatagaagatgaaacatcaattcagaaaatgtacttgggtgaaggagaagtgcttgtagaaggtctagtagaagaagaaaataggcatctcaaacttttgcctggtaaaaatacaagggatagtttcaagttaattaatagtcagtttccatttccacaaatcacaaacaatgaagaacttaatcagaaaggaagccttaaaaaagcaactgtaactcttaaagatgaaccaaataatctacaaataatagttagtaaaagtcctgttcagtttgagaatcttgaagaaatttttgacacatcagtttccaaagagattagtgatgacattacttcagacattacatcgtgggaagggaatacacattttgaggagtcattcactgatggacctgagaaagagcttgatctgtttacttacttaaaacattgtgctaaaaatataaaagcaaaagatgtagccaaaccaaatgaagatgtcccaagccatgttttaataactgcccctcccatgaaagaacatttacaattaggagttaataatacaaaagagaagtccactagtacccaaaaagactcacctcttaatgacatgatccaaagcaatgatctttgtagtaaagaaagcatctcaggaggaggaacagaaatttctcagttcacaccagaaagtattgaagccacactttcaatattatctcgtaaacatgtagaagatgttgggaaaaatgattttctgcagtcggagcggtgtgcaaatggattaggaaatgataactccagtaacactttaaatactgactattcattcttagaaattaataataagaaagaaagaattgagcaacagctaccaaaagaacaagccttgtctccaagatcccaagaaaaggaggttcagattcctgaattgtctcaggtatttgtggaggatgtaaaggatatcttaaaaagcaggttgaaagaaggtcatatgaaccctcaagaggttgaagaaccttcagcctgtgcagacactaaaattttaattcaaaatttaattaaaaggattaccacatcacagttggtaaatgaggcatctactgtgcccagcgactctcaaatgagtgactcttctggagtttcccccatgactaactcatcagaactaaagccagaaagtagagatgatcctttctgtattggaaatcttaagtctgagcttctccttaatatattgaagcaagatcaacatagccaaaaaattacaggagtatttgaattgatgagagaattaactcatatggagtatgacctagagaaaagaggcattacgtctaaagtacttccactgcagcttgaaaatattttctacaaactgcttgctgatggatattcagagaaaatagaacatgttggagactttaatcaaaaagcatgttctacatctgagatgatggaagaaaagccacatattcttggtgatattaaaagcaaagaaggaaactactattctcctaatttagaaactgtaaaagaaattggactagaaagctctactgtgtgggcatcaacattgccaagagatgagaagctcaaggatctgtgtaatgatttcccaagccatttggaatgtacttcagggtctaaagagatggcttctggagatagctcaaccgaacaa

SEQ ID NO: 9073 - DNA, 22865 bp, Homo sapiens
  source 1..22865: mol_type = unassigned DNA
aatattcagctgccacttttcaccgttagaagtagagctttttccagacctcctaccttttagtctactttgaaaggtgaaagaaagaacatcgtttcaggaataaaaatgcacagtagtagttatagttaccgtagcagtgattctgtgtttagtaacactaccagcactcgaaccagtcttgattcaaatgaaaatcttctcttggttcattgtggtccaacactgatcaactcttgcattagcttcggcagtgaatcctttgatggacacaggttagaaatgttgcaacagattgccaacagagttcagagggacagtgtcatctgtgaagacaaactgattcttgctggaaatgctcttcagtctgattctaaaagattagaatcaggagtgcagtttcagaatgaagcagaaattgctgggtatatacttgaatgtgagaaccttttacgccagcatgtaattgatgtacagattcttattgatggaaaatactaccaggcagatcaattggtacagagggttgcaaaactgcgtgacgaaattatggccttaaggaacgaatgttcttctgtgtacagcaaaggacgcatactgacaacagaacagacaaagctcatgatatcaggaatcactcaaagtttaaactcaggatttgcacagaccttacaccctagtctgacctcagggctgacccagagtttaacaccttccctaacctcttctagtatgacttctggcctgtcatcagggatgacttcccgcctgactccatctgtcactccagcttatacacctggtttcccatcaggattagttccaaatttcagttcaggagtagagccaaattcattgcaaactttgaagttgatgcagatccgaaaaccccttctaaagtcttctttgctggatcaaaatttaacagaagaagaaatcaatatgaaatttgttcaggatcttttgaattgggttgatgagatgcaggtacaactggaccgcactgagtggggctcagatttgccaagtgttgaaagccatttagaaaatcataaaaatgttcatagagctattgaagaatttgaatctagtctcaaagaagctaaaatcagtgagattcaaatgacagcacctcttaaactgacttatgcagaaaagttgcacagattagagagtcagtatgcaaaactcttgaatacatccaggaatcaagaacggcaccttgatacactccataattttgtaagtcgtgcgactaatgaacttatttggttgaatgaaaaagaagaggaggaagttgcttatgactggagtgagagaaacaccaacatagctaggaaaaaagattatcatgctgaattaatgagagaacttgatcaaaaggaagaaaatattaaatcagttcaggagatagcagagcagctacttctagaaaatcatccagcccggttaactattgaggcctacagagcggcaatgcagacgcagtggagctggatcttacagctctgccagtgtgtggagcagcacataaaggagaacacagcgtatttcgagtttttcaatgatgccaaagaagctactgattacttaaggaatctaaaagatgccattcagcggaagtacagctgtgatagatcaagcagcattcacaagctagaagaccttgttcaggaatcaatggaagagaaagaagaacttctgcagtacaaaagcactatagcaaacctaatgggaaaagcaaaaacaataattcaactgaagccaaggaattctgactgtccactcaaaacttctattccgatcaaagctatctgtgactacagacaaattgagataaccatttacaaagacgatgaatgtgttttggcgaataactctcatcgtgctaaatggaaggtcattagtcctactgggaatgaggctatggtcccatctgtgtgcttcaccgttcctccaccaaacaaagaagcggtggaccttgccaacagaattgagcaacagtatcagaatgtcctgactctttggcatgagtctcacataaacatgaagagtgtagtatcctggcattatctcatcaatgaaattgatagaattcgagctagcaatgtggcttcaataaagacaatgctacctggtgaacatcagcaagttctaagtaatctacaatctcgttttgaagattttctggaagatagccaggaatcccaagtcttttcaggctcagatataacacaactggaaaaggaggttaatgtatgtaagcagtattatcaagaacttcttaaatctgcagaaagagaggagcaagaggaatcagtttataatctctacatctctgaagttcgaaacattagacttcggttagagaactgtgaagatcggctgattagacagattcgaactcccctggaaagagatgatttgcatgaaagtgtgttcagaatcacagaacaggagaaactaaagaaagagctggaacgacttaaagatgatttgggaacaatcacaaataagtgtgaggagtttttcagtcaagcagcagcctcttcatcagtccctaccctacgatcagagcttaatgtggtccttcagaacatgaaccaagtctattctatgtcttccacttacatagataagttgaaaactgttaacttggtgttaaaaaacactcaagctgcagaagccctcgtaaaactctatgaaactaaactgtgtgaagaagaagcagttatagctgacaagaataatattgagaatctaataagtactttaaagcaatggagatctgaagtagatgaaaagagacaggtattccatgccttagaggatgagttgcagaaagctaaagccatcagtgatgaaatgtttaaaacgtataaagaacgggaccttgattttgactggcacaaagaaaaagcagatcaattagttgaaaggtggcaaaatgttcatgtgcagattgacaacaggttacgggacttagagggcattggcaaatcactgaagtactacagagacacttaccatcctttagatgattggatccagcaggttgaaactactcagagaaagattcaggaaaatcagcctgaaaatagtaaaaccctagccacacagttgaatcaacagaagatgctggtgtccgaaatagaaatgaaacagagcaaaatggacgagtgtcaaaaatatgcagaacagtactcagctacagtgaaggactatgaattacaaacaatgacctaccgggccatggtagattcacaacaaaaatctccagtgaaacgccgaagaatgcagagttcagcagatctcattattcaagagttcatggacctaaggactcgatatactgccctggtcactctcatgacacaatatattaaatttgctggtgattcattgaagaggctggaagaggaggagaagtcactggaagaagaaaagaaagaacatgttgaaaaagccaaagaattgcaaaaatgggtatcaaatatcagcaagacattgaaagatgcagagaaggctggaaaacctcccttctctaagcaaaagatttccagtgaggaaatatcaaccaagaaggaacaattatcggaagcacttcaaactatacagctttttttggcaaaacatggagacaaaatgacagatgaagaaagaaatgaattggaaaaacaagtgaaaactcttcaggaaagttataatttattattcagtgaatctctgaaacagctacaagaatcacaaacctcaggagatgtaaaggtagaggagaagctggataaagtgattgcaggcaccattgatcagacaactggagaagtcctttcagtctttcaagcagttttaagaggcctcattgactatgacacaggaattaggttgcttgagacacagctaatgatttctggtctaatttcaccagaattaagaaagtgctttgaccttaaagatgccaaaagtcatggccttattgatgaacaaattctgtgccaactcaaagaactaagtaaagctaaggagattatttctgctgcgtcacctaccacaattccagtactggatgctctagctcaaagcatgataacagaatccatggccatcaaagttcttgagatactgctttctacaggctctctggttattccagccacaggagaacagttgaccctacagaaggctttccaacagaacttggtttcctcagcattattttctaaagttctggaaaggcaaaatatgtgcaaagatcttattgacccctgcacctctgagaaggtttctttaatagatatggtacaaagaagtactttacaggaaaacacagggatgtggcttctacctgtgagaccacaagaaggaggtagaataacattaaaatgtggaagaaacataagcattttaagagcagctcatgaaggtctcatagaccgtgaaaccatgtttaggttgttaagtgcacagcttctttctggaggtctgatcaattccaactctggccaaagaatgactgttgaagaagctgtcagagaaggggtgattgacagggacactgctagcagtatcctcacatatcaggttcaaactggtggaatcatccagtcaaaccctgccaagcgtttaactgtagacgaagcagtacagtgtgatttaataacttccagcagtgctcttctggtcctggaagctcagcgaggctatgttggactcatttggccccattctggtgaaatatttcccacatcatcttccttgcagcaagaattgattacaaatgaattggcctacaaaatcctgaatggcagacaaaaaatagctgctctttatattccagaaagttctcaagtcattggtttggatgctgctaaacagctaggaattatagacaacaacacagcatcaattttaaaaaatataacactgcctgataaaatgccagatttaggagatttagaagcttgtaaaaatgccagaagatggctctctttttgtaaatttcaaccctccacagttcatgattacagacaagaagaggatgtttttgatggagaagaacctgtcactactcagacctcagaagaaactaaaaaattatttctatcttatttaatgataaatagctatatggatgcaaacacagggcaaaggcttttgctgtacgatggagacttggatgaggctgttggcatgctactggaaggctgtcatgcagaatttgatggaaacacagccataaaagaatgtctcgatgtcttaagctcatctggtgtatttcttaataatgcttcaggtagagaaaaggatgaatgtacagctacaccaagtagtttcaataaatgtcactgtggagaacctgaacatgaagagactcctgaaaatagaaagtgtgctatagatgaagaatttaatgaaatgagaaatactgttatcaatagtgaattttctcagtcaggaaaactggcaagtacaatatcaattgatcctaaagttaacagttcacccagtgtgtgtgttcccagtctcatatcatatttaacacagactgaacttgcagacattagcatgcttagaagtgactctgaaaacatacttacaaactatgaaaatcaaagccgagtggaaacaaatgaacgtgcaaatgaatgtagtcattctaaaaacattcaaaactttccaagtgatttaatagaaaatcctattatgaaatcaaaaatgagtaaattctgtggtgtgaatgaaacagagaatgaagataatacaaacagggattcacctatctttgactattcccccaggctaagtgccttgttaagtcatgataaattgatgcacagtcagggaagttttaatgatacacacaccccagagagcaatggaaataagtgtgaagccccagccttatcattcagtgacaaaaccatgttgtcaggtcaaagaataggagaaaaatttcaagaccagtttctgggaattgcagctattaacatcagtttaccaggagagcagtatggacagaaatctttaaatatgatttctagtaatcctcaagtacaatatcacaatgataaatacatttcaaatacttctggtgaggatgaaaaaacacatccaggttttcagcagatgcctgaagacaaggaagatgagtctgaaatagaagagtattcctgtgctgtgactccagggggtgatactgataatgccattgtgtctcttacttgtgctacaccattgcttgatgaaaccatcagtgctagtgactatgaaacgtcactgctgaatgatcagcagaataacacaggaacagacactgatagtgatgatgatttttatgatactcccttgtttgaagatgatgaccatgattctttgcttcttgatggtgatgatcgtgattgcctgcaccctgaggactacgacacactgcaagaggaaaatgatgagacggcttctcctgctgatgttttttatgatgtctcaaaagagaatgaaaattccatggttccccagggggcaccagttggtagcttaagtgtgaagaacaaagcacattgtcttcaggatttccttatggatgttgagaaagatgaattagattctggtgaaaaaatacatttaaatcctgttggctcagataaggtgaatggacagtcactggaaactggatcagaaagggaatgcacaaatatccttgaaggtgatgaatctgactcattgactgattatgatattgtaggaggaaaagagagcttcactgcatcattaaaatttgatgacagtggcagttggagaggaagaaaggaagagtatgtaactggacaggaatttcactccgatactgatcatttagattctatgcaaagtgaagaaagttatggggattatatatatgacagtaatgatcaggatgacgatgatgatgatggcattgatgaagaaggaggaggtataagagatgagaatggaaagcccaggtgccaaaatgtggctgaagatatggatatccagttgtgtgcctctattttaaatgaaaacagtgatgaaaatgaaaatattaatacaatgattcttctggataaaatgcacagttgtagctctttagaaaaacagcaaagggtaaatgttgtacagctagcatcacctagtgaaaataacttagttactgaaaaaagcaaccttccagaatatacaactgagattgctggaaaaagcaaagaaaatctgttgaaccatgagatggtacttaaggatgtattgccgcctatcattaaagacactgaatctgaaaaaacttttggccctgcaagtatttcacatgataataataatatcagttcaacttctgaattaggtactgatctagcaaacacaaaggttaagttgattcaagggtcagaattgccagaattgactgattctgtgaaaggtaaagatgaatattttaagaatatgacaccaaaagttgactcatctcttgatcacatcatttgtactgagcctgatttaataggaaaacctgctgaggaaagccatttgtcattgatagcctctgtaactgacaaagatcctcaaggaaatggaagcgatctcattaaagggagagatggcaaaagtgatattctaatagaagatgaaacatcaattcagaaaatgtacttgggtgaaggagaagtgcttgtagaaggtctagtagaagaagaaaataggcatctcaaacttttgcctggtaaaaatacaagggatagtttcaagttaattaatagtcagtttccatttccacaaatcacaaacaatgaagaacttaatcagaaaggaagccttaaaaaagcaactgtaactcttaaagatgaaccaaataatctacaaataatagttagtaaaagtcctgttcagtttgagaatcttgaagaaatttttgacacatcagtttccaaagagattagtgatgacattacttcagacattacatcgtgggaagggaatacacattttgaggagtcattcactgatggacctgagaaagagcttgatctgtttacttacttaaaacattgtgctaaaaatataaaagcaaaagatgtagccaaaccaaatgaagatgtcccaagccatgttttaataactgcccctcccatgaaagaacatttacaattaggagttaataatacaaaagagaagtccactagtacccaaaaagactcacctcttaatgacatgatccaaagcaatgatctttgtagtaaagaaagcatctcaggaggaggaacagaaatttctcagttcacaccagaaagtattgaagccacactttcaatattatctcgtaaacatgtagaagatgttgggaaaaatgattttctgcagtcggagcggtgtgcaaatggattaggaaatgataactccagtaacactttaaatactgactattcattcttagaaattaataataagaaagaaagaattgagcaacagctaccaaaagaacaagccttgtctccaagatcccaagaaaaggaggttcagattcctgaattgtctcaggtatttgtggaggatgtaaaggatatcttaaaaagcaggttgaaagaaggtcatatgaaccctcaagaggttgaagaaccttcagcctgtgcagacactaaaattttaattcaaaatttaattaaaaggattaccacatcacagttggtaaatgaggcatctactgtgcccagcgactctcaaatgagtgactcttctggagtttcccccatgactaactcatcagaactaaagccagaaagtagagatgatcctttctgtattggaaatcttaagtctgagcttctccttaatatattgaagcaagatcaacatagccaaaaaattacaggagtatttgaattgatgagagaattaactcatatggagtatgacctagagaaaagaggcattacgtctaaagtacttccactgcagcttgaaaatattttctacaaactgcttgctgatggatattcagagaaaatagaacatgttggagactttaatcaaaaagcatgttctacatctgagatgatggaagaaaagccacatattcttggtgatattaaaagcaaagaaggaaactactattctcctaatttagaaactgtaaaagaaattggactagaaagctctactgtgtgggcatcaacattgccaagagatgagaagctcaaggatctgtgtaatgatttcccaagccatttggaatgtacttcagggtctaaagagatggcttctggagatagctcaaccgaacaattttccagtgaattacagcagtgtttacagcacactgaaaaaatgcatgagtatttgacattgcttcaagatatgaaaccccccttagacaaccaggaatctctggataacaacttggaagctttgaagaatcaacttagacagttggagacatttgaattgggattagctccaattgctgttattttaagaaaagatatgaagttggcagaagagtttttaaagtctcttcccagtgactttcccagaggccatgttgaagaattgagtattagccaccagagtttgaagaccgccttctcttccctcagcaacgtgtcttcagaaagaacgaaacagatcatgcttgcgatcgactctgaaatgtctaaactagcagtttcccatgaagaatttctgcataaacttaagtcattctcagattgggtatcagagaagagcaaatctgtgaaggatattgagattgtgaatgttcaagattctgagtatgtaaagaaacgtttggagtttctcaaggcaaataatgtattaaaagaccttggacataccaaaatgcagctggagactactgcctttgatgtgcagttcttcatttctgaatatgcacaggatctgtctcccaaccaaagcaaacaactgctgaggctcttaaatacaactcagaagtgttttcttgatgtacaggagtcagtaactacccaggtggaacgtttagagactcagttacatctagaacaagatcttgatgatcagaagattgtagcagagcgtcagcaggagtataaagagaaactccaagggatatgtgatcttcttacccaaactgaaaaccgcctaattggtcaccaagaagccttcatgattggagatggcacagttgagttaaagaaatatcagtccaagcaagaggaattacagaaagatatgcaaggaagtgcacaggcattggctgaagtagtgaaaaacacagagaacttcttaaaagagaatggtgaaaagctgtcacaggaagataaggctttgattgaacagaaacttaatgaagctaagataaagtgtgaacagcttaatttaaaagcagaacagtctaaaaaggagctggataaagttgtgacaacagcaatcaaggaagaaactgaaaaggtagcagcagtgaagcagctggaagagagcaaaaccaaaatagaaaaccttttggactggttgtcaaatgttgacaaagactcagaaagggcagggacaaaacacaaacaggtaatcgaacagaacgggacccattttcaagaaggtgatggcaagtcagcaattggagaagaggatgaagttaatggtaacctgttggagactgatgttgatgggcaagttggaaccactcaggagaatctgaatcagcaatatcagaaagttaaggcccaacacgagaagatcatctctcagcaccaagcagtgatcatagccactcagtctgcacaagtgttgcttgagaaacagggtcagtatctctctcctgaagaaaaagagaaactgcaaaagaacatgaaggaactgaaagtgcattatgaaactgcactggctgagtcagagaagaaaatgaagttaactcactctctgcaggaagaattagaaaagtttgatgctgactataccgagtttgagcactggctacagcagtcagaacaagaacttgaaaacctggaggcaggtgcagatgacatcaatggtttaatgaccaaattgaagaggcagaagagtttctcagaagacgttatttctcacaaaggtgacttgagatacatcacaatttctggaaacagagtgttggaagctgccaaatcttgcagcaagagagacggtggcaaggttgatacttctgcaacccacagagaagtgcagcgcaagttggatcatgctactgatcggttcaggtctctctactctaagtgcaatgttcttggaaataatcttaaagatctggtggataaatatcaacactatgaagatgcttcatgtggacttcttgctggactccaggcctgtgaggccacagcgagcaaacacttatctgaacctattgcggtggaccccaaaaatcttcaaaggcaattagaagagaccaaggctttgcaaggacagatatcaagtcagcaggttgctgtagagaaactgaagaaaacggctgaagtgcttttagatgccaggggatctttacttccagccaagaatgatatccagaaaacacttgatgacattgttgggagatatgaggatctgtccaagtctgttaatgaacgaaatgaaaaactccagataaccttgacccgttcactgagtgtgcaggatggcttggatgaaatgctggactggatgggaaatgtggaaagttctctgaaagaacaaggtcaagtgcctttaaactctactgctcttcaggatattatcagtaaaaacattatgttggaacaggatattgcaggtcgtcagagcagtataaatgccatgaatgaaaaagtgaagaaatttatggaaacaacagatccatccactgcatcctcactgcaagccaaaatgaaagacttgtctgctcggttttcagaagcaagtcataaacacaaagaaactcttgccaaaatggaggagctaaaaaccaaagtagaactgtttgagaacctctcagaaaagctccagacatttttagaaacaaaaactcaggctcttactgaagtagatgtgccaggaaaagatgttactgaattgtctcagtatatgcaggaatcaacttctgaatttttagaacacaagaaacatcttgaagttttgcatagtctcttgaaggagatatccagccatggcttaccaagtgataaggctttggtccttgaaaaaacaaataatttgtcaaagaaattcaaggaaatggaggataccatcaaagaaaaaaaagaagctgtaacttcttgtcaagaacagttggatgctttccaagttcttgttaaatcattgaagtcatggataaaagaaacaacaaaaaaagttcccattgtacagccttcttttggtgcagaggatttaggaaaatctttggaagacactaagaaattacaagaaaagtggagtttaaaaacaccagagattcagaaagtaaacaacagtgggatctcactatgtaacttaataagtgctgtgaccacccctgcaaaggcaatagcagcagttaaatcaggtggagcagtattaaatggtgaaggaacagccacaaatactgaggaattttgggcaaataaaggtttaacatccattaaaaaggacatgactgacataagtcatggttatgaagatcttggcctcttactcaaggacaaaatagcggaactgaacactaaactctccaaattgcaaaaggctcaggaagaatcaagtgcaatgatgcagtggttacagaaaatgaacaaaactgcaacaaaatggcagcagacacctgcacctacagatactgaagctgtgaagactcaagttgagcagaataagtcgtttgaggcagaactgaagcagaatgtaaacaaagtacaggagttgaaagacaaattgacagagctgttggaggagaacccagatactcctgaggcccccagatggaaacagatgttgacagaaatagattctaagtggcaagaactcaatcaattaacaattgatagacaacaaaaactggaagaatcctccaataatctaacccagttccagactgtagaggcccaattgaaacagtggcttgtggaaaaagaacttatggtcagtgttcttgggcccttgtcaattgacccaaatatgctaaacacacaaaggcagcaggtgcagattttgctgcaagaattcgccactcggaaacctcaatatgaacagctgacagcagctggtcagggcattctgagcaggcctggagaagacccttctttacgtgggattgtgaaagagcaactggcagctgtgacccaaaaatgggatagcctaacagggcaattgagtgacagatgtgactggattgaccaagccattgttaaaagcacacagtatcaaagcctgctgagaagcctttctgataaactgagtgacttggataataaactcagcagcagtctggctgtgagcacgcaccctgatgctatgaaccaacagttggaaacagcccaaaaaatgaagcaggagatacagcaggaaaagaagcagataaaagtggcccaggcactctgtgaggatttgtcagcactggttaaagaagagtacttgaaagcagaacttagtaggcaactagaaggcatcttaaaatcatttaaggatgttgaacagaaagcagagaatcatgtccagcaccttcagtcggcctgtgcaagctctcatcaatttcagcaaatgtctagagattttcaggcttggctggatacaaagaaagaagagcaaaacaaatctcatccaatatctgccaaactcgatgtcttggagtcattaattaaagatcataaagactttagtaaaactttgaccgctcagtctcatatgtatgaaaaaaccattgcagaaggtgaaaatctgttattaaaaacacaagggtctgagaaggcagccttacagttacagcttaatacaattaaaaccaattgggatacatttaataagcaggtgaaagaaagagaaaacaagttaaaagagtcattggaaaaagcccttaagtataaagagcaagtagagactctctggccatggatagacaaatgccaaaacaacctggaggaaataaaattttgcttggatcctgctgaaggagagaattctattgccaagttaaagtctctgcagaaggaaatggaccaacactttggtatggtagaattactgaacaacacagccaatagcttgctcagtgtctgtgagatagataaagaagttgttacagatgagaataagtcactgatccagaaggtggacatggtcactgaacaacttcacagtaagaaattctgtctggagaacatgactcagaagtttaaagaatttcaagaagtttccaaagaatctaaaaggcagcttcagtgtgcaaaggagcagctagatatccatgattcgctgggatcccaggcttacagtaacaaatacctgaccatgttgcaaactcagcagaaatcacttcaggccttgaagcatcaggtagatttggctaaaagacttgcacaggaccttgtggtagaggcctcagactcaaagggaacctctgatgttttattacaagtggaaaccatagctcaagagcatagtacactaagtcagcaggttgatgaaaagtgttctttcttagaaaccaagcttcagggcattgggcatttccagaataccattcgagaaatgttttctcagttcgcagagtttgatgatgaactggatagcatggctccagtggggagagatgcagaaacattgcaaaagcaaaaggaaactataaaagcctttctaaagaaactagaagccctcatggcaagcaatgacaatgccaataaaacctgcaagatgatgttagccacagaagaaacctctcctgaccttgttggaatcaaaagggacttggaggccttaagcaaacaatgcaacaagttactggaccgagcccaagccagagaagagcaggttgaagggacaattaagcgccttgaagaattttacagcaaattgaaagaattttctattctgctccagaaagccgaagaacatgaagagtcacaaggtcctgttggtatggaaacggagacaattaatcagcagcttaacatgttcaaggtattccagaaagaagagattgaacccttgcaaggtaaacagcaagatgtaaactggttaggtcaaggccttattcagagtgctgccaaaagcactagcactcagggcttggagcatgacctggatgatgtcaatgcacggtggaagactctcaataagaaggtggctcagcgagcagcccagctgcaggaggccttgctgcactgtgggaggttccaggatgccctggagtccctgctcagctggatggtggacactgaggagcttgtggccaatcagaagcccccgtcggctgagttcaaagtggtaaaggcccagatacaagaacaaaagcttctccagagattgttggatgaccgaaaatctacggtggaggtaatcaaacgagaaggagaaaaaattgctacaacagcagagcccgcagataaagtgaagattttgaaacagctcagtctcttggatagcagatgggaggcattgcttaataaagctgaaacaaggaatcgtcagttggaaggtatctcggtggtagcacagcaatttcatgaaaccttagaaccactgaacgagtggcttacaaccatagaaaagaggctggtgaattgtgaacccataggaacccaagcatctaaacttgaggaacaaattgcacagcacaaagccttagaagatgacatcatcaatcacaataaacatttacaccaggctgttagcattggccagtccttaaaggttttgagctccagggaggataaagatatggtgcagagtaaattagacttctctcaagtatggtacattgagattcaagagaaaagtcacagcaggtctgagctcctccagcaggccttatgtaatgctaagatttttggggaagatgaagttgaactgatgaactggctgaatgaagtgcatgacaaactgagcaagctctcagtccaggattacagcactgaggggctatggaagcagcagtctgaacttcgggttctgcaagaggacatcttactcaggaaacaaaatgtagatcaggctttactaaatggtttagaactacttaaacaaaccacaggtgatgaagttttaataattcaagataaattggaagccattaaagcaaggtacaaagacattactaaactgagcactgatgtggccaagactctggaacaggcgctgcagcttgcaaggcggctgcactccacacacgaagagctgtgtacctggctggacaaagtggaggtggaattactttcatatgaaactcaggttctgaaaggagaagaagcaagtcaagcacaaatgagaccaaaggaactgaaaaaggaagctaagaacaacaaagccttactggactcccttaatgaagtgagcagtgctttgctggaactggtaccatggagggcaagagaaggacttgagaaaatggtagctgaggacaatgagcgctaccgattagtgagcgacaccatcactcagaaggtggaggagatcgatgcagccattctgcgatcacagcagtttgaccaagcagctgatgctgagttatcctggattactgaaacagaaaaaaaattgatgtctctgggtgacatcaggcttgagcaagaccagacttctgctcagcttcaagttcaaaagacattcaccatggagattttgagacacaaggatattattgatgaccttgttaaatctgggcataaaatcatgaccgcatgcagtgaagaggaaaagcaatcaatgaagaaaaaactggacaaggtactgaagaactatgataccatctgccagattaattcagaaaggtatctgcagctggaacgggcacagtccctggttaaccaattctgggaaacatatgaagaactttggccatggctgacagaaacacaatcaatcatctctcagcttcccgccccagcccttgaatatgaaactctaaggcagcagcaggaagaacatcggcaactgcgtgagttgatagctgaacacaagcctcatatagataagatgaacaaaactgggccacagttactggaattgagccctggggaaggcttttctatccaagagaagtatgtggcagccgacaccctttacagtcaaattaaagaagatgtcaaaaagcgtgctgtggcactggatgaagccatttctcaatcaactcagttccatgacaagatagatcagatccttgagagcctggaacgcatcgtggaacgtctgaggcagccaccctctatctctgcagaggttgagaagatcaaggaacagatcagtgaaaataagaatgtgtcagtagacatggaaaagctacagccgttgtatgaaactcttaaacagaggggagaggaaatgattgctagatctggggggactgataaagacatatctgccaaagctgttcaggataagcttgaccaaatggttttcatttgggagaacatacacacactggtggaagagagggaagccaaactactggatgtgatggagctagcagaaaagttctggtgtgatcacatgtcattgatagttaccattaaagatactcaagatttcatccgggacctggaagatcctggaattgatccttcagtagtaaaacaacagcaagaagcagcagagaccataagggaagaaatagatggactacaggaggagctggatatagttattaacctaggttctgaactcattgcggcatgtggggagcctgataaacccattgtcaagaagagtatagatgagttaaattcagcatgggattctctaaataaagcttggaaagaccggattgacaaacttgaggaggcaatgcaggctgccgttcagtaccaggatggactgcaggcggtatttgactgggtagatattgcaggtggtaaattagcttcaatgtctccaattggaacagatctcgaaactgtcaagcagcagattgaagagctaaagcaatttaagtctgaggcctatcaacagcagatagaaatggaaagactgaatcatcaagcagagcttttgctaaagaaagtaacagaagagagtgacaaacacactgttcaagacccattaatggaactgaaattgatatgggatagcctggaggagagaatcatcaacagacagcataaactggagggtgctctattagccttgggtcagttccaacatgccctggatgagctcctggcatggctgacacacaccgagggcttgctaagtgagcagaaacctgttggaggagaccctaaagccattgaaattgaacttgccaagcatcatgtgctccaaaatgatgtattagcccatcagtccacagtggaagccgttaataaagcaggaaatgatctaattgaatcaagtgcaggagaagaagcaagcaaccttcagaacaagctagaggttttaaatcaacgctggcaaaatgttttggaaaaaacagaacaaaggaagcagcagctggatggtgccttgcgccaggccaaagggttccatggcgaaattgaggatttgcagcagtggctgactgacacggagcgtcatctgttggcatctaaaccgctgggaggtttaccggaaacagccaaggagcagcttaatgtccatatggaagtctgtgctgcctttgaagctaaagaagaaacatataagagtctgatgcagaaaggccagcagatgcttgcaagatgcccaaaatctgcagagacaaatattgaccaagacataaataacttgaaagaaaaatgggaatcggtggaaaccaaactcaatgaaaggaaaactaaactggaagaggctctcaacttggcaatggagttccacaattctctccaagacttcatcaactggcttactcaggctgaacagaccctaaatgtagcttctcggccaagtctcatcttggacacagtcttatttcaaattgacgaacacaaggtttttgccaatgaagtaaattctcatcgtgagcagataatagagctggacaaaactggaacccacctaaaatattttagtcagaaacaagatgttgttctaatcaagaatctacttatcagtgtacaaagtcgatgggaaaaagtggttcaacggttggtagagagaggaagatctttggatgatgcaaggaagagagccaagcagttccatgaagcttggagtaaacttatggagtggctagaagagtcagaaaagtctttggattctgaactggaaatcgcaaatgatccagacaaaataaaaacacaacttgcacaacataaggagtttcagaaatcactcggagccaagcattctgtctacgacaccaccaacaggactggacgttctctgaaggagaaaacctccctggctgatgacaacctgaaactggatgacatgctgagtgaactcagagacaaatgggataccatatgtggaaaatctgtggaaagacaaaacaaattggaggaagccctgttattttctggacaattcacagatgccctacaggctctcattgattggttatatagagttgaaccccagctggcagaagaccagcctgttcatggagacattgatttggtgatgaatctgatcgataatcacaaggccttccaaaaagagttggggaagaggaccagcagtgtgcaggccctgaagcgctcagcccgagaactcatagaaggcagtcgggatgactcctcctgggtcaaggtccagatgcaggaattaagcacacgctgggagaccgtgtgtgcactttctatatcaaagcaaacacggttagaagcagccctgcgtcaggcagaggaattccactcggtggtacatgccctcttggagtggctggctgaggcggagcaaaccctgcgtttccatggtgtcctcccagatgatgaggatgctctccggactctcattgatcagcataaagaattcatgaagaaactggaagaaaagagagctgaactaaataaagccaccactatgggcgacaccgttttggctatctgccaccccgactccatcactaccattaagcactggataacaatcatccgggcgaggtttgaggaggtgctggcctgggcaaagcaacatcagcagagattagcaagtgctctggctgggcttattgccaaacaggaattgttggaagctttgctggcttggttgcaatgggctgaaactacacttactgataaggataaagaagtcatcccccaggagatcgaagaggtgaaagcactcattgcagaacaccagaccttcatggaggaaatgaccagaaaacagcctgatgttgataaagtaacgaagacctataagaggagagctgctgatccttcctcattacaatcccatattccagtcttggataagggacgagcaggaagaaaacgctttccagcatcaagcttgtatccctctgggtcacagacacaaattgaaaccaaaaatcctagggtaaacttactggtgagcaaatggcagcaagtctggctcctggcgttggaaagaaggaggaaactcaatgatgccttggacagactagaggagctgagggaatttgctaactttgattttgatatctggcgcaaaaaatacatgcgatggatgaatcacaagaaatctcgagtgatggacttcttcaggagaattgataaagaccaggatgggaaaataacgcggcaggaatttattgatggaattctttcctcaaagtttccaaccagtcgcttggagatgagcgcagttgcagacatctttgacagagatggcgatggatatattgactactatgaatttgtagcagcccttcacccaaataaagatgcatataaacctatcacagatgccgacaaaatcgaagatgaggtgacaaggcaggtagctaagtgtaaatgtgcaaagcgatttcaagttgagcagattggtgataataaatacagggtaagttttcaaagtaattttggagactcccagcaactgcgactggtccggatcctgcggagtactgtgatggttcgtgttggaggtggatggatggcacttgatgagttcttagtgaaaaatgatccttgcagggttcatcatcatgggagtaaaatgttacgttcggaatcaaactcttcaattactactactcagcctactatagccaaaggaaggacaaacatggaactgcgtgagaagttcattttagcagatggtgccagccagggtatggctgctttccgaccccgaggccgaagatcccggccatcatcacgaggcgcttcacccaacagatccacttctgtgtccagtcaggctgcgcaggcggcctccccacaggtccctgccaccaccacacccaagggaacgccaatacaaggaagcaagcttcgacttccaggatatttatcagggaaaggcttccactctggggaggacagtggcttgataacaactgcagctgccagagtccgaacacagtttgctgattccaagaagactcccagccgaccaggaagtcgagctggaagcaaagctggcagcagggccagcagccgccgaggcagtgatgcatcagactttgacatttcagaaatccagtccgtgtgctcagatgtggaaactgtcccccagacacacagacctacaccccgagcaggttctcggccatccacagcgaagccttcaaaaatccccacgccccagaggaaatcacctgccagcaaattggacaagtcctcaaagagatagtgcaattggttctaccaaggcccttccttgagcatttattatttaagtttgaacgatgtaaaatatggtgtagaaattcttgtgaaatattgcaagaggcgagtttaaaattctgcagatggccttatttgtgtatttgtctttttattttatctgtataattttttttgtcagatattctggggttaaagtcacatcatatgtgaggaggaaaagtttaacatgaactaacatttctgcactgtaacgtgccgggcacacactaaactcagttactgtacctacaggtaagtctacatcctctctgacagccacagcactacatcaatccctgacgttagggatacctcatgacattttcctgtttttatggaaactctgagaagctgaatgatacatgcaggggatattttttgagatgatttaaatgtaaaccaaaagatggaagacaaaaagacaaacacacccacacgcagtctttgcagtatctgacagagaactcacaggaagttacttcaagcacttgccagtactatgatattcaagtaccttgcagcatttctctgccattgctttcaatgaggccagaggcatcctggatattagacctattatactgtaagaatataagtataaagtgcgttcatatacatgtgaggttttcttttgcttgagtggacagtagcacctgtatcattgaactcattttgtatcagagcaattttgcttgcagaaagctatgaaataaaacacgtcccttaactgcattgctatggaattaattttttttccccagggaaaactagtgtatttttttatgagcaatatcaatttggagtgaccaaaagatacttaaaaatgggtttattttgatttctcatctgaaataatcatgttctggtattatatctatctatatttaataaatatatacattttaatttattatgtgtactcacatactatagaaagatattagtatgcatttaataaaacatattcacttgaatatatgg

SEQ ID NO: 9074 - DNA, 3150 bp, Homo sapiens
  source 1..3150: mol_type = unassigned DNA
aaccttggagaagaggacgaaacatacggacctggagaatcccaaatcacagcacaaagtagggaactcttgaaggattcccctcaagatttagatctctctcacacagatctaggggagagtgatgtagattgtggtagcaccagcttagtagaaaatgtgacacttttgacacaatatgattcaggagaatgcaacattgcatctaaagaggaagtggaggctcctctttctgcccaggagagcgaaatgctctataagaagttctccctgaaattcgtatcagcaagaaagaaagcagcacccagaaaaacaggggcccaggcaggaatattggacacagtctgcaatggctttcagttggttcaggtattccagaaagaagagattgaacccttgcaaggtaaacagcaagatgtaaactggttaggtcaaggccttattcagagtgctgccaaaagcactagcactcagggcttggagcatgacctggatgatgtcaatgcacggtggaagactctcaataagaaggtggctcagcgagcagcccagctgcaggaggccttgctgcactgtgggaggttccaggatgccctggagtccctgctcagctggatggtggacactgaggagcttgtggccaatcagaagcccccgtcggctgagttcaaagtggtaaaggcccagatacaagaacaaaagcttctccagagattgttggatgaccgaaaatctacggtggaggtaatcaaacgagaaggagaaaaaattgctacaacagcagagcccgcagataaagtgaagattttgaaacagctcagtctcttggatagcagatgggaggcattgcttaataaagctgaaacaaggaatcgtcagttggaaggtatctcggtggtagcacagcaatttcatgaaaccttagaaccactgaacgagtggcttacaaccatagaaaagaggctggtgaattgtgaacccataggaacccaagcatctaaacttgaggaacaaattgcacagcacaaagccttagaagatgacatcatcaatcacaataaacatttacaccaggctgttagcattggccagtccttaaaggttttgagctccagggaggataaagatatggtgcagagtaaattagacttctctcaagtatggtacattgagattcaagagaaaagtcacagcaggtctgagctcctccagcaggccttatgtaatgctaagatttttggggaagatgaagttgaactgatgaactggctgaatgaagtgcatgacaaactgagcaagctctcagtccaggattacagcactgaggggctatggaagcagcagtctgaacttcgggttctgcaagaggacatcttactcaggaaacaaaatgtagatcaggctttactaaatggtttagaactacttaaacaaaccacaggtgatgaagttttaataattcaagataaattggaagccattaaagcaaggtacaaagacattactaaactgagcactgatgtggccaagactctggaacaggcgctgcagcttgcaaggcggctgcactccacacacgaagagctgtgtacctggctggacaaagtggaggtggaattactttcatatgaaactcaggttctgaaaggagaagaagcaagtcaagcacaaatgagaccaaaggaactgaaaaaggaagctaagaacaacaaagccttactggactcccttaatgaagtgagcagtgctttgctggaactggtaccatggagggcaagagaaggacttgagaaaatggtagctgaggacaatgagcgctaccgattagtgagcgacaccatcactcagaaggtggaggagatcgatgcagccattctgcgatcacagcagtttgaccaagcagctgatgctgagttatcctggattactgaaacagaaaaaaaattgatgtctctgggtgacatcaggcttgagcaagaccagacttctgctcagcttcaagttcaaaagacattcaccatggagattttgagacacaaggatattattgatgaccttgttaaatctgggcataaaatcatgaccgcatgcagtgaagaggaaaagcaatcaatgaagaaaaaactggacaaggtactgaagaactatgataccatctgccagattaattcagaaaggtatctgcagctggaacgggcacagtccctggttaaccaattctgggaaacatatgaagaactttggccatggctgacagaaacacaatcaatcatctctcagcttcccgccccagcccttgaatatgaaactctaaggcagcagcaggaagaacatcggcaactgcgtgagttgatagctgaacacaagcctcatatagataagatgaacaaaactgggccacagttactggaattgagccctggggaaggcttttctatccaagagaagtatgtggcagccgacaccctttacagtcaaattaaagaagatgtcaaaaagcgtgctgtggcactggatgaagccatttctcaatcaactcagttccatgacaagatagatcagatccttgagagcctggaacgcatcgtggaacgtctgaggcagccaccctctatctctgcagaggttgagaagatcaaggaacagatcagtgaaaataagaatgtgtcagtagacatggaaaagctacagccgttgtatgaaactcttaaacagaggggagaggaaatgattgctagatctggggggactgataaagacatatctgccaaagctgttcaggataagcttgaccaaatggttttcatttgggagaacatacacacactggtggaagagagggaagccaaactactggatgtgatggagctagcagaaaagttctggtgtgatcacatgtcattgatagttaccattaaagatactcaagatttcatccgggacctggaagatcctggaattgatccttcagtagtaaaacaacagcaagaagcagcagagaccataagggaagaaatagatggactacaggaggagctggatatagttattaacctaggttctgaactcattgcggcatgtggggagcctgataaacccattgtcaagaagagtatagatgagttaaattcaatgggattctctaaataa

SEQ ID NO: 9075 - DNA, 1964 bp, Homo sapiens
  source 1..1964: mol_type = unassigned DNA
agagttaaagggaatatcaaggatggtggcagaattaaagggcaaacttaccttccatcccaggtctagtattcagtcccccttcctcccactctccaccctactgcgtgctcttacttattctgttggaacccagtgtagcttcctgagatttaaaatataggaagactcaaaactatgttacttcttggaatatagataattcagtactgatttaaataacaactgaatagcaaggaccttctggaacataatcttacattcacaaaatcacctgctaagaagctgactaatgcattaagcaagtccctgagctgtgcttccagccgtgaacctttgcaccccatgttcccagatcagcctgagaagccactcaacttggctcacatcgtgcctcccagacctgtaaccagcatgaacgacaccctgttctcccactctgttccctcctcaggaagtccttttattaccaggaggttacctgagggaataagtgcatccagccctgtggctgaagagcattccctcataaagctgtacgtaaatcagcttgatcacggtgcacgctctcctcccaaggacagtgaagtagagcagaacaaactgctggctagggctgctccagcttttctgaagggcaaagggatacagtacagcctgaatgtggcagacaggctagctgatgaacatgttctcatcgggttgtatgtcaacatgctccggaacaacccctcatgcatgcttgagagttcaaaccggcttgatgaagaacacaggctaattgccaggtatgcggcaaggctggcagcagagtcctcttcgtctcagccacctcagcagagaagtgctcctgacatctctttcaccatcgatgcgaataagcagcaaaggcagctgattgctgagctagaaaacaagaacagagaaatcttacaggagatccagagacttcggctagagcatgaacaagcttctcagcccacgccagagaaggcacagcaaaaccccaccctgctggcagaactccggctcctcagacagcgcaaagatgagctggaacagagaatgtctgctctccaggagagccggagagagctaatggtccagttggagggtctcatgaagctactaaagactcagggggcaggctctccccgctcctcccccagccacaccatcagcaggccaattcccatgcccatccggtcagcgtcagcctgctccaccccgacgcacacgccgcaggactccctcacaggagtagggggagatgtacaagaggcatttgcacaaagttcaagaagaaacttaaggaatgacttgctagtggctgcagattccatcactaacactatgtcctctcttgtgaaagagctgaattctgaggttgggagtgaaacagagagtaatgtggattctgaatttgcacggactcagtttgaggatcttgttccctcaccaacctctgaaaaggcttttctagcgcaaatccatgcccgaaaacctgggtacattcacagtggagctaccacaagtaccatgcgtggcgacatggttacggaggatgcagatccctatgtgcagcctgaagatgaaaactatgaaaatgactctgtccggcagctggagaatgagctccagatggaggaatacctgaaacagaagctgcaagatgaagcttatcaggtcagcttgcaaggttgaatgcaatatccttttatcacactcctctcaagcaagctatagtcagacagatgatgaaagtaacatgaaaactggtgatgatggagagccctgtggccacacagaggaggaagacagcagcctggcagcagcctcaccgaagagaggaaccaccacacccagcagctcctgacagacccccacccctaaagatgtgtcctgatgactatagtgcagctaactttttgttctcagatttgtagtgcataggtgtgtgtttc

SEQ ID NO: 9076 - DNA, 1680 bp, Homo sapiens
  source 1..1680: mol_type = unassigned DNA
agaggctggatttcatactcatagctctccctagaatttcagagagttctgttatgatctctgttgtaattaccaatttggttcaagtttgttctttaaatgaatatgcttagaattcacatatgttctggatgtactggaattaaaaggatttaagagatcatggtgtgcatgttctaggataaataggatttaccaatccttggatgaagtgcttgggaagtctttaagtgccataatcaactgccatttcaaagaatatagatggttttgaaaagttcatgctgtcccttcattgaattttagaatgattgaagatagtgggaaaagaggaaataccatggcagaaagaagacagctgtttgcagagatgagggctcaagatctggatcgcatccgactctccacctacagaacagcatgcaagcttaggtttgttcagaagaaatgcaatttgcacctggtggacatatggaatgtcatagaagcattgcgggaaaatgctctgaacaacctggacccaaacactgaactcaacgtgtcccgcttagaggctgtgctctccactattttttaccagctcaacaaacggatgccaaccactcaccaaatccatgtggagcagtccatcagcctcctccttaacttcctgcttgcagcgtttgatccggaaggccatggtaaaatttcagtatttgctgtcaaaatggctttagccacattgtgtggagggaagatcatggacaaattaagatatattttctcaatgatttctgactccagtggggtgatggtttatggacgatatgaccaattccttcgggaagttctcaaactacccacggcagtttttgaaggtccttcatttggttacacagaacagtcagccagatcctgtttctcccaacagaaaaaagtcacgttaaatggtttcttggacacgcttatgtcagatcctcccccgcagtgtctggtctggttgcctcttctgcatcgactagcaaatgtggaaaatgtcttccatccggttgagtgttcctactgccacagtgagagtatgatgggatttcgctaccgatgccaacagtgtcacaattaccagctctgtcaggactgcttctggaggggacatgccggtggttctcatagcaaccagcaccaaatgaaagagtacacgtcatggaaatcacctgctaagaagctgactaatgcattaagcaagtccctgagctgtgcttccagccgtgaacctttgcaccccatgttcccagatcagcctgagaagccactcaacttggctcacatcgtgcctcccagacctgtaaccagcatgaacgacaccctgttctcccactctgttccctcctcaggaagtccttttattaccaggagctcggacggtgcttttggtggatgcgtctagatggataacatgacttcttctaccctaaaatattcctataatactttgagctgttctggttcctccagggtgcatggtacccattaacccaaaatatgattatttcccttttttcccattttcagtcattttggaatgttctctgtgaaccacagttgtgttgtttaaagctcacatttctttctgtcaccacagagattggcctacggtttctgttttgagggtgctgttcaataaagctgtgtacactaaatgtc

SEQ ID NO: 9077 - DNA, 1626 bp, Homo sapiens
  source 1..1626: mol_type = unassigned DNA
gaatatcaaggatggtggcagaattaaagggcaaacttaccttccatcccaggtctagtattcagtcccccttcctcccactctccaccctactgcgtgctcttacttattctgttggaacccagtgtagcttcctgagatttaaaatataggaagactcaaaactatgttacttcttggaatatagataattcagtactgatttaaataacaactgaatagcaaggaccttctggaacataatcttacattcacaaaatcacctgctaagaagctgactaatgcattaagcaagtccctgagctgtgcttccagccgtgaacctttgcaccccatgttcccagatcagcctgagaagccactcaacttggctcacatcgtgcctcccagacctgtaaccagcatgaacgacaccctgttctcccactctgttccctcctcaggaagtccttttattaccaggaggttacctgagggaataagtgcatccagccctgtggctgaagagcattccctcataaagctgtacgtaaatcagcttgatcacggtgcacgcatgcttgagagttcaaaccggcttgatgaagaacacaggctaattgccaggtatgcggcaaggctggcagcagagtcctcttcgtctcagccacctcagcagagaagtgctcctgacatctctttcaccatcgatgcgaataagcagcaaaggcagctgattgctgagctagaaaacaagaacagagaaatcttacaggagatccagagacttcggctagagcatgaacaagcttctcagcccacgccagagaaggcacagcaaaaccccaccctgctggcagaactccggctcctcagacagcgcaaagatgagctggaacagagaatgtctgctctccaggagagccggagagagctaatggtccagttggagggtctcatgaagctactaaagactcagggggcaggctctccccgctcctcccccagccacaccatcagcaggccaattcccatgcccatccggtcagcgtcagcctgctccaccccgacgcacacgccgcaggactccctcacaggagtagggggagatgtacaagaggcatttgcacaaagttcaagaagaaacttaaggaatgacttgctagtggctgcagattccatcactaacactatgtcctctcttgtgaaagagctgaattctgaggttgggagtgaaacagagagtaatgtggattctgaatttgcacggactcagtttgaggatcttgttccctcaccaacctctgaaaaggcttttctagcgcaaatccatgcccgaaaacctgggtacattcacagtggagctaccacaagtaccatgcgtggcgacatggttacggaggatgcagatccctatgtgcagcctgaagatgaaaactatgaaaatgactctgtccggcagctggagaatgagctccagatggaggaatacctgaaacagaagctgcaagatgaagcttatcaggtcagcttgcaaggttgaatgcaatatccttttatcacactcctctcaagcaagctatagtcagacagatgatgaaagtaacatgaaaactggtgatgatggagagccctgtggccacacag

SEQ ID NO: 9078 - DNA, 3201 bp, Homo sapiens
  source 1..3201: mol_type = unassigned DNA
acagtacacaccaggatctagaggctggatttcatactcatagctctccctagaatttcagagagttctgttatgatctctgttgtaattaccaatttggttcaagtttgttctttaaatgaatatgcttagaattcacatatgttctggatgtactggaattaaaaggatttaagagatcatggtgtgcatgttctaggataaataggatttaccaatccttggatgaagtgcttgggaagtctttaagtgccataatcaactgccatttcaaagaatatagatggttttgaaaagttcatgctgtcccttcattgaattttagaatgattgaagatagtgggaaaagaggaaataccatggcagaaagaagacagctgtttgcagagatgagggctcaagatctggatcgcatccgactctccacctacagaacagcatgcaagcttaggtttgttcagaagaaatgcaatttgcacctggtggacatatggaatgtcatagaagcattgcgggaaaatgctctgaacaacctggacccaaacactgaactcaacgtgtcccgcttagaggctgtgctctccactattttttaccagctcaacaaacggatgccaaccactcaccaaatccatgtggagcagtccatcagcctcctccttaacttcctgcttgcagcgtttgatccggaaggccatggtaaaatttcagtatttgctgtcaaaatggctttagccacattgtgtggagggaagatcatggacaaattaagatatattttctcaatgatttctgactccagtggggtgatggtttatggacgatatgaccaattccttcgggaagttctcaaactacccacggcagtttttgaaggtccttcatttggttacacagaacagtcagccagatcctgtttctcccaacagaaaaaagtcacgttaaatggtttcttggacacgcttatgtcagatcctcccccgcagtgtctggtctggttgcctcttctgcatcgactagcaaatgtggaaaatgtcttccatccggttgagtgttcctactgccacagtgagagtatgatgggatttcgctaccgatgccaacagtgtcacaattaccagctctgtcaggactgcttctggaggggacatgccggtggttctcatagcaaccagcaccaaatgaaagagtacacgtcatggaaatcacctgctaagaagctgactaatgcattaagcaagtccctgagctgtgcttccagccgtgaacctttgcaccccatgttcccagatcagcctgagaagccactcaacttggctcacatcgtgcctcccagacctgtaaccagcatgaacgacaccctgttctcccactctgttccctcctcaggaagtccttttattaccaggagcatgcttgagagttcaaaccggcttgatgaagaacacaggctaattgccaggtatgcggcaaggctggcagcagagtcctcttcgtctcagccacctcagcagagaagtgctcctgacatctctttcaccatcgatgcgaataagcagcaaaggcagctgattgctgagctagaaaacaagaacagagaaatcttacaggagatccagagacttcggctagagcatgaacaagcttctcagcccacgccagagaaggcacagcaaaaccccaccctgctggcagaactccggctcctcagacagcgcaaagatgagctggaacagagaatgtctgctctccaggagagccggagagagctaatggtccagttggagggtctcatgaagctactaaagactcagggggcaggctctccccgctcctcccccagccacaccatcagcaggccaattcccatgcccatccggtcagcgtcagcctgctccaccccgacgcacacgccgcaggactccctcacaggagtagggggagatgtacaagaggcatttgcacaaagttcaagaagaaacttaaggaatgacttgctagtggctgcagattccatcactaacactatgtcctctcttgtgaaagagctgaattctgaggttgggagtgaaacagagagtaatgtggattctgaatttgcacggactcagtttgaggatcttgttccctcaccaacctctgaaaaggcttttctagcgcaaatccatgcccgaaaacctgggtacattcacagtggagctaccacaagtaccatgcgtggcgacatggttacggaggatgcagatccctatgtgcagcctgaagatgaaaactatgaaaatgactctgtccggcagctggagaatgagctccagatggaggaatacctgaaacagaagctgcaagatgaagcttatcagctccacgtcagcactgagaccagactcgagcacccctgtcctgtaagcgagacaaaatggcgtgtgttattttggggttttgtgttttttggtgggtttctttccttggctctccagatttacttttggggcctgttctaagtgcaaacccagcaagtttcacttgtcctgtccattagatacaactacatcttgcgggggttgtttctttcttgttccacaatgaattgcacatccatctccatcagagctgatagcctgttaataagcactggtctaacacagccaaccctcctccacagcgccatattaatggaggaggggaggaaggtgaaatctactgcatgggattcaggaaacagttgtggttggtcaggacggaagttggggtaagtttggttggtcagagggagttgtgctggagattgtgaaaaatgggttcttgaatgatctactataaggcagggaaggttcatttgtaagtagtaatgtgaactgaattgcattaagagtgtgtggcctttgttgtgatatactatgtattttcttatatgcatgagccaaactgttgcatcataatttagcactgatgtctgcttttattttgatcatctttgtccacccttattagttcttggctgttaaccgtagatagatcttgtaaatccagcaacctttggttgctgcattccccttggttcgattccacgcaaggagccacaagtgagaactccactgtccttagaagaaagggcatttttacttttgaaccaaaaagagaaaaaaaaatcagaagtgttgcatcttgaggcgaattaactgtaagacatttttaattatg

SEQ ID NO: 9079 - DNA, 1880 bp, Homo sapiens
  source 1..1880: mol_type = unassigned DNA
gtgcggggcgcgcggtgacagcgcggggttggcggcgtgggacccagggggcgacagaggcagcagcagcccgaggcctgaggagaggagaccggcggcggcggcaatgctggagacccttcgcgagcggctgctgagcgtgcagcaggatttcacctccgggctgaagactttaagtgacaagtcaagagaagcaaaagtgaaaagcaaacccaggactgttccatttttgccaaagtactctgctggattagaattacttagcaggtatgaggatacatgggctgcacttcacagaagagccaaagactgtgcaagtgctggagagctggtggatagcgaggtggtcatgctttctgcgcactgggagaagaaaaagacaagcctcgtggagctgcaagagcagctccagcagctcccagctttaatcgcagacttagaatccatgacagcaaatctgactcatttagaggcgagttttgaggaggtagagaacaacctgctgcatctggaagacttatgtgggcagtgtgaattagaaagatgcaaacatatgcagtcccagcaactggagaattacaagaaaaataagaggaaggaacttgaaaccttcaaagctgaactagatgcagagcacgcccagaaggtcctggaaatggagcacacccagcaaatgaagctgaaggagcggcagaagttttttgaggaagccttccagcaggacatggagcagtacctgtccactggctacctgcagattgcagagcggcgagagcccataggcagcatgtcatccatggaagtgaacgtggacatgctggagcagatggacctgatggacatatcggaccaggaggccctggacgtcttcctgaactctggaggagaagagaacactgtgctgtcccccgccttaggtagggttgacaaacttgcattagctgaaccagggcagtatcgatgccactcccctccaaaggtgagacgtgagaaccatctgccagtcacttacgcataaacccccaagctcacagccagctcctggctccctaaccccacggttccacacggctgtgtggcagctgcaacagtggtgtggttccgtcatgaattcttctcaaagatttgacatgctccactccggtaactttggtgagttgagagctttcttgtttgttttccctcctttaccacccagaaatccatttgagtctgctccttgtggttaaggactggcgtttgcagggaggtgcggactctcctgcggggctcacgggaaactcttccctcttcgtgcgacaggcatttaggggcgtgcctgccatgggcaaagccatggtgtgtgttcagctcttggcctgtgttgtaaacttagttgcacttcagttcctttcatcccttcacaaaattttgtttcacattcatgcagcaaatatgggctgaggtgccagacctgtacctgggcttggtgcgtttcaaatttcagaccagttctttgggctgggtcaaggcaaagctcagtcgtcccagcagcacctcagccatctgtagaaggttctaccattaccacggtttcagcttcctctaaacttctcacccgcttctcctggcaatctgtcagaacggtgtcatcctggggaagagaaggagcttgggtgcatttgccctcatcctgagaaggccagaatactggagaccagcgtgaaccctcacccagagtcaggggaagatttagaaacagtgacacctgcatatagaattttgattccttgaagagcctatttagttccataaaattggagaactgctgaaggtcagtaattccgactttctcagcagtggtgtctctgaattactgcaaagggtaaaaaaaaaaaaaa

SEQ ID NO: 9080 - DNA, 1403 bp, Homo sapiens
  source 1..1403: mol_type = unassigned DNA
acgcggaaggggctggggttgcggcgcggcggcgaggaccagaccgggggcggggccggtagtgggagtgcggggcgcgcggtgacagcgcggggttggcggcgtgggacccagggggcgacagaggcagcagcagcccgaggcctgaggagaggagaccggcggcggcggcaatgctggagacccttcgcgagcggctgctgagcgtgcagcaggatttcacctccgggctgaagactttaagtgacaagtcaagagaagcaaaagtgaaaagcaaacccaggactgttccatttttgccaaagtactctgctggattagaattacttagcaggtatgaggatacatgggctgcacttcacagaagagccaaagactgtgcaagtgctggagagctggtggatagcgaggtggtcatgctttctgcgcactgggagaagaaaaagacaagcctcgtggagctgcaagagcagctccagcagctcccagctttaatcgcagacttagaatccatgacagcaaatctgactcatttagaggcgagttttgaggaggtagagaacaacctgctgcatctggaagacttatgtgggcagtgtgaattagaaagatgcaaacatatgcagtcccagcaactggagaattacaagaaaaataagaggaaggaacttgaaaccttcaaagctgaactagatgcagagcacgcccagaaggtcctggaaatggagcacacccagcaaatgaagctgaaggagcggcagaagttttttgaggaagccttccagcaggacatggagcagtacctgtccactggctacctgcagattgcagagcggcgagagcccataggcagcatgtcatccatggaagtgaacgtggacatgctggagcagatggacctgatggacatatcggaccaggaggccctggacgtcttcctgaactctggaggagaagagaacactgtgctgtcccccgccttagggcctgaatccagtacctgtcagaatgagattaccctccaggttccaaatccctcagaattaagagccaagccaccttcttcttcctccacctgcaccgactcggccacccgggacatcagtgagggtggggagtcccccgttgttcagtccgatgaggaggaagttcaggtggacactgccctggccacatcacacactgacagagaggccactccggatggtggtgaggacagcgactcttaaattgggacatgggcgttgtctggccacactggaatccagttttggctgtatgcggaattccacctggaaagccaggttgttttatagaggttcttgatttttacataattgccaataatgtgtgagaaacttaaagaacagctaacaataaagtgtgaggacggtaaactgaga

SEQ ID NO: 9081 - DNA, 1395 bp, Homo sapiens
  source 1..1395: mol_type = unassigned DNA
gcggaaggggctggggttgcggcgcggcggcgaggaccagaccgggggcggggccggtagtgggagtgcggggcgcgcggtgacagcgcggggttggcggcgtgggacccagggggcgacagaggcagcagcagcccgaggcctgaggagaggagaccggcggcggcggcaatgctggagacccttcgcgagcggctgctgagcgtgcagcaggatttcacctccgggctgaagactttaagtgacaagtcaagagaagcaaaagtgaaaagcaaacccaggactgttccatttttgccaaagtactctgctggattagaattacttagcaggtatgaggatacatgggctgcacttcacagaagagccaaagactgtgcaagtgctggagagctggtggatagcgaggtggtcatgctttctgcgcactgggagaagaaaaagacaagcctcgtggagctgcaagagcagctccagcagctcccagctttaatcgcagacttagaatccatgacagcaaatctgactcatttagaggcgagttttgaggaggtagagaacaacctgctgcatctggaagacttatgtgggcagtgtgaattagaaagatgcaaacatatgcagtcccagcaactggagaattacaagaaaaataagagaaaagaactggaggtgaccttccgatctgaactagatgcagagcacgcccagaaggtcctggaaatggagcacacccagcaaatgaagctgaaggagcggcagaagttttttgaggaagccttccagcaggacatggagcagtacctgtccactggctacctgcagattgcagagcggcgagagcccataggcagcatgtcatccatggaagtgaacgtggacatgctggagcagatggacctgatggacatatcggaccaggaggccctggacgtcttcctgaactctggaggagaagagaacactgtgctgtcccccgccttagggcctgaatccagtacctgtcagaatgagattaccctccaggttccaaatccctcagaattaagagccaagccaccttcttcttcctccacctgcaccgactcggccacccgggacatcagtgagggtggggagtcccccgttgttcagtccgatgaggaggaagttcaggtggacactgccctggccacatcacacactgacagagaggccactccggatggtggtgaggacagcgactcttaaattgggacatgggcgttgtctggccacactggaatccagttttggctgtatgcggaattccacctggaaagccaggttgttttatagaggttcttgatttttacataattgccaataatgtgtgagaaacttaaagaacagctaacaataaagtgtgaggacggt

SEQ ID NO: 9082 - DNA, 1392 bp, Homo sapiens
  source 1..1392: mol_type = unassigned DNA
gcggaaggggctggggttgcggcgcggcggcgaggaccagaccgggggcggggccggtagtgggagtgcggggcgcgcggtgacagcgcggggttggcggcgtgggacccagggggcgacagaggcagcagcagcccgaggcctgaggagaggagaccggcggcggcggcaatgctggagacccttcgcgagcggctgctgagcgtgcagcaggatttcacctccgggctgaagactttaagtgacaagtcaagagaagcaaaagtgaaaagcaaacccaggactgttccatttttgccaaagtactctgctggattagaattacttagcaggtatgaggatacatgggctgcacttcacagaagagccaaagactgtgcaagtgctggagagctggtggatagcgaggtggtcatgctttctgcgcactgggagaagaaaaagacaagcctcgtggagctgcaagagcagctccagcagctcccagctttaatcgcagacttagaatccatgacagcaaatctgactcatttagaggcgagttttgaggaggtagagaacaacctgctgcatctggaagacttatgtgggcagtgtgaattagaaagatgcaaacatatgcagtcccagcaactggagaattacaagaaaaataagaggagaagattgagaacattcaaaactgaactagatgcagagcacgcccagaaggtcctggaaatggagcacacccagcaaatgaagctgaaggagcggcagaagttttttgaggaagccttccagcaggacatggagcagtacctgtccactggctacctgcagattgcagagcggcgagagcccataggcagcatgtcatccatggaagtgaacgtggacatgctggagcagatggacctgatggacatatcggaccaggaggccctggacgtcttcctgaactctggaggagaagagaacactgtgctgtcccccgccttagggcctgaatccagtacctgtcagaatgagattaccctccaggttccaaatccctcagaattaagagccaagccaccttcttcttcctccacctgcaccgactcggccacccgggacatcagtgagggtggggagtcccccgttgttcagtccgatgaggaggaagttcaggtggacactgccctggccacatcacacactgacagagaggccactccggatggtggtgaggacagcgactcttaaattgggacatgggcgttgtctggccacactggaatccagttttggctgtatgcggaattccacctggaaagccaggttgttttatagaggttcttgatttttacataattgccaataatgtgtgagaaacttaaagaacagctaacaataaagtgtgaggacggt

SEQ ID NO: 9083 - DNA, 1931 bp, Homo sapiens
  source 1..1931: mol_type = unassigned DNA
gcggaaggggctggggttgcggcgcggcggcgaggaccagaccgggggcggggccggtagtgggagtgcggggcgcgcggtgacagcgcggggttggcggcgtgggacccagggggcgacagaggcagcagcagcccgaggcctgaggagaggagaccggcggcggcggcaatgctggagacccttcgcgagcggctgctgagcgtgcagcaggatttcacctccgggctgaagactttaagtgacaagtcaagagaagcaaaagtgaaaagcaaacccaggactgttccatttttgccaaagtactctgctggattagaattacttagcaggtatgaggatacatgggctgcacttcacagaagagccaaagactgtgcaagtgctggagagctggtggatagcgaggtggtcatgctttctgcgcactgggagaagaaaaagacaagcctcgtggagctgcaagagcagctccagcagctcccagctttaatcgcagacttagaatccatgacagcaaatctgactcatttagaggcgagttttgaggaggtagagaacaacctgctgcatctggaagacttatgtgggcagtgtgaattagaaagatgcaaacatatgcagtcccagcaactggagaattacaagaaaaataagagtaaagaattgggtacaggcaaagctgaactagatgcagagcacgcccagaaggtcctggaaatggagcacacccagcaaatgaagctgaaggagcggcagaagttttttgaggaagccttccagcaggacatggagcagtacctgtccactggctacctgcagattgcagagcggcgagagcccataggcagcatgtcatccatggaagtgaacgtggacatgctggagcagatggacctgatggacatatcggaccaggaggccctggacgtcttcctgaactctggaggagaagagaacactgtgctgtcccccgccttaggtagggttgacaaacttgcattagctgaaccagggcagtatcgatgccactcccctccaaaggtgagacgtgagaaccatctgccagtcacttacgcataaacccccaagctcacagccagctcctggctccctaaccccacggttccacacggctgtgtggcagctgcaacagtggtgtggttccgtcatgaattcttctcaaagatttgacatgctccactccggtaactttggtgagttgagagctttcttgtttgttttccctcctttaccacccagaaatccatttgagtctgctccttgtggttaaggactggcgtttgcagggaggtgcggactctcctgcggggctcacgggaaactcttccctcttcgtgcgacaggcatttaggggcgtgcctgccatgggcaaagccatggtgtgtgttcagctcttggcctgtgttgtaaacttagttgcacttcagttcctttcatcccttcacaaaattttgtttcacattcatgcagcaaatatgggctgaggtgccagacctgtacctgggcttggtgcgtttcaaatttcagaccagttctttgggctgggtcaaggcaaagctcagtcgtcccagcagcacctcagccatctgtagaaggttctaccattaccacggtttcagcttcctctaaacttctcacccgcttctcctggcaatctgtcagaacggtgtcatcctggggaagagaaggagcttgggtgcatttgccctcatcctgagaaggccagaatactggagaccagcgtgaaccctcacccagagtcaggggaagatttagaaacagtgacacctgcatatagaattttgattccttgaagagcctatttagttccataaaattggagaactgctgaaggtcagtaattccgactttctcagcagtggtgtctctgaattactgcaaagggt

SEQ ID NO: 9084 - DNA, 1404 bp, Homo sapiens
  source 1..1404: mol_type = unassigned DNA
ggaccagaccgggggcggggccggtagtgggagtgcggggcgcgcggtgacagcgcggggttggcggcgtgggacccagggggcgacagaggcagcagcagcccgaggcctgaggagaggagaccggcggcggcggcaatgctggagacccttcgcgagcggctgctgagcgtgcagcaggatttcacctccgggctgaagactttaagtgacaagtcaagagaagcaaaagtgaaaagcaaacccagttggctaaatcaagaacagttttaataagtgtttcttttgggcaggactgttccatttttgccaaagtactctgctggattagaattacttagcaggtatgaggatacatgggctgcacttcacagaagagccaaagactgtgcaagtgctggagagctggtggatagcgaggtggtcatgctttctgcgcactgggagaagaaaaagacaagcctcgtggagctgcaagagcagctccagcagctcccagctttaatcgcagacttagaatccatgacagcaaatctgactcatttagaggcgagttttgaggaggtagagaacaacctgctgcatctggaagacttatgtgggcagtgtgaattagaaagatgcaaacatatgcagtcccagcaactggagaattacaagaaaaataagaggaaggaacttgaaaccttcaaagctgaactagatgcagagcacgcccagaaggtcctggaaatggagcacacccagcaaatgaagctgaaggagcggcagaagttttttgaggaagccttccagcaggacatggagcagtacctgtccactggctacctgcagattgcagagcggcgagagcccataggcagcatgtcatccatggaagtgaacgtggacatgctggagcagatggacctgatggacatatcggaccaggaggccctggacgtcttcctgaactctggaggagaagagaacactgtgctgtcccccgccttagggcctgaatccagtacctgtcagaatgagattaccctccaggttccaaatccctcagaattaagagccaagccaccttcttcttcctccacctgcaccgactcggccacccgggacatcagtgagggtggggagtcccccgttgttcagtccgatgaggaggaagttcaggtggacactgccctggccacatcacacactgacagagaggccactccggatggtggtgaggacagcgactcttaaattgggacatgggcgttgtctggccacactggaatccagttttggctgtatgcggaattccacctggaaagccaggttgttttatagaggttcttgatttttacataattgccaataatgtgtgagaaacttaaagaacagctaacaataaagtgtgaggacggt

SEQ ID NO: 9085 - DNA, 1306 bp, Homo sapiens
  source 1..1306: mol_type = unassigned DNA
ctggggttgcggcgcggcggcgaggaccagaccgggggcggggccggtagtgggagtgcggggcgcgcggtgacagcgcggggttggcggcgtgggacccagggggcgacagaggcagcagcagcccgaggcctgaggagaggagaccggcggcggcggcaatgctggagacccttcgcgagcggctgctgagcgtgcagcaggatttcacctccgggctgaagactttaagtgacaagtcaagagaagcaaaagtgaaaagcaaacccaggtatgaggatacatgggctgcacttcacagaagagccaaagactgtgcaagtgctggagagctggtggatagcgaggtggtcatgctttctgcgcactgggagaagaaaaagacaagcctcgtggagctgcaagagcagctccagcagctcccagctttaatcgcagacttagaatccatgacagcaaatctgactcatttagaggcgagttttgaggaggtagagaacaacctgctgcatctggaagacttatgtgggcagtgtgaattagaaagatgcaaacatatgcagtcccagcaactggagaattacaagaaaaataagaggaaggaacttgaaaccttcaaagctgaactagatgcagagcacgcccagaaggtcctggaaatggagcacacccagcaaatgaagctgaaggagcggcagaagttttttgaggaagccttccagcaggacatggagcagtacctgtccactggctacctgcagattgcagagcggcgaggcgacccataggcagcatgtcatccatggaagtgaacgtggacatgctggagcagatggacctgatggacatatcggaccaggaggccctggacgtcttcctgaactctggaggagaagagaacactgtgctgtcccccgccttagggcctgaatccagtacctgtcagaatgagattaccctccaggttccaaatccctcagaattaagagccaagccaccttcttcttcctccacctgcaccgactcggccacccgggacatcagtgagggtggggagtcccccgttgttcagtccgatgaggaggaagttcaggtggacactgccctggccacatcacacactgacagagaggccactccggatggtggtgaggacagcgactcttaaattgggacatgggcgttgtctggccacactggaatccagttttggctgtatgcggaattccacctggaaagccaggttgttttatagaggttcttgatttttacataattgccaataatgtgtgagaaacttaaagaa

SEQ ID NO: 9086 - DNA, 6199 bp, Homo sapiens
  source 1..6199: mol_type = unassigned DNA
ggatttcatactcatagctctccctagaatttcagagagttctgttatgatctctgttgtaattaccaatttggttcaagtttgttctttaaatgaatatgcttagaattcacatatgttctggatgtactggaattaaaaggatttaagagatcatggtgtgcatgttctaggataaataggatttaccaatccttggatgaagtgcttgggaagtctttaagtgccataatcaactgccatttcaaagaatatagatggttttgaaaagttcatgctgtcccttcattgaattttagaatgattgaagatagtgggaaaagaggaaataccatggcagaaagaagacagctgtttgcagagatgagggctcaagatctggatcgcatccgactctccacctacagaacagcatgcaagcttaggtttgttcagaagaaatgcaatttgcacctggtggacatatggaatgtcatagaagcattgcgggaaaatgctctgaacaacctggacccaaacactgaactcaacgtgtcccgcttagaggctgtgctctccactattttttaccagctcaacaaacggatgccaaccactcaccaaatccatgtggagcagtccatcagcctcctccttaacttcctgcttgcagcgtttgatccggaaggccatggtaaaatttcagtatttgctgtcaaaatggctttagccacattgtgtggagggaagatcatggacaaattaagatatattttctcaatgatttctgactccagtggggtgatggtttatggacgatatgaccaattccttcgggaagttctcaaactacccacggcagtttttgaaggtccttcatttggttacacagaacagtcagccagatcctgtttctcccaacagaaaaaagtcacgttaaatggtttcttggacacgcttatgtcagatcctcccccgcagtgtctggtctggttgcctcttctgcatcgactagcaaatgtggaaaatgtcttccatccggttgagtgttcctactgccacagtgagagtatgatgggatttcgctaccgatgccaacagtgtcacaattaccagctctgtcaggactgcttctggaggggacatgccggtggttctcatagcaaccagcaccaaatgaaagagtacacgtcatggaaatcacctgctaagaagctgactaatgcattaagcaagtccctgagctgtgcttccagccgtgaacctttgcaccccatgttcccagatcagcctgagaagccactcaacttggctcacatcgtgctggacaatatgcctcccagacctgtaaccagcatgaacgacaccctgttctcccactctgttccctcctcaggaagtccttttattaccaggagctctcctcccaaggacagtgaagtagagcagaacaaactgctggctagggctgctccagcttttctgaagggcaaagggatacagtacagcctgaatgtggcagacaggctagctgatgaacatgttctcatcgggttgtatgtcaacatgctccggaacaacccctcatgcatgcttgagagttcaaaccggcttgatgaagaacacaggctaattgccaggtatgcggcaaggctggcagcagagtcctcttcgtctcagccacctcagcagagaagtgctcctgacatctctttcaccatcgatgcgaataagcagcaaaggcagctgattgctgagctagaaaacaagaacagagaaatcttacaggagatccagagacttcggctagagcatgaacaagcttctcagcccacgccagagaaggcacagcaaaaccccaccctgctggcagaactccggctcctcagacagcgcaaagatgagctggaacagagaatgtctgctctccaggagagccggagagagctaatggtccagttggagggtctcatgaagctactaaagactcagggggcaggctctccccgctcctcccccagccacaccatcagcaggccaattcccatgcccatccggtcagcgtcagcctgctccaccccgacgcacacgccgcaggactccctcacaggagtagggggagatgtacaagaggcatttgcacaaagttcaagaagaaacttaaggaatgacttgctagtggctgcagattccatcactaacactatgtcctctcttgtgaaagagctgaattctgaggttgggagtgaaacagagagtaatgtggattctgaatttgcacggactcagtttgaggatcttgttccctcaccaacctctgaaaaggcttttctagcgcaaatccatgcccgaaaacctgggtacattcacagtggagctaccacaagtaccatgcgtggcgacatggttacggaggatgcagatccctatgtgcagcctgaagatgaaaactatgaaaatgactctgtccggcagctggagaatgagctccagatggaggaatacctgaaacagaagctgcaagatgaagcttatcaggtcagcttgcaaggttgaatgcaatatccttttatcacactcctctcaagcaagctatagtcagacagatgatgaaagtaacatgaaaactggtgatgatggagagccctgtggccacacagaggaggaagacagcagcctggcagcagcctcaccgaagagaggaaccaccacacccagcagctcctgacagacccccacccctaaagatgtgtcctgatgactatagtgcagctaactttttgttctcagatttgtagtgcataggtgtgtgtttcaagaaggaaaaaaaaagacttctgttcaaagttaacttatcagctacatcctctgtaacgtggttcatccctggttaaaaagcaaacaaacacaggctgaaaacccatgctgctgttatacacaatggcagtattaacaagcattttaaacctttgcacatgatattgaacctgttcagtttacaatgacaatattaatactgtttatagctagaagtttgatttctgaattctttgagattttagcaaaacagtttattatacactgtacatttttttcacagcaattggaaaaaaacaaccacttgcaatcattcaataaccctgaagaatttggttcctgagtgtacaaactcagagcccggaagccaagaagggtccttggcctgcacggtctgtagttgactccaagtctctgtgagcagtgacttgaaccaaacacaccaggaataatccattctttggggcctctttccaactcgaggttgttttctttcaagatactctaatcagccatagaatttagtgtaaatatttttttttccaaatagatatcatattcaaaaaaggcagcattcaaattatatagaatctagtttttaaaatcagcacagatcttcttaaaaactgtgaactatgttttgaaatactcgttactaaagctgtttataaaccacaggtgccataagatccccaaacggactaaagttatctctgctcttccatggtcttgttcctctcgttttggctttaggaagcatgtctttaacagcaccgctcgttcacaagttcccccatcaagttgtttggaggccttcagctttaaatgtacaggcttaaagtgcgcttgcaaacgtttgctctcctttttttctgaatgttgattgccttagctggccacctggtgttctgcatgtagccttctgtggtcatgtgaaaggagacaggctcttctaagttgagttgggatttttgcactcagtgaaaagctgaagtgcaaaagagctatcaaagacaagaggataaaagactgggatagtcttttccaaggaccctctttagagggccctaaagacctcctttgggaattctggggaaaaagaaaaagtaatcttctacttgcttcaagatttgatttttttaaaaaagcctgcgacctattcaatacattatgcttaaattagcagtttctctggaattcctgtctctcctttaaaagaaaggagagaacattttagaacaatagttctcaaagtgtgttccccggacaagcagcatctgcaacacttaggaaggtcttcgaaatactaatttgtaagccccacctcaggcctactgaatcagaagctctgggggttgggtccagaagtctgttttagtcaaccctctaggtgattctgatgctcgctaaaggttgagaactactgctttagaatgaagtcgtataataaagtctctgaaaaggccttattcagaataagcaagaaaggttctgtgattcacttttgcttctggggctggcaaaaaccttctctgaacccacacaccaagttcgtagttggtaggtgcccagccaagtcctgacatcttcatgccccctctgcagagggcggctgtacgatgttcacatgtctgcgtttggtcagacatcatctccttggctgccctttgaaaccaaatcacttgccttggggataaagtgctcaattggcattagtgagaagcccatcctatcccttgacatacttaatcatatatctctccagagaactcacctgacaaatgtctctgagcacaggctgacaccaaagtggcacaactgcacagttctcagatttctttgcacagattgatttttattgcgggttttgttggggtgtcttaatgttcatctcttttccactgcccatcctctgtgaacccatacctctctagatggagcaggtggccactggtgcctcatactcagtattgaaaaccactacatcccagctacctataatgctgtcagctcaaaatcatagccaggtagttcttgaactcagaacttaaatcctgcacgtggcactccaccactgactggaccgagctggcatatgttgtttctttgtgtttctacatcaaaatgttcgtctaagatttgaactgttctgctgataaccttccccgttgtcatagctatttcattgccaaccaactccatcacatggttgttgatatcgtcatataaagccattgcaaggactctggaaactgccgccaatgaccaatttctgactaaccagccaccttttctctctcttagctccacgtcagcactgagaccagactcgagcacccctgtcctgtaagcgagacaaaatggcgtgtgttattttggggttttgtgttttttggtgggtttctttccttggctctccagatttacttttggggcctgttctaagtgcaaacccagcaagtttcacttgtcctgtccattagatacaactacatcttgcgggggttgtttctttcttgttccacaatgaattgcacatccatctccatcagagctgatagcctgttaataagcactggtctaacacagccaaccctcctccacagcgccatattaatggaggaggggaggaaggtgaaatctactgcatgggattcaggaaacagttgtggttggtcaggacggaagttggggtaagtttggttggtcagagggagttgtgctggagattgtgaaaaatgggttcttgaatgatctactataaggcagggaaggttcatttgtaagtagtaatgtgaactgaattgcattaagagtgtgtggcctttgttgtgatatactatgtattttcttatatgcatgagccaaactgttgcatcataatttagcactgatgtctgcttttattttgatcatctttgtccacccttattagttcttggctgttaaccgtagatagatcttgtaaatccagcaacctttggttgctgcattccccttggttcgattccacgcaaggagccacaagtgagaactccactgtccttagaagaaagggcatttttacttttgaaccaaaaagagaaaaaaaaatcagaagtgttgcatcttgaggcgaattaactgtaagacatttttaattatgactactgcaatttgacaccatttgaaataatcaattcagagacactaaagatttcacaatattcattggtattgtaaaaaaaaaatactattgtatggatttttgtattgctgttaagtattgttttgtgtgtgtgtgtgtgtgtgtgtgttggaacctcctggggacatgttatattttgaagtgattaaactatttaattgtgtgtctatattttggagtggaataatttcttcattaaaaaatgtttttaaaaac

SEQ ID NO: 9087 - DNA, 4363 bp, Homo sapiens
  source 1..4363: mol_type = unassigned DNA
aatgattgaagatagtgggaaaagaggaaataccatggcagaaagaagacagctgtttgcagagatgagggctcaagatctggatcgcatccgactctccacctacagaacagcatgcaagcttaggtttgttcagaagaaatgcaatttgcacctggtggacatatggaatgtcatagaagcattgcgggaaaatgctctgaacaacctggacccaaacactgaactcaacgtgtcccgcttagaggctgtgctctccactattttttaccagctcaacaaacggatgccaaccactcaccaaatccatgtggagcagtccatcagcctcctccttaacttcctgcttgcagcgtttgatccggaaggccatggtaaaatttcagtatttgctgtcaaaatggctttagccacattgtgtggagggaagatcatggacaaattaagatatattttctcaatgatttctgactccagtggggtgatggtttatggacgatatgaccaattccttcgggaagttctcaaactacccacggcagtttttgaaggtccttcatttggttacacagaacagtcagccagatcctgtttctcccaacagaaaaaagtcacgttaaatggtttcttggacacgcttatgtcagatcctcccccgcagtgtctggtctggttgcctcttctgcatcgactagcaaatgtggaaaatgtcttccatccggttgagtgttcctactgccacagtgagagtatgatgggatttcgctaccgatgccaacagtgtcacaattaccagctctgtcaggactgcttctggaggggacatgccggtggttctcatagcaaccagcaccaaatgaaagagtacacgtcatggaaatcacctgctaagaagctgactaatgcattaagcaagtccctgagctgtgcttccagccgtgaacctttgcaccccatgttcccagatcagcctgagaagccactcaacttggctcacatcgttgatacttggcctcccagacctgtaaccagcatgaacgacaccctgttctcccactctgttccctcctcaggaagtccttttattaccaggagctctcctcccaaggacagtgaagtagagcagaacaaactgctggctagggctgctccagcttttctgaagggcaaagggatacagtacagcctgaatgtggcagacaggctagctgatgaacatgttctcatcgggttgtatgtcaacatgctccggaacaacccctcatgcatgcttgagagttcaaaccggcttgatgaagaacacaggctaattgccaggtatgcggcaaggctggcagcagagtcctcttcgtctcagccacctcagcagagaagtgctcctgacatctctttcaccatcgatgcgaataagcagcaaaggcagctgattgctgagctagaaaacaagaacagagaaatcttacaggagatccagagacttcggctagagcatgaacaagcttctcagcccacgccagagaaggcacagcaaaaccccaccctgctggcagaactccggctcctcagacagcgcaaagatgagctggaacagagaatgtctgctctccaggagagccggagagagctaatggtccagttggagggtctcatgaagctactaaaggaagaagaactgaagcagggagtaagttatgtcccctactgcaggtcttaactaacagtggaggggcctgccgacctgcggttttctcattgcttttgctctaatgtatgttcatgcttcagtttggaaagagaaaaaagtcatactaatttgcttctttttcaatgtagtgcttgaattgagatatataaatttagcattttttataactatcactactatccacatcaaaagaagaactatgacatcttttagaaaagggaacgaattgtcatttattggaaacattttagatccccagaggtataagtttcaaaccagtcttagcttttcaagttgttgatcagacccttctcttaacagagagataccacagtcactagagataccctgaggttcatgtcatcccaaaacccacagcactcagaagctaacctctacacccactcacactgtgagtattcagttcggtttcattttactgaaaacctgtgaaacctctttttataaaaatcaggcaattaaatcccttttcatcacacaattattgagccttgttccccatggctcaccaaaatgtgctcaattttgtgagagaaagactgtactccataactgactattcacgtcccatctttttggctcttccccaaagcagaatccttactgttggttgacagtaatctctttttaaaaagtaactctcagctttttccttagcaccagagcctttcggctccgggagacgagagggtcattacatacttttttttttttctggaaataggggcattgtgactttatagcctaaactggagctgtctgaacctgtggtcaggctcaagagccagcagggggagcagcaaactcaaaaaaaaaaacaaattaaattaaattaaattaaattaaatagaagcaaaataaaagcagctttaatttcaagtgcatgtaccacgctatgtatgacaatatatcccactcactagcattatttaaaagtttcacattatttccatggatcaattagaaccacaacctgtccaatttcaacgtatctttcatttcttctgtatgctcttttctattattcattatgtgtgtttgtgtgtaacaaagaatgtttggaaaatgctggacacatttttacccttcattcccatggtctgtaaaaaaggaaagtgtaaaatcaatctgtaatgtcagacaataaagataatgtattacattattttgtattttgtgaaaaaaattactttactaaattaaagtcaaattttaacagaagacagtccccctgggtgaaggacacataacacatacagcctgtataattgcccatgaatgcatacatggggtattgctattgtatttccaatacacttagatcatggtaaagaaaaatgccttcttcatgatacttctctgcaaatggcttctttcctctcctgtctcttatttagcatgtgcatagaaaaaggaaataaggttcaattataacctccctcctcctagcagagagagagggcaatcatcctgtcgtcatcagccttgctttagccatttcccttggggatactttccaggccatttcccaggcagcaggatcttgaaaggctcctatggaccaggaagttcgtaaacagatggatgcacagagccaaactgtggcagtgcccccaaggtggcgccactgccccctcaccttccagctcctctccaccaagcccctcagcagcttctgcatctcagggggccaacagcgggtactgcggtgtcggtacccaaggaccagggcccacgtcacccagatgtcagcaatacatcgtctgggtagtggcagagtttgcctatttcacttatttatcttttttgcttttatacacaagcctcttttcaaaaaggacctgaggcagcttacaacaaaagatataaacagtgacttcataaaattgaaatagaaaaatcaaaaactaaagaaaataaaatgtgaatatgctaatcttaagggacaaggatgttactctgcatgttctggcaatgaagcaaaaaaaaaaaaaaaaggaaaattatcggtggttttatcagtacagaaataccacttctcaggggaacaaaatttctgttggcataaaatatgaaagaaagtcttcactgggagctttataggagtactggacgatagaaaaggaaaaaaagcagtcatagatttcatgtggctgtttcttatactgacctcagtcaaaattaaaagcagaaccttatcaatcccagccctatagaggcggttctgcaaggaaataaacaaatgctgtccaaatatagacttctcatggtaaaacatgatctaaggagagaatttagaggttttagactggcatctgcttctaaattctgtttttatttatgagtgtttctcccctttggggacattgtctttgtaaaaccaaacttagaacacccccacacaacaaattgtgctggatttaataacctctacttgctttatcataagtctgtgtggttcaatgtagtgttttattatactggcatatataatttctacttacattgtttcttgttagaggtaatgcatgaatttatccctctcgaggagagaacatgaattaaaaaaaatagtgcctgtaatataatgtgatgattatgatatcacaagcaataaatttttttttacaaaacttg

SEQ ID NO: 9088 - DNA, 6522 bp, Homo sapiens
  source 1..6522: mol_type = unassigned DNA
aggatgagatcatagtttcaggatcctcaggaaaccctggtactggcagcagccagcctctgctgtgcccacatgacccacaactctggcagcggacccggcacttccaacattattaaataataagaaagcggctcctactccaggctcaaacctccctgcagaccaatggacaccttctaagagtttggcgagtcagtgactgaagcgcccgtccattccaagataaataggatttaccaatccttggatgaagtgcttgggaagtctttaagtgccataatcaactgccatttcaaagaatatagatggttttgaaaagttcatgctgtcccttcattgaattttagaatgattgaagatagtgggaaaagaggaaataccatggcagaaagaagacagctgtttgcagagatgagggctcaagatctggatcgcatccgactctccacctacagaacagcatgcaagcttaggtttgttcagaagaaatgcaatttgcacctggtggacatatggaatgtcatagaagcattgcgggaaaatgctctgaacaacctggacccaaacactgaactcaacgtgtcccgcttagaggctgtgctctccactattttttaccagctcaacaaacggatgccaaccactcaccaaatccatgtggagcagtccatcagcctcctccttaacttcctgcttgcagcgtttgatccggaaggccatggtaaaatttcagtatttgctgtcaaaatggctttagccacattgtgtggagggaagatcatggacaaattaagatatattttctcaatgatttctgactccagtggggtgatggtttatggacgatatgaccaattccttcgggaagttctcaaactacccacggcagtttttgaaggtccttcatttggttacacagaacagtcagccagatcctgtttctcccaacagaaaaaagtcacgttaaatggtttcttggacacgcttatgtcagatcctcccccgcagtgtctggtctggttgcctcttctgcatcgactagcaaatgtggaaaatgtcttccatccggttgagtgttcctactgccacagtgagagtatgatgggatttcgctaccgatgccaacagtgtcacaattaccagctctgtcaggactgcttctggaggggacatgccggtggttctcatagcaaccagcaccaaatgaaagagtacacgtcatggaaatcacctgctaagaagctgactaatgcattaagcaagtccctgagctgtgcttccagccgtgaacctttgcaccccatgttcccagatcagcctgagaagccactcaacttggctcacatcgttgatacttggcctcccagacctgtaaccagcatgaacgacaccctgttctcccactctgttccctcctcaggaagtccttttattaccaggagcatgcttgagagttcaaaccggcttgatgaagaacacaggctaattgccaggtatgcggcaaggctggcagcagagtcctcttcgtctcagccacctcagcagagaagtgctcctgacatctctttcaccatcgatgcgaataagcagcaaaggcagctgattgctgagctagaaaacaagaacagagaaatcttacaggagatccagagacttcggctagagcatgaacaagcttctcagcccacgccagagaaggcacagcaaaaccccaccctgctggcagaactccggctcctcagacagcgcaaagatgagctggaacagagaatgtctgctctccaggagagccggagagagctaatggtccagttggagggtctcatgaagctactaaagactcagggggcaggctctccccgctcctcccccagccacaccatcagcaggccaattcccatgcccatccggtcagcgtcagcctgctccaccccgacgcacacgccgcaggactccctcacaggagtagggggagatgtacaagaggcatttgcacaaagttcaagaagaaacttaaggaatgacttgctagtggctgcagattccatcactaacactatgtcctctcttgtgaaagagctgaattctgaggttgggagtgaaacagagagtaatgtggattctgaatttgcacggactcagtttgaggatcttgttccctcaccaacctctgaaaaggcttttctagcgcaaatccatgcccgaaaacctgggtacattcacagtggagctaccacaagtaccatgcgtggcgacatggttacggaggatgcagatccctatgtgcagcctgaagatgaaaactatgaaaatgactctgtccggcagctggagaatgagctccagatggaggaatacctgaaacagaagctgcaagatgaagcttatcaggtcagcttgcaaggttgaatgcaatatccttttatcacactcctctcaagcaagctatagtcagacagatgatgaaagtaacatgaaaactggtgatgatggagagccctgtggccacacagaggaggaagacagcagcctggcagcagcctcaccgaagagaggaaccaccacacccagcagctcctgacagacccccacccctaaagatgtgtcctgatgactatagtgcagctaactttttgttctcagatttgtagtgcataggtgtgtgtttcaagaaggaaaaaaaaagacttctgttcaaagttaacttatcagctacatcctctgtaacgtggttcatccctggttaaaaagcaaacaaacacaggctgaaaacccatgctgctgttatacacaatggcagtattaacaagcattttaaacctttgcacatgatattgaacctgttcagtttacaatgacaatattaatactgtttatagctagaagtttgatttctgaattctttgagattttagcaaaacagtttattatacactgtacatttttttcacagcaattggaaaaaaacaaccacttgcaatcattcaataaccctgaagaatttggttcctgagtgtacaaactcagagcccggaagccaagaagggtccttggcctgcacggtctgtagttgactccaagtctctgtgagcagtgacttgaaccaaacacaccaggaataatccattctttggggcctctttccaactcgaggttgttttctttcaagatactctaatcagccatagaatttagtgtaaatatttttttttccaaatagatatcatattcaaaaaaggcagcattcaaattatatagaatctagtttttaaaatcagcacagatcttcttaaaaactgtgaactatgttttgaaatactcgttactaaagctgtttataaaccacaggtgccataagatccccaaacggactaaagttatctctgctcttccatggtcttgttcctctcgttttggctttaggaagcatgtctttaacagcaccgctcgttcacaagttcccccatcaagttgtttggaggccttcagctttaaatgtacaggcttaaagtgcgcttgcaaacgtttgctctcctttttttctgaatgttgattgccttagctggccacctggtgttctgcatgtagccttctgtggtcatgtgaaaggagacaggctcttctaagttgagttgggatttttgcactcagtgaaaagctgaagtgcaaaagagctatcaaagacaagaggataaaagactgggatagtcttttccaaggaccctctttagagggccctaaagacctcctttgggaattctggggaaaaagaaaaagtaatcttctacttgcttcaagatttgatttttttaaaaaagcctgcgacctattcaatacattatgcttaaattagcagtttctctggaattcctgtctctcctttaaaagaaaggagagaacattttagaacaatagttctcaaagtgtgttccccggacaagcagcatctgcaacacttaggaaggtcttcgaaatactaatttgtaagccccacctcaggcctactgaatcagaagctctgggggttgggtccagaagtctgttttagtcaaccctctaggtgattctgatgctcgctaaaggttgagaactactgctttagaatgaagtcgtataataaagtctctgaaaaggccttattcagaataagcaagaaaggttctgtgattcacttttgcttctggggctggcaaaaaccttctctgaacccacacaccaagttcgtagttggtaggtgcccagccaagtcctgacatcttcatgccccctctgcagagggcggctgtacgatgttcacatgtctgcgtttggtcagacatcatctccttggctgccctttgaaaccaaatcacttgccttggggataaagtgctcaattggcattagtgagaagcccatcctatcccttgacatacttaatcatatatctctccagagaactcacctgacaaatgtctctgagcacaggctgacaccaaagtggcacaactgcacagttctcagatttctttgcacagattgatttttattgcgggttttgttggggtgtcttaatgttcatctcttttccactgcccatcctctgtgaacccatacctctctagatggagcaggtggccactggtgcctcatactcagtattgaaaaccactacatcccagctacctataatgctgtcagctcaaaatcatagccaggtagttcttgaactcagaacttaaatcctgcacgtggcactccaccactgactggaccgagctggcatatgttgtttctttgtgtttctacatcaaaatgttcgtctaagatttgaactgttctgctgataaccttccccgttgtcatagctatttcattgccaaccaactccatcacatggttgttgatatcgtcatataaagccattgcaaggactctggaaactgccgccaatgaccaatttctgactaaccagccaccttttctctctcttagctccacgtcagcactgagaccagactcgagcacccctgtcctgtaagcgagacaaaatggcgtgtgttattttggggttttgtgttttttggtgggtttctttccttggctctccagatttacttttggggcctgttctaagtgcaaacccagcaagtttcacttgtcctgtccattagatacaactacatcttgcgggggttgtttctttcttgttccacaatgaattgcacatccatctccatcagagctgatagcctgttaataagcactggtctaacacagccaaccctcctccacagcgccatattaatggaggaggggaggaaggtgaaatctactgcatgggattcaggaaacagttgtggttggtcaggacggaagttggggtaagtttggttggtcagagggagttgtgctggagattgtgaaaaatgggttcttgaatgatctactataaggcagggaaggttcatttgtaagtagtaatgtgaactgaattgcattaagagtgtgtggcctttgttgtgatatactatgtattttcttatatgcatgagccaaactgttgcatcataatttagcactgatgtctgcttttattttgatcatctttgtccacccttattagttcttggctgttaaccgtagatagatcttgtaaatccagcaacctttggttgctgcattccccttggttcgattccacgcaaggagccacaagtgagaactccactgtccttagaagaaagggcatttttacttttgaaccaaaaagagaaaaaaaaatcagaagtgttgcatcttgaggcgaattaactgtaagacatttttaattatgactactgcaatttgacaccatttgaaataatcaattcagagacactaaagatttcacaatattcattggtattgtaaaaaaaaaatactattgtatggatttttgtattgctgttaagtattgttttgtgtgtgtgtgtgtgtgtgtgtgttggaacctcctggggacatgttatattttgaagtgattaaactatttaattgtgtgtctatattttggagtggaataatttcttcattaaaaaatgtttttaaaaacactatatcttgggtggtttattcctttgtttcagtgaatctttcctaaagcaacgtggagtcagtctgttgaaagaaggaaggcaggtacttgcagtttaaagcaggacccattgatggaatattgagccaccgaggcaaaatagctcaccttctcttgccttgggggatgcatggtttttaccattctactgttttattagcatctgtgagcatctaatagaaatactattctgctatttatggaaatccttattataattgatatggaagtgagtttgaaattctaacagctaacatatttcatgtttgtatcacacactgttcttaacactttatgtgacttcactcaattctttgaatcctctgcatctagccatgtattctgcaaatattaagtgctcaatggtttttttgttgaattactgaataaatgaattagtggtg

SEQ ID NO: 9089 - DNA, 1706 bp, Homo sapiens
  source 1..1706: mol_type = unassigned DNA
caggaaaccctggtactggcagcagccagcctctgctgtgcccacatgacccacaactctggcagcggacccggcacttccaacattattaaataataagaaagcggctcctactccaggctcaaacctccctgcagaccaatggacaccttctaagagtttggcgagtcagtgactgaagcgcccgtccattccaagataaataggatttaccaatccttggatgaagtgcttgggaagtctttaagtgccataatcaactgccatttcaaagaatatagatggttttgaaaagttcatgctgtcccttcattgaattttagaatgattgaagatagtgggaaaagaggaaataccatggcagaaagaagacagctgtttgcagagatgagggctcaagatctggatcgcatccgactctccacctacagaacagcatgcaagcttaggtttgttcagaagaaatgcaatttgcacctggtggacatatggaatgtcatagaagcattgcgggaaaatgctctgaacaacctggacccaaacactgaactcaacgtgtcccgcttagaggctgtgctctccactattttttaccagctcaacaaacggatgccaaccactcaccaaatccatgtggagcagtccatcagcctcctccttaacttcctgcttgcagcgtttgatccggaaggccatggtaaaatttcagtatttgctgtcaaaatggctttagccacattgtgtggagggaagatcatggacaaattaagatatattttctcaatgatttctgactccagtggggtgatggtttatggacgatatgaccaattccttcgggaagttctcaaactacccacggcagtttttgaaggtccttcatttggttacacagaacagtcagccagatcctgtttctcccaacagaaaaaagtcacgttaaatggtttcttggacacgcttatgtcagatcctcccccgcagtgtctggtctggttgcctcttctgcatcgactagcaaatgtggaaaatgtcttccatccggttgagtgttcctactgccacagtgagagtatgatgggatttcgctaccgatgccaacagtgtcacaattaccagctctgtcaggactgcttctggaggggacatgccggtggttctcatagcaaccagcaccaaatgaaagagtacacgtcatggaaatcacctgctaagaagctgactaatgcattaagcaagtccctgagctgtgcttccagccgtgaacctttgcaccccatgttcccagatcagcctgagaagccactcaacttggctcacatcgttgatacttggcctcccagacctgtaaccagcatgaacgacaccctgttctcccactctgttccctcctcaggaagtccttttattaccaggagctcggacggtgcttttggtggatgcgtctagatggataacatgacttcttctaccctaaaatattcctataatactttgagctgttctggttcctccagggtgcatggtacccattaacccaaaatatgattatttcccttttttcccattttcagtcattttggaatgttctctgtgaaccacagttgtgttgtttaaagctcacatttctttctgtcaccacagagattggcctacggtttctgttttgagggtgctgttcaataaagctgtgtacactaaatgtc

SEQ ID NO: 9090 - DNA, 4518 bp, Homo sapiens
  source 1..4518: mol_type = unassigned DNA
ttgagcacaaggggaagaatgaacacagctttttattgaagttaaaggttactttggagtttgtttggaaatgtgtaaggtcaaatactatagttttcagcatatgtagtacttcagaggaagaattaaggggcatgttggtgcatttaactacaaaaccagaatgattgaagatagtgggaaaagaggaaataccatggcagaaagaagacagctgtttgcagagatgagggctcaagatctggatcgcatccgactctccacctacagaacagcatgcaagcttaggtttgttcagaagaaatgcaatttgcacctggtggacatatggaatgtcatagaagcattgcgggaaaatgctctgaacaacctggacccaaacactgaactcaacgtgtcccgcttagaggctgtgctctccactattttttaccagctcaacaaacggatgccaaccactcaccaaatccatgtggagcagtccatcagcctcctccttaacttcctgcttgcagcgtttgatccggaaggccatggtaaaatttcagtatttgctgtcaaaatggctttagccacattgtgtggagggaagatcatggacaaattaagatatattttctcaatgatttctgactccagtggggtgatggtttatggacgatatgaccaattccttcgggaagttctcaaactacccacggcagtttttgaaggtccttcatttggttacacagaacagtcagccagatcctgtttctcccaacagaaaaaagtcacgttaaatggtttcttggacacgcttatgtcagatcctcccccgcagtgtctggtctggttgcctcttctgcatcgactagcaaatgtggaaaatgtcttccatccggttgagtgttcctactgccacagtgagagtatgatgggatttcgctaccgatgccaacagtgtcacaattaccagctctgtcaggactgcttctggaggggacatgccggtggttctcatagcaaccagcaccaaatgaaagagtacacgtcatggaaatcacctgctaagaagctgactaatgcattaagcaagtccctgagctgtgcttccagccgtgaacctttgcaccccatgttcccagatcagcctgagaagccactcaacttggctcacatcgtgcctcccagacctgtaaccagcatgaacgacaccctgttctcccactctgttccctcctcaggaagtccttttattaccaggagctctcctcccaaggacagtgaagtagagcagaacaaactgctggctagggctgctccagcttttctgaagggcaaagggatacagtacagcctgaatgtggcagacaggctagctgatgaacatgttctcatcgggttgtatgtcaacatgctccggaacaacccctcatgcatgcttgagagttcaaaccggcttgatgaagaacacaggctaattgccaggtatgcggcaaggctggcagcagagtcctcttcgtctcagccacctcagcagagaagtgctcctgacatctctttcaccatcgatgcgaataagcagcaaaggcagctgattgctgagctagaaaacaagaacagagaaatcttacaggagatccagagacttcggctagagcatgaacaagcttctcagcccacgccagagaaggcacagcaaaaccccaccctgctggcagaactccggctcctcagacagcgcaaagatgagctggaacagagaatgtctgctctccaggagagccggagagagctaatggtccagttggagggtctcatgaagctactaaaggaagaagaactgaagcagggagtaagttatgtcccctactgcaggtcttaactaacagtggaggggcctgccgacctgcggttttctcattgcttttgctctaatgtatgttcatgcttcagtttggaaagagaaaaaagtcatactaatttgcttctttttcaatgtagtgcttgaattgagatatataaatttagcattttttataactatcactactatccacatcaaaagaagaactatgacatcttttagaaaagggaacgaattgtcatttattggaaacattttagatccccagaggtataagtttcaaaccagtcttagcttttcaagttgttgatcagacccttctcttaacagagagataccacagtcactagagataccctgaggttcatgtcatcccaaaacccacagcactcagaagctaacctctacacccactcacactgtgagtattcagttcggtttcattttactgaaaacctgtgaaacctctttttataaaaatcaggcaattaaatcccttttcatcacacaattattgagccttgttccccatggctcaccaaaatgtgctcaattttgtgagagaaagactgtactccataactgactattcacgtcccatctttttggctcttccccaaagcagaatccttactgttggttgacagtaatctctttttaaaaagtaactctcagctttttccttagcaccagagcctttcggctccgggagacgagagggtcattacatacttttttttttttctggaaataggggcattgtgactttatagcctaaactggagctgtctgaacctgtggtcaggctcaagagccagcagggggagcagcaaactcaaaaaaaaaaacaaattaaattaaattaaattaaattaaatagaagcaaaataaaagcagctttaatttcaagtgcatgtaccacgctatgtatgacaatatatcccactcactagcattatttaaaagtttcacattatttccatggatcaattagaaccacaacctgtccaatttcaacgtatctttcatttcttctgtatgctcttttctattattcattatgtgtgtttgtgtgtaacaaagaatgtttggaaaatgctggacacatttttacccttcattcccatggtctgtaaaaaaggaaagtgtaaaatcaatctgtaatgtcagacaataaagataatgtattacattattttgtattttgtgaaaaaaattactttactaaattaaagtcaaattttaacagaagacagtccccctgggtgaaggacacataacacatacagcctgtataattgcccatgaatgcatacatggggtattgctattgtatttccaatacacttagatcatggtaaagaaaaatgccttcttcatgatacttctctgcaaatggcttctttcctctcctgtctcttatttagcatgtgcatagaaaaaggaaataaggttcaattataacctccctcctcctagcagagagagagggcaatcatcctgtcgtcatcagccttgctttagccatttcccttggggatactttccaggccatttcccaggcagcaggatcttgaaaggctcctatggaccaggaagttcgtaaacagatggatgcacagagccaaactgtggcagtgcccccaaggtggcgccactgccccctcaccttccagctcctctccaccaagcccctcagcagcttctgcatctcagggggccaacagcgggtactgcggtgtcggtacccaaggaccagggcccacgtcacccagatgtcagcaatacatcgtctgggtagtggcagagtttgcctatttcacttatttatcttttttgcttttatacacaagcctcttttcaaaaaggacctgaggcagcttacaacaaaagatataaacagtgacttcataaaattgaaatagaaaaatcaaaaactaaagaaaataaaatgtgaatatgctaatcttaagggacaaggatgttactctgcatgttctggcaatgaagcaaaaaaaaaaaaaaaaggaaaattatcggtggttttatcagtacagaaataccacttctcaggggaacaaaatttctgttggcataaaatatgaaagaaagtcttcactgggagctttataggagtactggacgatagaaaaggaaaaaaagcagtcatagatttcatgtggctgtttcttatactgacctcagtcaaaattaaaagcagaaccttatcaatcccagccctatagaggcggttctgcaaggaaataaacaaatgctgtccaaatatagacttctcatggtaaaacatgatctaaggagagaatttagaggttttagactggcatctgcttctaaattctgtttttatttatgagtgtttctcccctttggggacattgtctttgtaaaaccaaacttagaacacccccacacaacaaattgtgctggatttaataacctctacttgctttatcataagtctgtgtggttcaatgtagtgttttattatactggcatatataatttctacttacattgtttcttgttagaggtaatgcatgaatttatccctctcgaggagagaacatgaattaaaaaaaatagtgcctgtaatataatgtgatgattatgatatcacaagcaataaatttttttttacaaaacttgaa

SEQ ID NO: 9091 - DNA, 6094 bp, Homo sapiens
  source 1..6094: mol_type = unassigned DNA
ggatttcatactcatagctctccctagaatttcagagagttctgttatgatctctgttgtaattaccaatttggttcaagtttgttctttaaatgaatatgcttagaattcacatatgttctggatgtactggaattaaaaggatttaagagatcatggtgtgcatgttctaggataaataggatttaccaatccttggatgaagtgcttgggaagtctttaagtgccataatcaactgccatttcaaagaatatagatggttttgaaaagttcatgctgtcccttcattgaattttagaatgattgaagatagtgggaaaagaggaaataccatggcagaaagaagacagctgtttgcagagatgagggctcaagatctggatcgcatccgactctccacctacagaacagcatgcaagcttaggtttgttcagaagaaatgcaatttgcacctggtggacatatggaatgtcatagaagcattgcgggaaaatgctctgaacaacctggacccaaacactgaactcaacgtgtcccgcttagaggctgtgctctccactattttttaccagctcaacaaacggatgccaaccactcaccaaatccatgtggagcagtccatcagcctcctccttaacttcctgcttgcagcgtttgatccggaaggccatggtaaaatttcagtatttgctgtcaaaatggctttagccacattgtgtggagggaagatcatggacaaattaagatatattttctcaatgatttctgactccagtggggtgatggtttatggacgatatgaccaattccttcgggaagttctcaaactacccacggcagtttttgaaggtccttcatttggttacacagaacagtcagccagatcctgtttctcccaacagaaaaaagtcacgttaaatggtttcttggacacgcttatgtcagatcctcccccgcagtgtctggtctggttgcctcttctgcatcgactagcaaatgtggaaaatgtcttccatccggttgagtgttcctactgccacagtgagagtatgatgggatttcgctaccgatgccaacagtgtcacaattaccagctctgtcaggactgcttctggaggggacatgccggtggttctcatagcaaccagcaccaaatgaaagagtacacgtcatggaaatcacctgctaagaagctgactaatgcattaagcaagtccctgagctgtgcttccagccgtgaacctttgcaccccatgttcccagatcagcctgagaagccactcaacttggctcacatcgtgcctcccagacctgtaaccagcatgaacgacaccctgttctcccactctgttccctcctcaggaagtccttttattaccaggagctctcctcccaaggacagtgaagtagagcagaacaaactgctggctagggctgctccagcttttctgaagggcaaaggcatgcttgagagttcaaaccggcttgatgaagaacacaggctaattgccaggtatgcggcaaggctggcagcagagtcctcttcgtctcagccacctcagcagagaagtgctcctgacatctctttcaccatcgatgcgaataagcagcaaaggcagctgattgctgagctagaaaacaagaacagagaaatcttacaggagatccagagacttcggctagagcatgaacaagcttctcagcccacgccagagaaggcacagcaaaaccccaccctgctggcagaactccggctcctcagacagcgcaaagatgagctggaacagagaatgtctgctctccaggagagccggagagagctaatggtccagttggagggtctcatgaagctactaaagactcagggggcaggctctccccgctcctcccccagccacaccatcagcaggccaattcccatgcccatccggtcagcgtcagcctgctccaccccgacgcacacgccgcaggactccctcacaggagtagggggagatgtacaagaggcatttgcacaaagttcaagaagaaacttaaggaatgacttgctagtggctgcagattccatcactaacactatgtcctctcttgtgaaagagctgaattctgaggttgggagtgaaacagagagtaatgtggattctgaatttgcacggactcagtttgaggatcttgttccctcaccaacctctgaaaaggcttttctagcgcaaatccatgcccgaaaacctgggtacattcacagtggagctaccacaagtaccatgcgtggcgacatggttacggaggatgcagatccctatgtgcagcctgaagatgaaaactatgaaaatgactctgtccggcagctggagaatgagctccagatggaggaatacctgaaacagaagctgcaagatgaagcttatcaggtcagcttgcaaggttgaatgcaatatccttttatcacactcctctcaagcaagctatagtcagacagatgatgaaagtaacatgaaaactggtgatgatggagagccctgtggccacacagaggaggaagacagcagcctggcagcagcctcaccgaagagaggaaccaccacacccagcagctcctgacagacccccacccctaaagatgtgtcctgatgactatagtgcagctaactttttgttctcagatttgtagtgcataggtgtgtgtttcaagaaggaaaaaaaaagacttctgttcaaagttaacttatcagctacatcctctgtaacgtggttcatccctggttaaaaagcaaacaaacacaggctgaaaacccatgctgctgttatacacaatggcagtattaacaagcattttaaacctttgcacatgatattgaacctgttcagtttacaatgacaatattaatactgtttatagctagaagtttgatttctgaattctttgagattttagcaaaacagtttattatacactgtacatttttttcacagcaattggaaaaaaacaaccacttgcaatcattcaataaccctgaagaatttggttcctgagtgtacaaactcagagcccggaagccaagaagggtccttggcctgcacggtctgtagttgactccaagtctctgtgagcagtgacttgaaccaaacacaccaggaataatccattctttggggcctctttccaactcgaggttgttttctttcaagatactctaatcagccatagaatttagtgtaaatatttttttttccaaatagatatcatattcaaaaaaggcagcattcaaattatatagaatctagtttttaaaatcagcacagatcttcttaaaaactgtgaactatgttttgaaatactcgttactaaagctgtttataaaccacaggtgccataagatccccaaacggactaaagttatctctgctcttccatggtcttgttcctctcgttttggctttaggaagcatgtctttaacagcaccgctcgttcacaagttcccccatcaagttgtttggaggccttcagctttaaatgtacaggcttaaagtgcgcttgcaaacgtttgctctcctttttttctgaatgttgattgccttagctggccacctggtgttctgcatgtagccttctgtggtcatgtgaaaggagacaggctcttctaagttgagttgggatttttgcactcagtgaaaagctgaagtgcaaaagagctatcaaagacaagaggataaaagactgggatagtcttttccaaggaccctctttagagggccctaaagacctcctttgggaattctggggaaaaagaaaaagtaatcttctacttgcttcaagatttgatttttttaaaaaagcctgcgacctattcaatacattatgcttaaattagcagtttctctggaattcctgtctctcctttaaaagaaaggagagaacattttagaacaatagttctcaaagtgtgttccccggacaagcagcatctgcaacacttaggaaggtcttcgaaatactaatttgtaagccccacctcaggcctactgaatcagaagctctgggggttgggtccagaagtctgttttagtcaaccctctaggtgattctgatgctcgctaaaggttgagaactactgctttagaatgaagtcgtataataaagtctctgaaaaggccttattcagaataagcaagaaaggttctgtgattcacttttgcttctggggctggcaaaaaccttctctgaacccacacaccaagttcgtagttggtaggtgcccagccaagtcctgacatcttcatgccccctctgcagagggcggctgtacgatgttcacatgtctgcgtttggtcagacatcatctccttggctgccctttgaaaccaaatcacttgccttggggataaagtgctcaattggcattagtgagaagcccatcctatcccttgacatacttaatcatatatctctccagagaactcacctgacaaatgtctctgagcacaggctgacaccaaagtggcacaactgcacagttctcagatttctttgcacagattgatttttattgcgggttttgttggggtgtcttaatgttcatctcttttccactgcccatcctctgtgaacccatacctctctagatggagcaggtggccactggtgcctcatactcagtattgaaaaccactacatcccagctacctataatgctgtcagctcaaaatcatagccaggtagttcttgaactcagaacttaaatcctgcacgtggcactccaccactgactggaccgagctggcatatgttgtttctttgtgtttctacatcaaaatgttcgtctaagatttgaactgttctgctgataaccttccccgttgtcatagctatttcattgccaaccaactccatcacatggttgttgatatcgtcatataaagccattgcaaggactctggaaactgccgccaatgaccaatttctgactaaccagccaccttttctctctcttagctccacgtcagcactgagaccagactcgagcacccctgtcctgtaagcgagacaaaatggcgtgtgttattttggggttttgtgttttttggtgggtttctttccttggctctccagatttacttttggggcctgttctaagtgcaaacccagcaagtttcacttgtcctgtccattagatacaactacatcttgcgggggttgtttctttcttgttccacaatgaattgcacatccatctccatcagagctgatagcctgttaataagcactggtctaacacagccaaccctcctccacagcgccatattaatggaggaggggaggaaggtgaaatctactgcatgggattcaggaaacagttgtggttggtcaggacggaagttggggtaagtttggttggtcagagggagttgtgctggagattgtgaaaaatgggttcttgaatgatctactataaggcagggaaggttcatttgtaagtagtaatgtgaactgaattgcattaagagtgtgtggcctttgttgtgatatactatgtattttcttatatgcatgagccaaactgttgcatcataatttagcactgatgtctgcttttattttgatcatctttgtccacccttattagttcttggctgttaaccgtagatagatcttgtaaatccagcaacctttggttgctgcattccccttggttcgattccacgcaaggagccacaagtgagaactccactgtccttagaagaaagggcatttttacttttgaaccaaaaagagaaaaaaaaatcagaagtgttgcatcttgaggcgaattaactgtaagacatttttaattatgactactgcaatttgacaccatttgaaataatcaattcagagacactaaagatttcacaatattcattggtattgtaaaaaaaaaatactattgtatggatttttgtattgctgttaagtattgttttgtgtgtgtgtgtgtgtgtgtgtgttggaacctcctggggacatgttatattttgaagtgattaaactatttaattgtgtgtctatattttggagtggaataatttcttcattaaaaaatgtttttaaaaac

SEQ ID NO: 9092 - DNA, 2232 bp, Homo sapiens
  source 1..2232: mol_type = unassigned DNA
atgattgaagatagtgggaaaagaggaaataccatggcagaaagaagacagctgtttgcagagatgagggctcaagatctggatcgcatccgactctccacctacagaacagcatgcaagcttaggtttgttcagaagaaatgcaatttgcacctggtggacatatggaatgtcatagaagcattgcgggaaaatgctctgaacaacctggacccaaacactgaactcaacgtgtcccgcttagaggctgtgctctccactattttttaccagctcaacaaacggatgccaaccactcaccaaatccatgtggagcagtccatcagcctcctccttaacttcctgcttgcagcgtttgatccggaaggccatggtaaaatttcagtatttgctgtcaaaatggctttagccacattgtgtggagggaagatcatggacaaattaagatatattttctcaatgatttctgactccagtggggtgatggtttatggacgatatgaccaattccttcgggaagttctcaaactacccacggcagtttttgaaggtccttcatttggttacacagaacagtcagccagatcctgtttctcccaacagaaaaaagtcacgttaaatggtttcttggacacgcttatgtcagatcctcccccgcagtgtctggtctggttgcctcttctgcatcgactagcaaatgtggaaaatgtcttccatccggttgagtgttcctactgccacagtgagagtatgatgggatttcgctaccgatgccaacagtgtcacaattaccagctctgtcaggactgcttctggaggggacatgccggtggttctcatagcaaccagcaccaaatgaaagagtacacgtcatggaaatcacctgctaagaagctgactaatgcattaagcaagtccctgagctgtgcttccagccgtgaacctttgcaccccatgttcccagatcagcctgagaagccactcaacttggctcacatcgttgatacttggcctcccagacctgtaaccagcatgaacgacaccctgttctcccactctgttccctcctcaggaagtccttttattaccaggagctctcctcccaaggacagtgaagtagagcagaacaaactgctggctagggctgctccagcttttctgaagggcaaagggatacagtacagcctgaatgtggcagacaggctagctgatgaacatgttctcatcgggttgtatgtcaacatgctccggaacaacccctcatgcatgcttgagagttcaaaccggcttgatgaagaacacaggctaattgccaggtatgcggcaaggctggcagcagagtcctcttcgtctcagccacctcagcagagaagtgctcctgacatctctttcaccatcgatgcgaataagcagcaaaggcagctgattgctgagctagaaaacaagaacagagaaatcttacaggagatccagagacttcggctagagcatgaacaagcttctcagcccacgccagagaaggcacagcaaaaccccaccctgctggcagaactccggctcctcagacagcgcaaagatgagctggaacagagaatgtctgctctccaggagagccggagagagctaatggtccagttggagggtctcatgaagctactaaagactcagggggcaggctctccccgctcctcccccagccacaccatcagcaggccaattcccatgcccatccggtcagcgtcagcctgctccaccccgacgcacacgccgcaggactccctcacaggagtagggggagatgtacaagaggcatttgcacaaagttcaagaagaaacttaaggaatgacttgctagtggctgcagattccatcactaacactatgtcctctcttgtgaaagagctgaattctgaggttgggagtgaaacagagagtaatgtggattctgaatttgcacggactcagtttgaggatcttgttccctcaccaacctctgaaaaggcttttctagcgcaaatccatgcccgaaaacctgggtacattcacagtggagctaccacaagtaccatgcgtggcgacatggttacggaggatgcagatccctatgtgcagcctgaagatgaaaactatgaaaatgactctgtccggcagctggagaatgagctccagatggaggaatacctgaaacagaagctgcaagatgaagcttatcaggtcagcttgcaaggttga

SEQ ID NO: 9093 - DNA, 6490 bp, Homo sapiens
  source 1..6490: mol_type = unassigned DNA
agaggctggatttcatactcatagctctccctagaatttcagagagttctgttatgatctctgttgtaattaccaatttggttcaagtttgttctttaaatgaatatgcttagaattcacatatgttctggatgtactggaattaaaaggatttaagagatcatggtgtgcatgttctaggataaataggatttaccaatccttggatgaagtgcttgggaagtctttaagtgccataatcaactgccatttcaaagaatatagatggttttgaaaagttcatgctgtcccttcattgaattttagaatgattgaagatagtgggaaaagaggaaataccatggcagaaagaagacagctgtttgcagagatgagggctcaagatctggatcgcatccgactctccacctacagaacagcatgcaagcttaggtttgttcagaagaaatgcaatttgcacctggtggacatatggaatgtcatagaagcattgcgggaaaatgctctgaacaacctggacccaaacactgaactcaacgtgtcccgcttagaggctgtgctctccactattttttaccagctcaacaaacggatgccaaccactcaccaaatccatgtggagcagtccatcagcctcctccttaacttcctgcttgcagcgtttgatccggaaggccatggtaaaatttcagtatttgctgtcaaaatggctttagccacattgtgtggagggaagatcatggacaaattaagatatattttctcaatgatttctgactccagtggggtgatggtttatggacgatatgaccaattccttcgggaagttctcaaactacccacggcagtttttgaaggtccttcatttggttacacagaacagtcagccagatcctgtttctcccaacagaaaaaagtcacgttaaatggtttcttggacacgcttatgtcagatcctcccccgcagtgtctggtctggttgcctcttctgcatcgactagcaaatgtggaaaatgtcttccatccggttgagtgttcctactgccacagtgagagtatgatgggatttcgctaccgatgccaacagtgtcacaattaccagctctgtcaggactgcttctggaggggacatgccggtggttctcatagcaaccagcaccaaatgaaagagtacacgtcatggaaatcacctgctaagaagctgactaatgcattaagcaagtccctgagctgtgcttccagccgtgaacctttgcaccccatgttcccagatcagcctgagaagccactcaacttggctcacatcgtgcctcccagacctgtaaccagcatgaacgacaccctgttctcccactctgttccctcctcaggaagtccttttattaccaggagcatgcttgagagttcaaaccggcttgatgaagaacacaggctaattgccaggtatgcggcaaggctggcagcagagtcctcttcgtctcagccacctcagcagagaagtgctcctgacatctctttcaccatcgatgcgaataagcagcaaaggcagctgattgctgagctagaaaacaagaacagagaaatcttacaggagatccagagacttcggctagagcatgaacaagcttctcagcccacgccagagaaggcacagcaaaaccccaccctgctggcagaactccggctcctcagacagcgcaaagatgagctggaacagagaatgtctgctctccaggagagccggagagagctaatggtccagttggagggtctcatgaagctactaaaggaagaagaactgaagcagggaactcagggggcaggctctccccgctcctcccccagccacaccatcagcaggccaattcccatgcccatccggtcagcgtcagcctgctccaccccgacgcacacgccgcaggactccctcacaggagtagggggagatgtacaagaggcatttgcacaaagttcaagaagaaacttaaggaatgacttgctagtggctgcagattccatcactaacactatgtcctctcttgtgaaagagctgaattctgaggttgggagtgaaacagagagtaatgtggattctgaatttgcacggactcagtttgaggatcttgttccctcaccaacctctgaaaaggcttttctagcgcaaatccatgcccgaaaacctgggtacattcacagtggagctaccacaagtaccatgcgtggcgacatggttacggaggatgcagatccctatgtgcagcctgaagatgaaaactatgaaaatgactctgtccggcagctggagaatgagctccagatggaggaatacctgaaacagaagctgcaagatgaagcttatcaggtcagcttgcaaggttgaatgcaatatccttttatcacactcctctcaagcaagctatagtcagacagatgatgaaagtaacatgaaaactggtgatgatggagagccctgtggccacacagaggaggaagacagcagcctggcagcagcctcaccgaagagaggaaccaccacacccagcagctcctgacagacccccacccctaaagatgtgtcctgatgactatagtgcagctaactttttgttctcagatttgtagtgcataggtgtgtgtttcaagaaggaaaaaaaaagacttctgttcaaagttaacttatcagctacatcctctgtaacgtggttcatccctggttaaaaagcaaacaaacacaggctgaaaacccatgctgctgttatacacaatggcagtattaacaagcattttaaacctttgcacatgatattgaacctgttcagtttacaatgacaatattaatactgtttatagctagaagtttgatttctgaattctttgagattttagcaaaacagtttattatacactgtacatttttttcacagcaattggaaaaaaacaaccacttgcaatcattcaataaccctgaagaatttggttcctgagtgtacaaactcagagcccggaagccaagaagggtccttggcctgcacggtctgtagttgactccaagtctctgtgagcagtgacttgaaccaaacacaccaggaataatccattctttggggcctctttccaactcgaggttgttttctttcaagatactctaatcagccatagaatttagtgtaaatatttttttttccaaatagatatcatattcaaaaaaggcagcattcaaattatatagaatctagtttttaaaatcagcacagatcttcttaaaaactgtgaactatgttttgaaatactcgttactaaagctgtttataaaccacaggtgccataagatccccaaacggactaaagttatctctgctcttccatggtcttgttcctctcgttttggctttaggaagcatgtctttaacagcaccgctcgttcacaagttcccccatcaagttgtttggaggccttcagctttaaatgtacaggcttaaagtgcgcttgcaaacgtttgctctcctttttttctgaatgttgattgccttagctggccacctggtgttctgcatgtagccttctgtggtcatgtgaaaggagacaggctcttctaagttgagttgggatttttgcactcagtgaaaagctgaagtgcaaaagagctatcaaagacaagaggataaaagactgggatagtcttttccaaggaccctctttagagggccctaaagacctcctttgggaattctggggaaaaagaaaaagtaatcttctacttgcttcaagatttgatttttttaaaaaagcctgcgacctattcaatacattatgcttaaattagcagtttctctggaattcctgtctctcctttaaaagaaaggagagaacattttagaacaatagttctcaaagtgtgttccccggacaagcagcatctgcaacacttaggaaggtcttcgaaatactaatttgtaagccccacctcaggcctactgaatcagaagctctgggggttgggtccagaagtctgttttagtcaaccctctaggtgattctgatgctcgctaaaggttgagaactactgctttagaatgaagtcgtataataaagtctctgaaaaggccttattcagaataagcaagaaaggttctgtgattcacttttgcttctggggctggcaaaaaccttctctgaacccacacaccaagttcgtagttggtaggtgcccagccaagtcctgacatcttcatgccccctctgcagagggcggctgtacgatgttcacatgtctgcgtttggtcagacatcatctccttggctgccctttgaaaccaaatcacttgccttggggataaagtgctcaattggcattagtgagaagcccatcctatcccttgacatacttaatcatatatctctccagagaactcacctgacaaatgtctctgagcacaggctgacaccaaagtggcacaactgcacagttctcagatttctttgcacagattgatttttattgcgggttttgttggggtgtcttaatgttcatctcttttccactgcccatcctctgtgaacccatacctctctagatggagcaggtggccactggtgcctcatactcagtattgaaaaccactacatcccagctacctataatgctgtcagctcaaaatcatagccaggtagttcttgaactcagaacttaaatcctgcacgtggcactccaccactgactggaccgagctggcatatgttgtttctttgtgtttctacatcaaaatgttcgtctaagatttgaactgttctgctgataaccttccccgttgtcatagctatttcattgccaaccaactccatcacatggttgttgatatcgtcatataaagccattgcaaggactctggaaactgccgccaatgaccaatttctgactaaccagccaccttttctctctcttagctccacgtcagcactgagaccagactcgagcacccctgtcctgtaagcgagacaaaatggcgtgtgttattttggggttttgtgttttttggtgggtttctttccttggctctccagatttacttttggggcctgttctaagtgcaaacccagcaagtttcacttgtcctgtccattagatacaactacatcttgcgggggttgtttctttcttgttccacaatgaattgcacatccatctccatcagagctgatagcctgttaataagcactggtctaacacagccaaccctcctccacagcgccatattaatggaggaggggaggaaggtgaaatctactgcatgggattcaggaaacagttgtggttggtcaggacggaagttggggtaagtttggttggtcagagggagttgtgctggagattgtgaaaaatgggttcttgaatgatctactataaggcagggaaggttcatttgtaagtagtaatgtgaactgaattgcattaagagtgtgtggcctttgttgtgatatactatgtattttcttatatgcatgagccaaactgttgcatcataatttagcactgatgtctgcttttattttgatcatctttgtccacccttattagttcttggctgttaaccgtagatagatcttgtaaatccagcaacctttggttgctgcattccccttggttcgattccacgcaaggagccacaagtgagaactccactgtccttagaagaaagggcatttttacttttgaaccaaaaagagaaaaaaaaatcagaagtgttgcatcttgaggcgaattaactgtaagacatttttaattatgactactgcaatttgacaccatttgaaataatcaattcagagacactaaagatttcacaatattcattggtattgtaaaaaaaaaatactattgtatggatttttgtattgctgttaagtattgttttgtgtgtgtgtgtgtgtgtgtgtgttggaacctcctggggacatgttatattttgaagtgattaaactatttaattgtgtgtctatattttggagtggaataatttcttcattaaaaaatgtttttaaaaacactatatcttgggtggtttattcctttgtttcagtgaatctttcctaaagcaacgtggagtcagtctgttgaaagaaggaaggcaggtacttgcagtttaaagcaggacccattgatggaatattgagccaccgaggcaaaatagctcaccttctcttgccttgggggatgcatggtttttaccattctactgttttattagcatctgtgagcatctaatagaaatactattctgctatttatggaaatccttattataattgatatggaagtgagtttgaaattctaacagctaacatatttcatgtttgtatcacacactgttcttaacactttatgtgacttcactcaattctttgaatcctctgcatctagccatgtattctgcaaatattaagtgctcaatggtttttttgttgaattactgaataaatgaattagtggtg

SEQ ID NO: 9094 - DNA, 6522 bp, Homo sapiens
  source 1..6522: mol_type = unassigned DNA
aggatgagatcatagtttcaggatcctcaggaaaccctggtactggcagcagccagcctctgctgtgcccacatgacccacaactctggcagcggacccggcacttccaacattattaaataataagaaagcggctcctactccaggctcaaacctccctgcagaccaatggacaccttctaagagtttggcgagtcagtgactgaagcgcccgtccattccaagataaataggatttaccaatccttggatgaagtgcttgggaagtctttaagtgccataatcaactgccatttcaaagaatatagatggttttgaaaagttcatgctgtcccttcattgaattttagaatgattgaagatagtgggaaaagaggaaataccatggcagaaagaagacagctgtttgcagagatgagggctcaagatctggatcgcatccgactctccacctacagaacagcatgcaagcttaggtttgttcagaagaaatgcaatttgcacctggtggacatatggaatgtcatagaagcattgcgggaaaatgctctgaacaacctggacccaaacactgaactcaacgtgtcccgcttagaggctgtgctctccactattttttaccagctcaacaaacggatgccaaccactcaccaaatccatgtggagcagtccatcagcctcctccttaacttcctgcttgcagcgtttgatccggaaggccatggtaaaatttcagtatttgctgtcaaaatggctttagccacattgtgtggagggaagatcatggacaaattaagatatattttctcaatgatttctgactccagtggggtgatggtttatggacgatatgaccaattccttcgggaagttctcaaactacccacggcagtttttgaaggtccttcatttggttacacagaacagtcagccagatcctgtttctcccaacagaaaaaagtcacgttaaatggtttcttggacacgcttatgtcagatcctcccccgcagtgtctggtctggttgcctcttctgcatcgactagcaaatgtggaaaatgtcttccatccggttgagtgttcctactgccacagtgagagtatgatgggatttcgctaccgatgccaacagtgtcacaattaccagctctgtcaggactgcttctggaggggacatgccggtggttctcatagcaaccagcaccaaatgaaagagtacacgtcatggaaatcacctgctaagaagctgactaatgcattaagcaagtccctgagctgtgcttccagccgtgaacctttgcaccccatgttcccagatcagcctgagaagccactcaacttggctcacatcgtttgttttaggcctcccagacctgtaaccagcatgaacgacaccctgttctcccactctgttccctcctcaggaagtccttttattaccaggagcatgcttgagagttcaaaccggcttgatgaagaacacaggctaattgccaggtatgcggcaaggctggcagcagagtcctcttcgtctcagccacctcagcagagaagtgctcctgacatctctttcaccatcgatgcgaataagcagcaaaggcagctgattgctgagctagaaaacaagaacagagaaatcttacaggagatccagagacttcggctagagcatgaacaagcttctcagcccacgccagagaaggcacagcaaaaccccaccctgctggcagaactccggctcctcagacagcgcaaagatgagctggaacagagaatgtctgctctccaggagagccggagagagctaatggtccagttggagggtctcatgaagctactaaagactcagggggcaggctctccccgctcctcccccagccacaccatcagcaggccaattcccatgcccatccggtcagcgtcagcctgctccaccccgacgcacacgccgcaggactccctcacaggagtagggggagatgtacaagaggcatttgcacaaagttcaagaagaaacttaaggaatgacttgctagtggctgcagattccatcactaacactatgtcctctcttgtgaaagagctgaattctgaggttgggagtgaaacagagagtaatgtggattctgaatttgcacggactcagtttgaggatcttgttccctcaccaacctctgaaaaggcttttctagcgcaaatccatgcccgaaaacctgggtacattcacagtggagctaccacaagtaccatgcgtggcgacatggttacggaggatgcagatccctatgtgcagcctgaagatgaaaactatgaaaatgactctgtccggcagctggagaatgagctccagatggaggaatacctgaaacagaagctgcaagatgaagcttatcaggtcagcttgcaaggttgaatgcaatatccttttatcacactcctctcaagcaagctatagtcagacagatgatgaaagtaacatgaaaactggtgatgatggagagccctgtggccacacagaggaggaagacagcagcctggcagcagcctcaccgaagagaggaaccaccacacccagcagctcctgacagacccccacccctaaagatgtgtcctgatgactatagtgcagctaactttttgttctcagatttgtagtgcataggtgtgtgtttcaagaaggaaaaaaaaagacttctgttcaaagttaacttatcagctacatcctctgtaacgtggttcatccctggttaaaaagcaaacaaacacaggctgaaaacccatgctgctgttatacacaatggcagtattaacaagcattttaaacctttgcacatgatattgaacctgttcagtttacaatgacaatattaatactgtttatagctagaagtttgatttctgaattctttgagattttagcaaaacagtttattatacactgtacatttttttcacagcaattggaaaaaaacaaccacttgcaatcattcaataaccctgaagaatttggttcctgagtgtacaaactcagagcccggaagccaagaagggtccttggcctgcacggtctgtagttgactccaagtctctgtgagcagtgacttgaaccaaacacaccaggaataatccattctttggggcctctttccaactcgaggttgttttctttcaagatactctaatcagccatagaatttagtgtaaatatttttttttccaaatagatatcatattcaaaaaaggcagcattcaaattatatagaatctagtttttaaaatcagcacagatcttcttaaaaactgtgaactatgttttgaaatactcgttactaaagctgtttataaaccacaggtgccataagatccccaaacggactaaagttatctctgctcttccatggtcttgttcctctcgttttggctttaggaagcatgtctttaacagcaccgctcgttcacaagttcccccatcaagttgtttggaggccttcagctttaaatgtacaggcttaaagtgcgcttgcaaacgtttgctctcctttttttctgaatgttgattgccttagctggccacctggtgttctgcatgtagccttctgtggtcatgtgaaaggagacaggctcttctaagttgagttgggatttttgcactcagtgaaaagctgaagtgcaaaagagctatcaaagacaagaggataaaagactgggatagtcttttccaaggaccctctttagagggccctaaagacctcctttgggaattctggggaaaaagaaaaagtaatcttctacttgcttcaagatttgatttttttaaaaaagcctgcgacctattcaatacattatgcttaaattagcagtttctctggaattcctgtctctcctttaaaagaaaggagagaacattttagaacaatagttctcaaagtgtgttccccggacaagcagcatctgcaacacttaggaaggtcttcgaaatactaatttgtaagccccacctcaggcctactgaatcagaagctctgggggttgggtccagaagtctgttttagtcaaccctctaggtgattctgatgctcgctaaaggttgagaactactgctttagaatgaagtcgtataataaagtctctgaaaaggccttattcagaataagcaagaaaggttctgtgattcacttttgcttctggggctggcaaaaaccttctctgaacccacacaccaagttcgtagttggtaggtgcccagccaagtcctgacatcttcatgccccctctgcagagggcggctgtacgatgttcacatgtctgcgtttggtcagacatcatctccttggctgccctttgaaaccaaatcacttgccttggggataaagtgctcaattggcattagtgagaagcccatcctatcccttgacatacttaatcatatatctctccagagaactcacctgacaaatgtctctgagcacaggctgacaccaaagtggcacaactgcacagttctcagatttctttgcacagattgatttttattgcgggttttgttggggtgtcttaatgttcatctcttttccactgcccatcctctgtgaacccatacctctctagatggagcaggtggccactggtgcctcatactcagtattgaaaaccactacatcccagctacctataatgctgtcagctcaaaatcatagccaggtagttcttgaactcagaacttaaatcctgcacgtggcactccaccactgactggaccgagctggcatatgttgtttctttgtgtttctacatcaaaatgttcgtctaagatttgaactgttctgctgataaccttccccgttgtcatagctatttcattgccaaccaactccatcacatggttgttgatatcgtcatataaagccattgcaaggactctggaaactgccgccaatgaccaatttctgactaaccagccaccttttctctctcttagctccacgtcagcactgagaccagactcgagcacccctgtcctgtaagcgagacaaaatggcgtgtgttattttggggttttgtgttttttggtgggtttctttccttggctctccagatttacttttggggcctgttctaagtgcaaacccagcaagtttcacttgtcctgtccattagatacaactacatcttgcgggggttgtttctttcttgttccacaatgaattgcacatccatctccatcagagctgatagcctgttaataagcactggtctaacacagccaaccctcctccacagcgccatattaatggaggaggggaggaaggtgaaatctactgcatgggattcaggaaacagttgtggttggtcaggacggaagttggggtaagtttggttggtcagagggagttgtgctggagattgtgaaaaatgggttcttgaatgatctactataaggcagggaaggttcatttgtaagtagtaatgtgaactgaattgcattaagagtgtgtggcctttgttgtgatatactatgtattttcttatatgcatgagccaaactgttgcatcataatttagcactgatgtctgcttttattttgatcatctttgtccacccttattagttcttggctgttaaccgtagatagatcttgtaaatccagcaacctttggttgctgcattccccttggttcgattccacgcaaggagccacaagtgagaactccactgtccttagaagaaagggcatttttacttttgaaccaaaaagagaaaaaaaaatcagaagtgttgcatcttgaggcgaattaactgtaagacatttttaattatgactactgcaatttgacaccatttgaaataatcaattcagagacactaaagatttcacaatattcattggtattgtaaaaaaaaaatactattgtatggatttttgtattgctgttaagtattgttttgtgtgtgtgtgtgtgtgtgtgtgttggaacctcctggggacatgttatattttgaagtgattaaactatttaattgtgtgtctatattttggagtggaataatttcttcattaaaaaatgtttttaaaaacactatatcttgggtggtttattcctttgtttcagtgaatctttcctaaagcaacgtggagtcagtctgttgaaagaaggaaggcaggtacttgcagtttaaagcaggacccattgatggaatattgagccaccgaggcaaaatagctcaccttctcttgccttgggggatgcatggtttttaccattctactgttttattagcatctgtgagcatctaatagaaatactattctgctatttatggaaatccttattataattgatatggaagtgagtttgaaattctaacagctaacatatttcatgtttgtatcacacactgttcttaacactttatgtgacttcactcaattctttgaatcctctgcatctagccatgtattctgcaaatattaagtgctcaatggtttttttgttgaattactgaataaatgaattagtggtg

SEQ ID NO: 9095 - DNA, 6343 bp, Homo sapiens
  source 1..6343: mol_type = unassigned DNA
aatgattgaagatagtgggaaaagaggaaataccatggcagaaagaagacagctgtttgcagagatgagggctcaagatctggatcgcatccgactctccacctacagaacagcatgcaagcttaggtttgttcagaagaaatgcaatttgcacctggtggacatatggaatgtcatagaagcattgcgggaaaatgctctgaacaacctggacccaaacactgaactcaacgtgtcccgcttagaggctgtgctctccactattttttaccagctcaacaaacggatgccaaccactcaccaaatccatgtggagcagtccatcagcctcctccttaacttcctgcttgcagcgtttgatccggaaggccatggtaaaatttcagtatttgctgtcaaaatggctttagccacattgtgtggagggaagatcatggacaaattaagatatattttctcaatgatttctgactccagtggggtgatggtttatggacgatatgaccaattccttcgggaagttctcaaactacccacggcagtttttgaaggtccttcatttggttacacagaacagtcagccagatcctgtttctcccaacagaaaaaagtcacgttaaatggtttcttggacacgcttatgtcagatcctcccccgcagtgtctggtctggttgcctcttctgcatcgactagcaaatgtggaaaatgtcttccatccggttgagtgttcctactgccacagtgagagtatgatgggatttcgctaccgatgccaacagtgtcacaattaccagctctgtcaggactgcttctggaggggacatgccggtggttctcatagcaaccagcaccaaatgaaagagtacacgtcatggaaatcacctgctaagaagctgactaatgcattaagcaagtccctgagctgtgcttccagccgtgaacctttgcaccccatgttcccagatcagcctgagaagccactcaacttggctcacatcgtttgttttaggcctcccagacctgtaaccagcatgaacgacaccctgttctcccactctgttccctcctcaggaagtccttttattaccaggagctctcctcccaaggacagtgaagtagagcagaacaaactgctggctagggctgctccagcttttctgaagggcaaagggatacagtacagcctgaatgtggcagacaggctagctgatgaacatgttctcatcgggttgtatgtcaacatgctccggaacaacccctcatgcatgcttgagagttcaaaccggcttgatgaagaacacaggctaattgccaggtatgcggcaaggctggcagcagagtcctcttcgtctcagccacctcagcagagaagtgctcctgacatctctttcaccatcgatgcgaataagcagcaaaggcagctgattgctgagctagaaaacaagaacagagaaatcttacaggagatccagagacttcggctagagcatgaacaagcttctcagcccacgccagagaaggcacagcaaaaccccaccctgctggcagaactccggctcctcagacagcgcaaagatgagctggaacagagaatgtctgctctccaggagagccggagagagctaatggtccagttggagggtctcatgaagctactaaagactcagggggcaggctctccccgctcctcccccagccacaccatcagcaggccaattcccatgcccatccggtcagcgtcagcctgctccaccccgacgcacacgccgcaggactccctcacaggagtagggggagatgtacaagaggcatttgcacaaagttcaagaagaaacttaaggaatgacttgctagtggctgcagattccatcactaacactatgtcctctcttgtgaaagagctgaattctgaggttgggagtgaaacagagagtaatgtggattctgaatttgcacggactcagtttgaggatcttgttccctcaccaacctctgaaaaggcttttctagcgcaaatccatgcccgaaaacctgggtacattcacagtggagctaccacaagtaccatgcgtggcgacatggttacggaggatgcagatccctatgtgcagcctgaagatgaaaactatgaaaatgactctgtccggcagctggagaatgagctccagatggaggaatacctgaaacagaagctgcaagatgaagcttatcaggtcagcttgcaaggttgaatgcaatatccttttatcacactcctctcaagcaagctatagtcagacagatgatgaaagtaacatgaaaactggtgatgatggagagccctgtggccacacagaggaggaagacagcagcctggcagcagcctcaccgaagagaggaaccaccacacccagcagctcctgacagacccccacccctaaagatgtgtcctgatgactatagtgcagctaactttttgttctcagatttgtagtgcataggtgtgtgtttcaagaaggaaaaaaaaagacttctgttcaaagttaacttatcagctacatcctctgtaacgtggttcatccctggttaaaaagcaaacaaacacaggctgaaaacccatgctgctgttatacacaatggcagtattaacaagcattttaaacctttgcacatgatattgaacctgttcagtttacaatgacaatattaatactgtttatagctagaagtttgatttctgaattctttgagattttagcaaaacagtttattatacactgtacatttttttcacagcaattggaaaaaaacaaccacttgcaatcattcaataaccctgaagaatttggttcctgagtgtacaaactcagagcccggaagccaagaagggtccttggcctgcacggtctgtagttgactccaagtctctgtgagcagtgacttgaaccaaacacaccaggaataatccattctttggggcctctttccaactcgaggttgttttctttcaagatactctaatcagccatagaatttagtgtaaatatttttttttccaaatagatatcatattcaaaaaaggcagcattcaaattatatagaatctagtttttaaaatcagcacagatcttcttaaaaactgtgaactatgttttgaaatactcgttactaaagctgtttataaaccacaggtgccataagatccccaaacggactaaagttatctctgctcttccatggtcttgttcctctcgttttggctttaggaagcatgtctttaacagcaccgctcgttcacaagttcccccatcaagttgtttggaggccttcagctttaaatgtacaggcttaaagtgcgcttgcaaacgtttgctctcctttttttctgaatgttgattgccttagctggccacctggtgttctgcatgtagccttctgtggtcatgtgaaaggagacaggctcttctaagttgagttgggatttttgcactcagtgaaaagctgaagtgcaaaagagctatcaaagacaagaggataaaagactgggatagtcttttccaaggaccctctttagagggccctaaagacctcctttgggaattctggggaaaaagaaaaagtaatcttctacttgcttcaagatttgatttttttaaaaaagcctgcgacctattcaatacattatgcttaaattagcagtttctctggaattcctgtctctcctttaaaagaaaggagagaacattttagaacaatagttctcaaagtgtgttccccggacaagcagcatctgcaacacttaggaaggtcttcgaaatactaatttgtaagccccacctcaggcctactgaatcagaagctctgggggttgggtccagaagtctgttttagtcaaccctctaggtgattctgatgctcgctaaaggttgagaactactgctttagaatgaagtcgtataataaagtctctgaaaaggccttattcagaataagcaagaaaggttctgtgattcacttttgcttctggggctggcaaaaaccttctctgaacccacacaccaagttcgtagttggtaggtgcccagccaagtcctgacatcttcatgccccctctgcagagggcggctgtacgatgttcacatgtctgcgtttggtcagacatcatctccttggctgccctttgaaaccaaatcacttgccttggggataaagtgctcaattggcattagtgagaagcccatcctatcccttgacatacttaatcatatatctctccagagaactcacctgacaaatgtctctgagcacaggctgacaccaaagtggcacaactgcacagttctcagatttctttgcacagattgatttttattgcgggttttgttggggtgtcttaatgttcatctcttttccactgcccatcctctgtgaacccatacctctctagatggagcaggtggccactggtgcctcatactcagtattgaaaaccactacatcccagctacctataatgctgtcagctcaaaatcatagccaggtagttcttgaactcagaacttaaatcctgcacgtggcactccaccactgactggaccgagctggcatatgttgtttctttgtgtttctacatcaaaatgttcgtctaagatttgaactgttctgctgataaccttccccgttgtcatagctatttcattgccaaccaactccatcacatggttgttgatatcgtcatataaagccattgcaaggactctggaaactgccgccaatgaccaatttctgactaaccagccaccttttctctctcttagctccacgtcagcactgagaccagactcgagcacccctgtcctgtaagcgagacaaaatggcgtgtgttattttggggttttgtgttttttggtgggtttctttccttggctctccagatttacttttggggcctgttctaagtgcaaacccagcaagtttcacttgtcctgtccattagatacaactacatcttgcgggggttgtttctttcttgttccacaatgaattgcacatccatctccatcagagctgatagcctgttaataagcactggtctaacacagccaaccctcctccacagcgccatattaatggaggaggggaggaaggtgaaatctactgcatgggattcaggaaacagttgtggttggtcaggacggaagttggggtaagtttggttggtcagagggagttgtgctggagattgtgaaaaatgggttcttgaatgatctactataaggcagggaaggttcatttgtaagtagtaatgtgaactgaattgcattaagagtgtgtggcctttgttgtgatatactatgtattttcttatatgcatgagccaaactgttgcatcataatttagcactgatgtctgcttttattttgatcatctttgtccacccttattagttcttggctgttaaccgtagatagatcttgtaaatccagcaacctttggttgctgcattccccttggttcgattccacgcaaggagccacaagtgagaactccactgtccttagaagaaagggcatttttacttttgaaccaaaaagagaaaaaaaaatcagaagtgttgcatcttgaggcgaattaactgtaagacatttttaattatgactactgcaatttgacaccatttgaaataatcaattcagagacactaaagatttcacaatattcattggtattgtaaaaaaaaaatactattgtatggatttttgtattgctgttaagtattgttttgtgtgtgtgtgtgtgtgtgtgtgttggaacctcctggggacatgttatattttgaagtgattaaactatttaattgtgtgtctatattttggagtggaataatttcttcattaaaaaatgtttttaaaaacactatatcttgggtggtttattcctttgtttcagtgaatctttcctaaagcaacgtggagtcagtctgttgaaagaaggaaggcaggtacttgcagtttaaagcaggacccattgatggaatattgagccaccgaggcaaaatagctcaccttctcttgccttgggggatgcatggtttttaccattctactgttttattagcatctgtgagcatctaatagaaatactattctgctatttatggaaatccttattataattgatatggaagtgagtttgaaattctaacagctaacatatttcatgtttgtatcacacactgttcttaacactttatgtgacttcactcaattctttgaatcctctgcatctagccatgtattctgcaaatattaagtgctcaatggtttttttgttgaattactgaataaatgaattagtggtg

SEQ ID NO: 9096 - DNA, 6343 bp, Homo sapiens
  source 1..6343: mol_type = unassigned DNA
aatgattgaagatagtgggaaaagaggaaataccatggcagaaagaagacagctgtttgcagagatgagggctcaagatctggatcgcatccgactctccacctacagaacagcatgcaagcttaggtttgttcagaagaaatgcaatttgcacctggtggacatatggaatgtcatagaagcattgcgggaaaatgctctgaacaacctggacccaaacactgaactcaacgtgtcccgcttagaggctgtgctctccactattttttaccagctcaacaaacggatgccaaccactcaccaaatccatgtggagcagtccatcagcctcctccttaacttcctgcttgcagcgtttgatccggaaggccatggtaaaatttcagtatttgctgtcaaaatggctttagccacattgtgtggagggaagatcatggacaaattaagatatattttctcaatgatttctgactccagtggggtgatggtttatggacgatatgaccaattccttcgggaagttctcaaactacccacggcagtttttgaaggtccttcatttggttacacagaacagtcagccagatcctgtttctcccaacagaaaaaagtcacgttaaatggtttcttggacacgcttatgtcagatcctcccccgcagtgtctggtctggttgcctcttctgcatcgactagcaaatgtggaaaatgtcttccatccggttgagtgttcctactgccacagtgagagtatgatgggatttcgctaccgatgccaacagtgtcacaattaccagctctgtcaggactgcttctggaggggacatgccggtggttctcatagcaaccagcaccaaatgaaagagtacacgtcatggaaatcacctgctaagaagctgactaatgcattaagcaagtccctgagctgtgcttccagccgtgaacctttgcaccccatgttcccagatcagcctgagaagccactcaacttggctcacatcgttgatacttggcctcccagacctgtaaccagcatgaacgacaccctgttctcccactctgttccctcctcaggaagtccttttattaccaggagctctcctcccaaggacagtgaagtagagcagaacaaactgctggctagggctgctccagcttttctgaagggcaaagggatacagtacagcctgaatgtggcagacaggctagctgatgaacatgttctcatcgggttgtatgtcaacatgctccggaacaacccctcatgcatgcttgagagttcaaaccggcttgatgaagaacacaggctaattgccaggtatgcggcaaggctggcagcagagtcctcttcgtctcagccacctcagcagagaagtgctcctgacatctctttcaccatcgatgcgaataagcagcaaaggcagctgattgctgagctagaaaacaagaacagagaaatcttacaggagatccagagacttcggctagagcatgaacaagcttctcagcccacgccagagaaggcacagcaaaaccccaccctgctggcagaactccggctcctcagacagcgcaaagatgagctggaacagagaatgtctgctctccaggagagccggagagagctaatggtccagttggagggtctcatgaagctactaaagactcagggggcaggctctccccgctcctcccccagccacaccatcagcaggccaattcccatgcccatccggtcagcgtcagcctgctccaccccgacgcacacgccgcaggactccctcacaggagtagggggagatgtacaagaggcatttgcacaaagttcaagaagaaacttaaggaatgacttgctagtggctgcagattccatcactaacactatgtcctctcttgtgaaagagctgaattctgaggttgggagtgaaacagagagtaatgtggattctgaatttgcacggactcagtttgaggatcttgttccctcaccaacctctgaaaaggcttttctagcgcaaatccatgcccgaaaacctgggtacattcacagtggagctaccacaagtaccatgcgtggcgacatggttacggaggatgcagatccctatgtgcagcctgaagatgaaaactatgaaaatgactctgtccggcagctggagaatgagctccagatggaggaatacctgaaacagaagctgcaagatgaagcttatcaggtcagcttgcaaggttgaatgcaatatccttttatcacactcctctcaagcaagctatagtcagacagatgatgaaagtaacatgaaaactggtgatgatggagagccctgtggccacacagaggaggaagacagcagcctggcagcagcctcaccgaagagaggaaccaccacacccagcagctcctgacagacccccacccctaaagatgtgtcctgatgactatagtgcagctaactttttgttctcagatttgtagtgcataggtgtgtgtttcaagaaggaaaaaaaaagacttctgttcaaagttaacttatcagctacatcctctgtaacgtggttcatccctggttaaaaagcaaacaaacacaggctgaaaacccatgctgctgttatacacaatggcagtattaacaagcattttaaacctttgcacatgatattgaacctgttcagtttacaatgacaatattaatactgtttatagctagaagtttgatttctgaattctttgagattttagcaaaacagtttattatacactgtacatttttttcacagcaattggaaaaaaacaaccacttgcaatcattcaataaccctgaagaatttggttcctgagtgtacaaactcagagcccggaagccaagaagggtccttggcctgcacggtctgtagttgactccaagtctctgtgagcagtgacttgaaccaaacacaccaggaataatccattctttggggcctctttccaactcgaggttgttttctttcaagatactctaatcagccatagaatttagtgtaaatatttttttttccaaatagatatcatattcaaaaaaggcagcattcaaattatatagaatctagtttttaaaatcagcacagatcttcttaaaaactgtgaactatgttttgaaatactcgttactaaagctgtttataaaccacaggtgccataagatccccaaacggactaaagttatctctgctcttccatggtcttgttcctctcgttttggctttaggaagcatgtctttaacagcaccgctcgttcacaagttcccccatcaagttgtttggaggccttcagctttaaatgtacaggcttaaagtgcgcttgcaaacgtttgctctcctttttttctgaatgttgattgccttagctggccacctggtgttctgcatgtagccttctgtggtcatgtgaaaggagacaggctcttctaagttgagttgggatttttgcactcagtgaaaagctgaagtgcaaaagagctatcaaagacaagaggataaaagactgggatagtcttttccaaggaccctctttagagggccctaaagacctcctttgggaattctggggaaaaagaaaaagtaatcttctacttgcttcaagatttgatttttttaaaaaagcctgcgacctattcaatacattatgcttaaattagcagtttctctggaattcctgtctctcctttaaaagaaaggagagaacattttagaacaatagttctcaaagtgtgttccccggacaagcagcatctgcaacacttaggaaggtcttcgaaatactaatttgtaagccccacctcaggcctactgaatcagaagctctgggggttgggtccagaagtctgttttagtcaaccctctaggtgattctgatgctcgctaaaggttgagaactactgctttagaatgaagtcgtataataaagtctctgaaaaggccttattcagaataagcaagaaaggttctgtgattcacttttgcttctggggctggcaaaaaccttctctgaacccacacaccaagttcgtagttggtaggtgcccagccaagtcctgacatcttcatgccccctctgcagagggcggctgtacgatgttcacatgtctgcgtttggtcagacatcatctccttggctgccctttgaaaccaaatcacttgccttggggataaagtgctcaattggcattagtgagaagcccatcctatcccttgacatacttaatcatatatctctccagagaactcacctgacaaatgtctctgagcacaggctgacaccaaagtggcacaactgcacagttctcagatttctttgcacagattgatttttattgcgggttttgttggggtgtcttaatgttcatctcttttccactgcccatcctctgtgaacccatacctctctagatggagcaggtggccactggtgcctcatactcagtattgaaaaccactacatcccagctacctataatgctgtcagctcaaaatcatagccaggtagttcttgaactcagaacttaaatcctgcacgtggcactccaccactgactggaccgagctggcatatgttgtttctttgtgtttctacatcaaaatgttcgtctaagatttgaactgttctgctgataaccttccccgttgtcatagctatttcattgccaaccaactccatcacatggttgttgatatcgtcatataaagccattgcaaggactctggaaactgccgccaatgaccaatttctgactaaccagccaccttttctctctcttagctccacgtcagcactgagaccagactcgagcacccctgtcctgtaagcgagacaaaatggcgtgtgttattttggggttttgtgttttttggtgggtttctttccttggctctccagatttacttttggggcctgttctaagtgcaaacccagcaagtttcacttgtcctgtccattagatacaactacatcttgcgggggttgtttctttcttgttccacaatgaattgcacatccatctccatcagagctgatagcctgttaataagcactggtctaacacagccaaccctcctccacagcgccatattaatggaggaggggaggaaggtgaaatctactgcatgggattcaggaaacagttgtggttggtcaggacggaagttggggtaagtttggttggtcagagggagttgtgctggagattgtgaaaaatgggttcttgaatgatctactataaggcagggaaggttcatttgtaagtagtaatgtgaactgaattgcattaagagtgtgtggcctttgttgtgatatactatgtattttcttatatgcatgagccaaactgttgcatcataatttagcactgatgtctgcttttattttgatcatctttgtccacccttattagttcttggctgttaaccgtagatagatcttgtaaatccagcaacctttggttgctgcattccccttggttcgattccacgcaaggagccacaagtgagaactccactgtccttagaagaaagggcatttttacttttgaaccaaaaagagaaaaaaaaatcagaagtgttgcatcttgaggcgaattaactgtaagacatttttaattatgactactgcaatttgacaccatttgaaataatcaattcagagacactaaagatttcacaatattcattggtattgtaaaaaaaaaatactattgtatggatttttgtattgctgttaagtattgttttgtgtgtgtgtgtgtgtgtgtgtgttggaacctcctggggacatgttatattttgaagtgattaaactatttaattgtgtgtctatattttggagtggaataatttcttcattaaaaaatgtttttaaaaacactatatcttgggtggtttattcctttgtttcagtgaatctttcctaaagcaacgtggagtcagtctgttgaaagaaggaaggcaggtacttgcagtttaaagcaggacccattgatggaatattgagccaccgaggcaaaatagctcaccttctcttgccttgggggatgcatggtttttaccattctactgttttattagcatctgtgagcatctaatagaaatactattctgctatttatggaaatccttattataattgatatggaagtgagtttgaaattctaacagctaacatatttcatgtttgtatcacacactgttcttaacactttatgtgacttcactcaattctttgaatcctctgcatctagccatgtattctgcaaatattaagtgctcaatggtttttttgttgaattactgaataaatgaattagtggtg

SEQ ID NO: 9097 - DNA, 1787 bp, Homo sapiens
  source 1..1787: mol_type = unassigned DNA
ggaatatcaaggatggtggcagaattaaagggcaaacttaccttccatcccaggtctagtattcagtcccccttcctcccactctccaccctactgcgtgctcttacttattctgttggaacccagtgtagcttcctgagatttaaaatataggaagactcaaaactatgttacttcttggaatatagataattcagtactgatttaaataacaactgaatagcaaggaccttctggaacataatcttacattcacaaaatcacctgctaagaagctgactaatgcattaagcaagtccctgagctgtgcttccagccgtgaacctttgcaccccatgttcccagatcagcctgagaagccactcaacttggctcacatcgtgcctcccagacctgtaaccagcatgaacgacaccctgttctcccactctgttccctcctcaggaagtccttttattaccaggagctctcctcccaaggacagtgaagtagagcagaacaaactgctggctagggctgctccagcttttctgaagggcaaaggcatgcttgagagttcaaaccggcttgatgaagaacacaggctaattgccaggtatgcggcaaggctggcagcagagtcctcttcgtctcagccacctcagcagagaagtgctcctgacatctctttcaccatcgatgcgaataagcagcaaaggcagctgattgctgagctagaaaacaagaacagagaaatcttacaggagatccagagacttcggctagagcatgaacaagcttctcagcccacgccagagaaggcacagcaaaaccccaccctgctggcagaactccggctcctcagacagcgcaaagatgagctggaacagagaatgtctgctctccaggagagccggagagagctaatggtccagttggagggtctcatgaagctactaaagactcagggggcaggctctccccgctcctcccccagccacaccatcagcaggccaattcccatgcccatccggtcagcgtcagcctgctccaccccgacgcacacgccgcaggactccctcacaggagtagggggagatgtacaagaggcatttgcacaaagttcaagaagaaacttaaggaatgacttgctagtggctgcagattccatcactaacactatgtcctctcttgtgaaagagctgaattctgaggttgggagtgaaacagagagtaatgtggattctgaatttgcacggactcagtttgaggatcttgttccctcaccaacctctgaaaaggcttttctagcgcaaatccatgcccgaaaacctgggtacattcacagtggagctaccacaagtaccatgcgtggcgacatggttacggaggatgcagatccctatgtgcagcctgaagatgaaaactatgaaaatgactctgtccggcagctggagaatgagctccagatggaggaatacctgaaacagaagctgcaagatgaagcttatcaggtcagcttgcaaggttgaatgcaatatccttttatcacactcctctcaagcaagctatagtcagacagatgatgaaagtaacatgaaaactggtgatgatggagagccctgtggccacacagaggaggaagacagcagcctggcagcagcctcaccgaagagaggaaccaccacacccagcagctcctgacagacccccacccctaaagatgtgtcctgatgactatagtgcagctaactttttgttctcagatttgtagtgcataggtgtgtgtttcaagaaggaaaaaaaaa

SEQ ID NO: 9098 - DNA, 1680 bp, Homo sapiens; identical to SEQ ID NO: 9076
  source 1..1680: mol_type = unassigned DNA

SEQ ID NO: 9099 - DNA, 2365 bp, Homo sapiens
  source 1..2365: mol_type = unassigned DNA
gggcgcgcgcccgcccatccgccctccgccctccgccctcgcgccctcgcgccgggggcgggcgctgcgcgtgccgggcggagaagcggcgcgagccgggcgctgcgaacgttcgccgcgggggtggctccggggcctgagtaggcgctgccgctgcctcagccgagggggctgggccggagcgtgcggaggagtgaggccgcaggagaccttcccgacgacccctgctccggcggggaagtgagcaaggatgattgaggaaagtgggaacaagcggaagaccatggcagagaagaggcagctgttcatagaaatgcgtgctcagaattttgatgtcatacgactatcaacttacagaacagcctgcaaattacgatttgtacaaaaacgatgcaaccttcatcttgttgatatctggaacatgattgaagccttccgagacaatggccttaatacactggaccataccaccgagatcagtgtgtcccgcctcgaaactgtcatctcctccatctactatcagttgaacaagcgccttccttctactcaccaaattagtgtggaacaatctatcagcctcctcctcaactttatgattgctgcatatgacagtgagggccgaggcaagttgacggtattttcagttaaagctatgttagcaaccatgtgtggtggaaaaatgctggacaaattgagatatgttttctcccagatgtcagattccaatggcttaatgatatttagcaagtttgaccagtttctgaaggaagttctgaagctcccaacagctgtctttgaagggccatcttttggttacacagagcactcagtccgcacctgttttccacagcagagaaagataatgctaaatatgtttttagacacaatgatggctgaccctcctccccagtgccttgtctggctacctctcatgcacaggcttgcccatgttgagaatgtcttccatcccgtggagtgctcctactgccgatgtgagagtatgatgggtttccggtaccgatgccagcagtgccacaactatcagctctgccagaattgcttttggcgtggccatgccggcggccctcacagcaaccagcaccagatgaaggagcattcctcttggaaatctcctgcaaagaagctgagccatgcaattagtaaatctttggggtgtgtacccacgagagaacccccgcatcctgtttttcctgagcaaccagagaaaccacttgaccttgcacatatagttcctcctcgccctctgactaatatgaatgacaccatggttagccacatgtcctctggagtgcccactcccaccaagaggttacagtatagccaggatatacccagtcacttggccgatgagcatgcgctgatagcctcctatgtggcccgtctgcagcactgtgcacgtgttctggacagtcctagccgactggatgaggaacaccgtcttatagctcgctatgctgcccggctggctgcagaagcaggaaacgtgactcgtcctcccactgacttgagctttaactttgatgccaacaaacaacaaagacagcttattgcagaactggaaaacaaaaacagagagatcctgcaggagattcagcgtctccgcctggaacacgagcaggcctcccagcccacccctgagaaggcacagcagaaccccacgctgctggcagagctgcggctgctgaggcaaaggaaggatgaactggagcagaggatgtcggccctgcaggagagcaggcgggagctgatggtccagctggaagagctgatgaagttgctgaaggaagctgaggcacgagaatcagctcaggccacagggtcaccacatacatcgcccacccatggaggcggccggccaatgcccatgccagtgcgctccacgtctgccggctccacccccacccactgtccgcaggactcgctgagcggagtcgggggagacgtgcaggaggccttcgcacaagcagaggaaggtgcagaggaagaagaagagaagatgcagaatgggaaagacagaggttagcagaggagccggacacagaggaagctcaggcacagaggacgaggagcaagctggcgccgacatggcgaaggcaaggtcttcccccagaggcacattcctctccatctttccaccgcacacctggaccaggcttgcaggctgccagacgtcactccacccgccagggagaggggagccagagccggtgggaagcggggaggggctgcgtggcacagctagtgggcctccccctgcacagccctgcatgtactagcaccttcatcactcccctcagggcatggtctcatctccgcatcaggaattcacctggaggttgaaaag

SEQ ID NO: 9100 - DNA, 822 bp, Homo sapiens
  source 1..822: mol_type = unassigned DNA
attcaagttgagaattggatggggacacagccaaaccgtatcagggattaatacctgatttctttaatatgaaattgaatattcatgtatattttatgtataagctaactgttcttatgtcctttattacagcctttcattacatttattttctaaattatatttagtaacatgtttatccatataaaacagtagagatatgggaagttacctcaactaatccaggactctgcagagaaaataatcaaagttagaagatgattgaggaaagtgggaacaagcggaagaccatggcagagaagaggcagctgttcatagaaatgcgtgctcagaattttgatgtcatacgactatcaacttacagaacagcctgcaaattacgatttgtacaaaaacgatgcaaccttcatcttgttgatatctggaacatgattgaagccttccgagacaatggccttaatacactggaccataccaccgagatcagtgtgtcccgcctcgaaactgtcatctcctccatctactatcagttgaacaagcgccttccttctactcaccaaattagtgtggaacaatctatcagcctcctcctcaactttatgattgctgcatatgacagtgagggccgaggcaagttgacggtattttcagttaaagctatgttagcaaccatgtgtggtggaaaaatgctggacaaattgagatatgttttctcccagatgtcagattccaatggcttaatgatatttagcaagtttgaccagtttctgaaggaagttctgaagctcccaacagctgtctttgaagggccatcttttggtt

SEQ ID NO: 9101 - DNA, 565 bp, Homo sapiens
  source 1..565: mol_type = unassigned DNA
agatcaccccaaatcactgtttcccgaggcgcctaatagcgaacctgtccaggaggtcaccctggacaggaaagaagtgtcccgagacgaggatgccggtgacgaatacttgcccttaaattcctgtgccaggccttgggattaggaagaccttccagctaccgtaggatgattgaggaaagtgggaacaagcggaagaccatggcagagaagaggcagctgttcatagaaatgcgtgctcagaattttgatgtcatacgactatcaacttacagaacagcctgcaaattacgatttgtacaaaaacgatgcaaccttcatcttgttgatatctggaacatgattgaagccttccgagacaatggccttaatacactggaccataccaccgagatcagtgtgtcccgcctcgaaactgtcatctcctccatctactatcagttgaacaagcgccttccttctactcaccaaattagtgtggaacaatctatcagcctcctcctcaactttatgattgctgcatatgacagtgagggccgaggcaagttgacggtattttcagtta

SEQ ID NO: 9102 - DNA, 2160 bp, Homo sapiens
  source 1..2160: mol_type = unassigned DNA
agcggcgcgagccgggcgctgcgaacgttcgccgcgggggtggctccggggcctgagtaggcgctgccgctgcctcagccgagggggctgggccggagcgtgcggaggagtgaggccgcaggagaccttcccgacgacccctgctccggcggggaagtgagcaaggatgattgaggaaagtgggaacaagcggaagaccatggcagagaagaggcagctgttcatagaaatgcgtgctcagaattttgatgtcatacgactatcaacttacagaacagcctgcaaattacgatttgtacaaaaacgatgcaaccttcatcttgttgatatctggaacatgattgaagccttccgagacaatggccttaatacactggaccataccaccgagatcagtgtgtcccgcctcgaaactgtcatctcctccatctactatcagttgaacaagcgccttccttctactcaccaaattagtgtggaacaatctatcagcctcctcctcaactttatgattgctgcatatgacagtgagggccgaggcaagttgacggtattttcagttaaagctatgttagcaaccatgtgtggtggaaaaatgctggacaaattgagatagaaagataatgctaaatatgtttttagacacaatgatggctgaccctcctccccagtgccttgtctggctacctctcatgcacaggcttgcccatgttgagaatgtcttccatcccgtggagtgctcctactgccgatgtgagagtatgatgggtttccggtaccgatgccagcagtgccacaactatcagctctgccagaattgcttttggcgtggccatgccggcggccctcacagcaaccagcaccagatgaaggagcattcctcttggaaatctcctgcaaagaagctgagccatgcaattagtaaatctttggggtgtgtacccacgagagaacccccgcatcctgtttttcctgagcaaccagagaaaccacttgaccttgcacatatagttcctcctcgccctctgactaatatgaatgacaccatggttagccacatgtcctctggagtgcccactcccaccaagaggttacagtatagccaggatatacccagtcacttggccgatgagcatgcgctgatagcctcctatgtggcccgtctgcagcactgtgcacgtgttctggacagtcctagccgactggatgaggaacaccgtcttatagctcgctatgctgcccggctggctgcagaagcaggaaacgtgactcgtcctcccactgacttgagctttaactttgatgccaacaaacaacaaagacagcttattgcagaactggaaaacaaaaacagagagatcctgcaggagattcagcgtctccgcctggaacacgagcaggcctcccagcccacccctgagaaggcacagcagaaccccacgctgctggcagagctgcggctgctgaggcaaaggaaggatgaactggagcagaggatgtcggccctgcaggagagcaggcgggagctgatggtccagctggaagagctgatgaagttgctgaaggctcaggccacagggtcaccacatacatcgcccacccatggaggcggccggccaatgcccatgccagtgcgctccacgtctgccggctccacccccacccactgtccgcaggactcgctgagcggagtcgggggagacgtgcaggaggccttcgcacaaggtacgaggagaaacctccgcaatgacctgctggtggcagctgactccatcaccaacaccatgtcatccctggtgaaggagctccattcaggttagcagaggagccggacacagaggaagctcaggcacagaggacgaggagcaagctggcgccgacatggcgaaggcaaggtcttcccccagaggcacattcctctccatctttccaccgcacacctggaccaggcttgcaggctgccagacgtcactccacccgccagggagaggggagccagagccggtgggaagcggggaggggctgcgtggcacagctagtgggcctccccctgcacagccctgcatgtactagcaccttcatcactcccctcagggcatggtctcatctccgcatcaggaattcacctggaggttgaaaagagaaaagaaaaagcaccaa

SEQ ID NO: 9103 - DNA, 2384 bp, Homo sapiens
  source 1..2384: mol_type = unassigned DNA
gggcgcgcgcccgcccatccgccctccgccctccgccctcgcgccctcgcgccgggggcgggcgctgcgcgtgccgggcggagaagcggcgcgagccgggcgctgcgaacgttcgccgcgggggtggctccggggcctgagtaggcgctgccgctgcctcagccgagggggctgggccggagcgtgcggaggagtgaggccgcaggagaccttcccgacgacccctgctccggcggggaagtgagcaaggatgattgaggaaagtgggaacaagcggaagaccatggcagagaagaggcagctgttcatagaaatgcgtgctcagaattttgatgtcatacgactatcaacttacagaacagcctgcaaattacgatttgtacaaaaacgatgcaaccttcatcttgttgatatctggaacatgattgaagccttccgagacaatggccttaatacactggaccataccaccgagatcagtgtgtcccgcctcgaaactgtcatctcctccatctactatcagttgaacaagcgccttccttctactcaccaaattagtgtggaacaatctatcagcctcctcctcaactttatgattgctgcatatgacagtgagggccgaggcaagttgacggtattttcagttaaagctatgttagcaaccatgtgtggtggaaaaatgctggacaaattgagatatgttttctcccagatgtcagattccaatggcttaatgatatttagcaagtttgaccagtttctgaaggaagttctgaagctcccaacagctgtctttgaagggccatcttttggttacacagagcactcagtccgcacctgttttccacagcagagaaagataatgctaaatatgtttttagacacaatgatggctgaccctcctccccagtgccttgtctggctacctctcatgcacaggcttgcccatgttgagaatgtcttccatcccgtggagtgctcctactgccgatgtgagagtatgatgggtttccggtaccgatgccagcagtgccacaactatcagctctgccagaattgcttttggcgtggccatgccggcggccctcacagcaaccagcaccagatgaaggagcattcctcttggaaatctcctgcaaagaagctgagccatgcaattagtaaatctttggggtgtgtacccacgagagaacccccgcatcctgtttttcctgagcaaccagagaaaccacttgaccttgcacatatagttcctcctcgccctctgactaatatgaatgacaccatggttagccacatgtcctctggagtgcccactcccaccaagaggttacagtatagccaggatatacccagtcacttggccgatgagcatgcgctgatagcctcctatgtggcccgtctgcagcactgtgcacgtgttctggacagtcctagccgactggatgaggaacaccgtcttatagctcgctatgctgcccggctggctgcagaagcaggaaacgtgactcgtcctcccactgacttgagctttaactttgatgccaacaaacaacaaagacagcttattgcagaactggaaaacaaaaacagagagatcctgcaggagattcagcgtctccgcctggaacacgagcaggcctcccagcccacccctgagaaggcacagcagaaccccacgctgctggcagagctgcggctgctgaggcaaaggaaggatgaactggagcagaggatgtcggccctgcaggagagcaggcgggagctgatggtccagctggaagagctgatgaagttgctgaaggaggaagagcaaaagcaggcagctcaggccacagggtcaccacatacatcgcccacccatggaggcggccggccaatgcccatgccagtgcgctccacgtctgccggctccacccccacccactgtccgcaggactcgctgagcggagtcgggggagacgtgcaggaggccttcgcacaagcagaggaaggtgcagaggaagaagaagagaagatgcagaatgggaaagacagaggttagcagaggagccggacacagaggaagctcaggcacagaggacgaggagcaagctggcgccgacatggcgaaggcaaggtcttcccccagaggcacattcctctccatctttccaccgcacacctggaccaggcttgcaggctgccagacgtcactccacccgccagggagaggggagccagagccggtgggaagcggggaggggctgcgtggcacagctagtgggcctccccctgcacagccctgcatgtactagcaccttcatcactcccctcagggcatggtctcatctccgcatcaggaattcacctggaggttgaaaagagaaaagaaaaagcaccaa

SEQ ID NO: 9104 - DNA, 2273 bp, Homo sapiens
  source 1..2273: mol_type = unassigned DNA
gggcgcgcgcccgcccatccgccctccgccctccgccctcgcgccctcgcgccgggggcgggcgctgcgcgtgccgggcggagaagcggcgcgagccgggcgctgcgaacgttcgccgcgggggtggctccggggcctgagtaggcgctgccgctgcctcagccgagggggctgggccggagcgtgcggaggagtgaggccgcaggagaccttcccgacgacccctgctccggcggggaagtgagcaaggatgattgaggaaagtgggaacaagcggaagaccatggcagagaagaggcagctgttcatagaaatgcgtgctcagaattttgatgtcatacgactatcaacttacagaacagcctgcaaattacgatttgtacaaaaacgatgcaaccttcatcttgttgatatctggaacatgattgaagccttccgagacaatggccttaatacactggaccataccaccgagatcagtgtgtcccgcctcgaaactgtcatctcctccatctactatcagttgaacaagcgccttccttctactcaccaaattagtgtggaacaatctatcagcctcctcctcaactttatgattgctgcatatgacagtgagggccgaggcaagttgacggtattttcagttaaagctatgttagcaaccatgtgtggtggaaaaatgctggacaaattgagatatgttttctcccagatgtcagattccaatggcttaatgatatttagcaagtttgaccagtttctgaaggaagttctgaagctcccaacagctgtctttgaagggccatcttttggttacacagagcactcagtccgcacctgttttccacagcagagaaagataatgctaaatatgtttttagacacaatgatggctgaccctcctccccagtgccttgtctggctacctctcatgcacaggcttgcccatgttgagaatgtcttccatcccgtggagtgctcctactgccgatgtgagagtatgatgggtttccggtaccgatgccagcagtgccacaactatcagctctgccagaattgcttttggcgtggccatgccggcggccctcacagcaaccagcaccagatgaaggagcattcctcttggaaatctcctgcaaagaagctgagccatgcaattagtaaatctttggggtgtgtacccacgagagaacccccgcatcctgtttttcctgagcaaccagagaaaccacttgaccttgcacatatagttcctcctcgccctctgactaatatgaatgacaccatggttagccacatgtcctctggagtgcccactcccaccaagagtgttctggacagtcctagccgactggatgaggaacaccgtcttatagctcgctatgctgcccggctggctgcagaagcaggaaacgtgactcgtcctcccactgacttgagctttaactttgatgccaacaaacaacaaagacagcttattgcagaactggaaaacaaaaacagagagatcctgcaggagattcagcgtctccgcctggaacacgagcaggcctcccagcccacccctgagaaggcacagcagaaccccacgctgctggcagagctgcggctgctgaggcaaaggaaggatgaactggagcagaggatgtcggccctgcaggagagcaggcgggagctgatggtccagctggaagagctgatgaagttgctgaaggctcaggccacagggtcaccacatacatcgcccacccatggaggcggccggccaatgcccatgccagtgcgctccacgtctgccggctccacccccacccactgtccgcaggactcgctgagcggagtcgggggagacgtgcaggaggccttcgcacaagcagaggaaggtgcagaggaagaagaagagaagatgcagaatgggaaagacagaggttagcagaggagccggacacagaggaagctcaggcacagaggacgaggagcaagctggcgccgacatggcgaaggcaaggtcttcccccagaggcacattcctctccatctttccaccgcacacctggaccaggcttgcaggctgccagacgtcactccacccgccagggagaggggagccagagccggtgggaagcggggaggggctgcgtggcacagctagtgggcctccccctgcacagccctgcatgtactagcaccttcatcactcccctcagggcatggtctcatctccgcatcaggaattcacctggaggttgaaaagagaaaagaaaaagcaccaa

SEQ ID NO: 9105 - DNA, 2474 bp, Homo sapiens
  source 1..2474: mol_type = unassigned DNA
gggcgcgcgcccgcccatccgccctccgccctccgccctcgcgccctcgcgccgggggcgggcgctgcgcgtgccgggcggagaagcggcgcgagccgggcgctgcgaacgttcgccgcgggggtggctccggggcctgagtaggcgctgccgctgcctcagccgagggggctgggccggagcgtgcggaggagtgaggccgcaggagaccttcccgacgacccctgctccggcggggaagtgagcaaggatgattgaggaaagtgggaacaagcggaagaccatggcagagaagaggcagctgttcatagaaatgcgtgctcagaattttgatgtcatacgactatcaacttacagaacagcctgcaaattacgatttgtacaaaaacgatgcaaccttcatcttgttgatatctggaacatgattgaagccttccgagacaatggccttaatacactggaccataccaccgagatcagtgtgtcccgcctcgaaactgtcatctcctccatctactatcagttgaacaagcgccttccttctactcaccaaattagtgtggaacaatctatcagcctcctcctcaactttatgattgctgcatatgacagtgagggccgaggcaagttgacggtattttcagttaaagctatgttagcaaccatgtgtggtggaaaaatgctggacaaattgagatatgttttctcccagatgtcagattccaatggcttaatgatatttagcaagtttgaccagtttctgaaggaagttctgaagctcccaacagctgtctttgaagggccatcttttggttacacagagcactcagtccgcacctgttttccacagcagagaaagataatgctaaatatgtttttagacacaatgatggctgaccctcctccccagtgccttgtctggctacctctcatgcacaggcttgcccatgttgagaatgtcttccatcccgtggagtgctcctactgccgatgtgagagtatgatgggtttccggtaccgatgccagcagtgccacaactatcagctctgccagaattgcttttggcgtggccatgccggcggccctcacagcaaccagcaccagatgaaggagcattcctcttggaaatctcctgcaaagaagctgagccatgcaattagtaaatctttggggtgtgtacccacgagagaacccccgcatcctgtttttcctgagcaaccagagaaaccacttgaccttgcacatatagttcctcctcgccctctgactaatatgaatgacaccatggttagccacatgtcctctggagtgcccactcccaccaagaggttacagtatagccaggatatacccagtcacttggccgatgagcatgcgctgatagcctcctatgtggcccgtctgcagcactgtgcacgtgttctggacagtcctagccgactggatgaggaacaccgtcttatagctcgctatgctgcccggctggctgcagaagcaggaaacgtgactcgtcctcccactgacttgagctttaactttgatgccaacaaacaacaaagacagcttattgcagaactggaaaacaaaaacagagagatcctgcaggagattcagcgtctccgcctggaacacgagcaggcctcccagcccacccctgagaaggcacagcagaaccccacgctgctggcagagctgcggctgctgaggcaaaggaaggatgaactggagcagaggatgtcggccctgcaggagagcaggcgggagctgatggtccagctggaagagctgatgaagttgctgaaggaggaagagcaaaagcaggcagctcaggccacagggtcaccacatacatcgcccacccatggaggcggccggccaatgcccatgccagtgcgctccacgtctgccggctccacccccacccactgtccgcaggactcgctgagcggagtcgggggagacgtgcaggaggccttcgcacaaggtacgaggagaaacctccgcaatgacctgctggtggcagctgactccatcaccaacaccatgtcatccctggtgaaggagctccattcagcagaggaaggtgcagaggaagaagaagagaagatgcagaatgggaaagacagaggttagcagaggagccggacacagaggaagctcaggcacagaggacgaggagcaagctggcgccgacatggcgaaggcaaggtcttcccccagaggcacattcctctccatctttccaccgcacacctggaccaggcttgcaggctgccagacgtcactccacccgccagggagaggggagccagagccggtgggaagcggggaggggctgcgtggcacagctagtgggcctccccctgcacagccctgcatgtactagcaccttcatcactcccctcagggcatggtctcatctccgcatcaggaattcacctggaggttgaaaagagaaaagaaaaagcaccaa

SEQ ID NO: 9106 - DNA, 2294 bp, Homo sapiens
  source 1..2294: mol_type = unassigned DNA
gggcgcgcgcccgcccatccgccctccgccctccgccctcgcgccctcgcgccgggggcgggcgctgcgcgtgccgggcggagaagcggcgcgagccgggcgctgcgaacgttcgccgcgggggtggctccggggcctgagtaggcgctgccgctgcctcagccgagggggctgggccggagcgtgcggaggagtgaggccgcaggagaccttcccgacgacccctgctccggcggggaagtgagcaaggatgattgaggaaagtgggaacaagcggaagaccatggcagagaagaggcagctgttcatagaaatgcgtgctcagaattttgatgtcatacgactatcaacttacagaacagcctgcaaattacgatttgtacaaaaacgatgcaaccttcatcttgttgatatctggaacatgattgaagccttccgagacaatggccttaatacactggaccataccaccgagatcagtgtgtcccgcctcgaaactgtcatctcctccatctactatcagttgaacaagcgccttccttctactcaccaaattagtgtggaacaatctatcagcctcctcctcaactttatgattgctgcatatgacagtgagggccgaggcaagttgacggtattttcagttaaagctatgttagcaaccatgtgtggtggaaaaatgctggacaaattgagatatgttttctcccagatgtcagattccaatggcttaatgatatttagcaagtttgaccagtttctgaaggaagttctgaagctcccaacagctgtctttgaagggccatcttttggttacacagagcactcagtccgcacctgttttccacagcagagaaagataatgctaaatatgtttttagacacaatgatggctgaccctcctccccagtgccttgtctggctacctctcatgcacaggcttgcccatgttgagaatgtcttccatcccgtggagtgctcctactgccgatgtgagagtatgatgggtttccggtaccgatgccagcagtgccacaactatcagctctgccagaattgcttttggcgtggccatgccggcggccctcacagcaaccagcaccagatgaaggagcattcctcttggaaatctcctgcaaagaagctgagccatgcaattagtaaatctttggggtgtgtacccacgagagaacccccgcatcctgtttttcctgagcaaccagagaaaccacttgaccttgcacatatagttcctcctcgccctctgactaatatgaatgacaccatggttagccacatgtcctctggagtgcccactcccaccaagagtgttctggacagtcctagccgactggatgaggaacaccgtcttatagctcgctatgctgcccggctggctgcagaagcaggaaacgtgactcgtcctcccactgacttgagctttaactttgatgccaacaaacaacaaagacagcttattgcagaactggaaaacaaaaacagagagatcctgcaggagattcagcgtctccgcctggaacacgagcaggcctcccagcccacccctgagaaggcacagcagaaccccacgctgctggcagagctgcggctgctgaggcaaaggaaggatgaactggagcagaggatgtcggccctgcaggagagcaggcgggagctgatggtccagctggaagagctgatgaagttgctgaaggaggaagagcaaaagcaggcagctcaggccacagggtcaccacatacatcgcccacccatggaggcggccggccaatgcccatgccagtgcgctccacgtctgccggctccacccccacccactgtccgcaggactcgctgagcggagtcgggggagacgtgcaggaggccttcgcacaagcagaggaaggtgcagaggaagaagaagagaagatgcagaatgggaaagacagaggttagcagaggagccggacacagaggaagctcaggcacagaggacgaggagcaagctggcgccgacatggcgaaggcaaggtcttcccccagaggcacattcctctccatctttccaccgcacacctggaccaggcttgcaggctgccagacgtcactccacccgccagggagaggggagccagagccggtgggaagcggggaggggctgcgtggcacagctagtgggcctccccctgcacagccctgcatgtactagcaccttcatcactcccctcagggcatggtctcatctccgcatcaggaattcacctggaggttgaaaagagaaaagaaaaagcaccaa

SEQ ID NO: 9107 - DNA, 2275 bp, Homo sapiens
  source 1..2275: mol_type = unassigned DNA
ccgggcggagaagcggcgcgagccgggcgctgcgaacgttcgccgcgggggtggctccggggcctgagtaggcgctgccgctgcctcagccgagggggctgggccggagcgtgcggaggagtgaggccgcaggagaccttcccgacgacccctgctccggcggggaagtgagcaaggatgattgaggaaagtgggaacaagcggaagaccatggcagagaagaggcagctgttcatagaaatgcgtgctcagaattttgatgtcatacgactatcaacttacagaacagcctgcaaattacgatttgtacaaaaacgatgcaaccttcatcttgttgatatctggaacatgattgaagccttccgagacaatggccttaatacactggaccataccaccgagatcagtgtgtcccgcctcgaaactgtcatctcctccatctactatcagttgaacaagcgccttccttctactcaccaaattagtgtggaacaatctatcagcctcctcctcaactttatgattgctgcatatgacagtgagggccgaggcaagttgacggtattttcagttaaagctatgttagcaaccatgtgtggtggaaaaatgctggacaaattgagatatgttttctcccagatgtcagattccaatggcttaatgatatttagcaagtttgaccagtttctgaaggaagttctgaagctcccaacagctgtctttgaagggccatcttttggttacacagagcactcagtccgcacctgttttccacagcagagaaagataatgctaaatatgtttttagacacaatgatggctgaccctcctccccagtgccttgtctggctacctctcatgcacaggcttgcccatgttgagaatgtcttccatcccgtggagtgctcctactgccgatgtgagagtatgatgggtttccggtaccgatgccagcagtgccacaactatcagctctgccagaattgcttttggcgtggccatgccggcggccctcacagcaaccagcaccagatgaaggagcattcctcttggaaatctcctgcaaagaagctgagccatgcaattagtaaatctttggggtgtgtacccacgagagaacccccgcatcctgtttttcctgagcaaccagagaaaccacttgaccttgcacatatagttcctcctcgccctctgactaatatgaatgacaccatggttagccacatgtcctctggagtgcccactcccaccaagagtgttctggacagtcctagccgactggatgaggaacaccgtcttatagctcgctatgctgcccggctggctgcagaagcaggaaacgtgactcgtcctcccactgacttgagctttaactttgatgccaacaaacaacaaagacagcttattgcagaactggaaaacaaaaacagagagatcctgcaggagattcagcgtctccgcctggaacacgagcaggcctcccagcccacccctgagaaggcacagcagaaccccacgctgctggcagagctgcggctgctgaggcaaaggaaggatgaactggagcagaggatgtcggccctgcaggagagcaggcgggagctgatggtccagctggaagagctgatgaagttgctgaaggctcaggccacagggtcaccacatacatcgcccacccatggaggcggccggccaatgcccatgccagtgcgctccacgtctgccggctccacccccacccactgtccgcaggactcgctgagcggagtcgggggagacgtgcaggaggccttcgcacaaggtacgaggagaaacctccgcaatgacctgctggtggcagctgactccatcaccaacaccatgtcatccctggtgaaggagctccattcagcagaggaaggtgcagaggaagaagaagagaagatgcagaatgggaaagacagaggttagcagaggagccggacacagaggaagctcaggcacagaggacgaggagcaagctggcgccgacatggcgaaggcaaggtcttcccccagaggcacattcctctccatctttccaccgcacacctggaccaggcttgcaggctgccagacgtcactccacccgccagggagaggggagccagagccggtgggaagcggggaggggctgcgtggcacagctagtgggcctccccctgcacagccctgcatgtactagcaccttcatcactcccctcagggcatggtctcatctccgcatcaggaattcacctggaggttgaaaagagaa

SEQ ID NO: 9108 - DNA, 2420 bp, Homo sapiens
  source 1..2420: mol_type = unassigned DNA
gggcgcgcgcccgcccatccgccctccgccctccgccctcgcgccctcgcgccgggggcgggcgctgcgcgtgccgggcggagaagcggcgcgagccgggcgctgcgaacgttcgccgcgggggtggctccggggcctgagtaggcgctgccgctgcctcagccgagggggctgggccggagcgtgcggaggagtgaggccgcaggagaccttcccgacgacccctgctccggcggggaagtgagcaaggatgattgaggaaagtgggaacaagcggaagaccatggcagagaagaggcagctgttcatagaaatgcgtgctcagaattttgatgtcatacgactatcaacttacagaacagcctgcaaattacgatttgtacaaaaacgatgcaaccttcatcttgttgatatctggaacatgattgaagccttccgagacaatggccttaatacactggaccataccaccgagatcagtgtgtcccgcctcgaaactgtcatctcctccatctactatcagttgaacaagcgccttccttctactcaccaaattagtgtggaacaatctatcagcctcctcctcaactttatgattgctgcatatgacagtgagggccgaggcaagttgacggtattttcagttaaagctatgttagcaaccatgtgtggtggaaaaatgctggacaaattgagatatgttttctcccagatgtcagattccaatggcttaatgatatttagcaagtttgaccagtttctgaaggaagttctgaagctcccaacagctgtctttgaagggccatcttttggttacacagagcactcagtccgcacctgttttccacagcagagaaagataatgctaaatatgtttttagacacaatgatggctgaccctcctccccagtgccttgtctggctacctctcatgcacaggcttgcccatgttgagaatgtcttccatcccgtggagtgctcctactgccgatgtgagagtatgatgggtttccggtaccgatgccagcagtgccacaactatcagctctgccagaattgcttttggcgtggccatgccggcggccctcacagcaaccagcaccagatgaaggagcattcctcttggaaatctcctgcaaagaagctgagccatgcaattagtaaatctttggggtgtgtacccacgagagaacccccgcatcctgtttttcctgagcaaccagagaaaccacttgaccttgcacatatagttcctcctcgccctctgactaatatgaatgacaccatggttagccacatgtcctctggagtgcccactcccaccaagaggttacagtatagccaggatatacccagtcacttggccgatgagcatgcgctgatagcctcctatgtggcccgtctgcagcactgtgcacgtgttctggacagtcctagccgactggatgaggaacaccgtcttatagctcgctatgctgcccggctggctgcagaagcaggaaacgtgactcgtcctcccactgacttgagctttaactttgatgccaacaaacaacaaagacagcttattgcagaactggaaaacaaaaacagagagatcctgcaggagattcagcgtctccgcctggaacacgagcaggcctcccagcccacccctgagaaggcacagcagaaccccacgctgctggcagagctgcggctgctgaggcaaaggaaggatgaactggagcagaggatgtcggccctgcaggagagcaggcgggagctgatggtccagctggaagagctgatgaagttgctgaaggaggaagagcaaaagcaggcagctcaggccacagggtcaccacatacatcgcccacccatggaggcggccggccaatgcccatgccagtgcgctccacgtctgccggctccacccccacccactgtccgcaggactcgctgagcggagtcgggggagacgtgcaggaggccttcgcacaaggtacgaggagaaacctccgcaatgacctgctggtggcagctgactccatcaccaacaccatgtcatccctggtgaaggagctccattcaggttagcagaggagccggacacagaggaagctcaggcacagaggacgaggagcaagctggcgccgacatggcgaaggcaaggtcttcccccagaggcacattcctctccatctttccaccgcacacctggaccaggcttgcaggctgccagacgtcactccacccgccagggagaggggagccagagccggtgggaagcggggaggggctgcgtggcacagctagtgggcctccccctgcacagccctgcatgtactagcaccttcatcactcccctcagggcatggtctcatctccgcatcaggaattcacctggaggttgaaaagagaaaagaaaaagcaccaa

SEQ ID NO: 9109 - DNA, 2330 bp, Homo sapiens
  source 1..2330: mol_type = unassigned DNA
acaaacacagtaattcctgatactaagaagaggctggggtgccttaagtaatacgcatgcaggcgttgatggggtagagatctgaagtagtcctgccaagaactgggtttacttctttgtgaatgttactactcttacacagaaacctcatatgaattatcatcctctgacttaaggataacagtcagtctgggagacgtttggtgctcagaattttgatgtcatacgactatcaacttacagaacagcctgcaaattacgatttgtacaaaaacgatgcaaccttcatcttgttgatatctggaacatgattgaagccttccgagacaatggccttaatacactggaccataccaccgagatcagtgtgtcccgcctcgaaactgtcatctcctccatctactatcagttgaacaagcgccttccttctactcaccaaattagtgtggaacaatctatcagcctcctcctcaactttatgattgctgcatatgacagtgagggccgaggcaagttgacggtattttcagttaaagctatgttagcaaccatgtgtggtggaaaaatgctggacaaattgagatatgttttctcccagatgtcagattccaatggcttaatgatatttagcaagtttgaccagtttctgaaggaagttctgaagctcccaacagctgtctttgaagggccatcttttggttacacagagcactcagtccgcacctgttttccacagcagagaaagataatgctaaatatgtttttagacacaatgatggctgaccctcctccccagtgccttgtctggctacctctcatgcacaggcttgcccatgttgagaatgtcttccatcccgtggagtgctcctactgccgatgtgagagtatgatgggtttccggtaccgatgccagcagtgccacaactatcagctctgccagaattgcttttggcgtggccatgccggcggccctcacagcaaccagcaccagatgaaggagcattcctcttggaaatctcctgcaaagaagctgagccatgcaattagtaaatctttggggtgtgtacccacgagagaacccccgcatcctgtttttcctgagcaaccagagaaaccacttgaccttgcacatatagttcctcctcgccctctgactaatatgaatgacaccatggttagccacatgtcctctggagtgcccactcccaccaagaggttacagtatagccaggatatacccagtcacttggccgatgagcatgcgctgatagcctcctatgtggcccgtctgcagcactgtgcacgtgttctggacagtcctagccgactggatgaggaacaccgtcttatagctcgctatgctgcccggctggctgcagaagcaggaaacgtgactcgtcctcccactgacttgagctttaactttgatgccaacaaacaacaaagacagcttattgcagaactggaaaacaaaaacagagagatcctgcaggagattcagcgtctccgcctggaacacgagcaggcctcccagcccacccctgagaaggcacagcagaaccccacgctgctggcagagctgcggctgctgaggcaaaggaaggatgaactggagcagaggatgtcggccctgcaggagagcaggcgggagctgatggtccagctggaagagctgatgaagttgctgaaggctcaggccacagggtcaccacatacatcgcccacccatggaggcggccggccaatgcccatgccagtgcgctccacgtctgccggctccacccccacccactgtccgcaggactcgctgagcggagtcgggggagacgtgcaggaggccttcgcacaaggtacgaggagaaacctccgcaatgacctgctggtggcagctgactccatcaccaacaccatgtcatccctggtgaaggagctccattcaggttagcagaggagccggacacagaggaagctcaggcacagaggacgaggagcaagctggcgccgacatggcgaaggcaaggtcttcccccagaggcacattcctctccatctttccaccgcacacctggaccaggcttgcaggctgccagacgtcactccacccgccagggagaggggagccagagccggtgggaagcggggaggggctgcgtggcacagctagtgggcctccccctgcacagccctgcatgtactagcaccttcatcactcccctcagggcatggtctcatctccgcatcaggaattcacctggaggttgaaaagagaaaagaaaaagcaccaagctcttgtgtgtttgtgacctgatgaaacacttcctggcgtctgg

SEQ ID NO: 9110 - DNA, 1495 bp, Homo sapiens
  source 1..1495: mol_type = unassigned DNA
acccctgctccggcggggaagtgagcaaggatgattgaggaaagtgggaacaagcggaagaccatggcagagaagaggcagctgttcatagaaatgcgtgctcagaattttgatgtcatacgactatcaacttacagaacagcctgcaaattacgatttgtacaaaaacgatgcaaccttcatcttgttgatatctggaacatgattgaagccttccgagacaatggccttaatacactggaccataccaccgagatcagtgtgtcccgcctcgaaactgtcatctcctccatctactatcagttgaacaagcgccttccttctactcaccaaattagtgtggaacaatctatcagcctcctcctcaactttatgattgctgcatatgacagatgttttctcccagatgtcagattccaatggcttaatgatatttagcaagtttgaccagtttctgaaggaagttctgaagctcccaacagctgtctttgaagggccatcttttggttacacagagcactcagtccgcacctgttttccacagcagagaaagataatgctaaatatgtttttagacacaatgatggctgaccctcctccccagtgccttgtctggctacctctcatgcacaggcttgcccatgttgagaatgtcttccatcccgtggagtgctcctactgccgatgtgagagtatgatgggtttccggtaccgatgccagcagtgccacaactatcagctctgccagaattgcttttggcgtggccatgccggcggccctcacagcaaccagcaccagatgaaggagcattcctcttggaaatctcctgcaaagaagctgagccatgcaattagtaaatctttggggtgtgtacccacgagagaacccccgcatcctgtttttcctgagcaaccagagaaaccacttgaccttgcacatatagttcctcctcgccctctgactaatatgaatgacaccatggttagccacatgtcctctggagtgcccactcccaccaagaggttacagtatagccaggatatacccagtcacttggccgatgagcatgcgctgatagcctcctatgtggcccgtctgcagcactgtgcacgtgttctggacagtcctagccgactggatgaggaacaccgtcttatagctcgctatgctgcccggctggctgcagaagcaggaaacgtgactcgtcctcccactgacttgagctttaactttgatgccaacaaacaacaaagacagcttattgcagaactggaaaacaaaaacagagagatcctgcaggagattcagcgtctccgcctggaacacgagcaggcctcccagcccacccctgagaaggcacagcagaaccccacgctgctggcagagctgcggctgctgaggcaaaggaaggatgaactggagcagaggatgtcggccctgcaggagagcaggcgggagctgatggtccagctggaagagctgatgaagttgctg

SEQ ID NO: 9111 - DNA, 1857 bp, Homo sapiens
  source 1..1857: mol_type = unassigned DNA
gaagcggcgcgagccgggcgctgcgaacgttcgccgcgggggtggctccggggcctgagtaggcgctgccgctgcctcagccgagggggctgggccggagcgtgcggaggagtgaggccgcaggagaccttcccgacgacccctgctccggcggggaagtgagcaaggatgattgaggaaagtgggaacaagcggaagaccatggcagagaagaggcagctgttcatagaaatgcgtgctcagaattttgatgtcatacgactatcaacttacagaacagcctgcaaattacgatttgtacaaaaacgatgcaaccttcatcttgttgatatctggaacatgattgaagccttccgagacaatggccttaatacactggaccataccaccgagatcagtgtgtcccgcctcgaaactgtcatctcctccatctactatcagttgaacaagcgccttccttctactcaccaaattagtgtggaacaatctatcagcctcctcctcaactttatgattgctgcatatgacagagaaagataatgctaaatatgtttttagacacaatgatggctgaccctcctccccagtgccttgtctggctacctctcatgcacaggcttgcccatgttgagaatgtcttccatcccgtggagtgctcctactgccgatgtgagagtatgatgggtttccggtaccgatgccagcagtgccacaactatcagctctgccagaattgcttttggcgtggccatgccggcggccctcacagcaaccagcaccagatgaaggagcattcctcttggaaatctcctgcaaagaagctgagccatgcaattagtaaatctttggggtgtgtacccacgagagaacccccgcatcctgtttttcctgagcaaccagagaaaccacttgaccttgcacatatagttcctcctcgccctctgactaatatgaatgacaccatggttagccacatgtcctctggagtgcccactcccaccaagaggttacagtatagccaggatatacccagtcacttggccgatgagcatgcgctgatagcctcctatgtggcccgtctgcagcactgtgcacgtgttctggacagtcctagccgactggatgaggaacaccgtcttatagctcgctatgctgcccggctggctgcagaagcaggaaacgtgactcgtcctcccactgacttgagctttaactttgatgccaacaaacaacaaagacagcttattgcagaactggaaaacaaaaacagagagatcctgcaggagattcagcgtctccgcctggaacacgagcaggcctcccagcccacccctgagaaggcacagcagaaccccacgctgctggcagagctgcggctgctgaggcaaaggaaggatgaactggagcagaggatgtcggccctgcaggagagcaggcgggagctgatggtccagctggaagagctgatgaagttgctgaaggctcaggccacagggtcaccacatacatcgcccacccatggaggcggccggccaatgcccatgccagtgcgctccacgtctgccggctccacccccacccactgtccgcaggactcgctgagcggagtcgggggagacgtgcaggaggccttcgcacaaggtacgaggagaaacctccgcaatgacctgctggtggcagctgactccatcaccaacaccatgtcatccctggtgaaggagctccattcagcagaggaaggtgcagaggaagaagaagagaagatgcagaatgggaaagacagaggttagcagaggagccggacacagaggaagctcaggcacagaggacgaggagcaagctggcgccgacatggcg

SEQ ID NO: 9112 - DNA, 5518 bp, Homo sapiens
  source 1..5518: mol_type = unassigned DNA
aggcagaagccggcggcgcgcggacagccagtcggcgccgcgcggagctggccgctggattggctgcaacactcgcgtgtcaggcggttgctaggctccggccgcgcgccccgcccttgcgctcagcgccctctcaccgcccggtacgtgctcgcgcgaaggctgcggcgcggcgctcgcgcctcttaggcttggcggtggcggcggcggcagcttcgcgccgaatccccggggagcggcggtggcggcgtcctggggccaggaggagcgaacacctgccgcggtcctcccgccggcgctgggctctgtgtgctccgggatggagcaggtgtgcagagggtgagaacccagctctgggaccaagtcacttgcttccttacttagcaagactatcgacttgagcaaacttggacctgggatgaggatgtctgtgggcctctcgctgctgctgcccctctcggggaggacctttctcctcctgctctctgtggttatggctcagtcccactggcccagtgaaccctcagaggctgtcagggactgggaaaaccagcttgaggcatccatgcactcagtgctctcagacctccacgaggctgttcccacagtggttggcattcctgatggcacggctgtcgtcgggcgctcatttcgagtgaccattccaacagatttgattgcctccagtggagatatcatcaaggtatcagcggcagggaaggaggctttgccatcttggctgcactgggactcacagagccacaccctggagggcctcccccttgacactgataagggtgtgcattacatttcagtgagcgctacacggctgggggccaacgggagccacatcccccagacctccagtgtgttctccatcgaggtctaccctgaagaccacagtgagctgcagtcggtgaggacagcctccccagaccctggtgaggtggtatcatctgcctgtgctgcggatgaacctgtgactgttttgacggtgattttggatgccgacctcaccaagatgaccccaaagcaaaggattgacctcctgcacaggatgcggagcttctcagaagtagagcttcacaacatgaaattagtgccggtggtgaataacagactatttgacatgtcggccttcatggctggcccgggaaatgcaaaaaaggtggtggagaatggggcccttctctcctggaagctgggctgctccctgaaccagaacagtgtgcctgacattcatggtgtagaggcccctgccagggagggcgcaatgtctgctcagcttggctaccctgtggtgggttggcacatcgccaataagaagccccctcttcccaaacgcgtccggaggcagatccatgctacacccacacctgtcactgccattgggcccccaaccacggctatccaggagcccccatccaggatcgtgccaacccccacatctccagccattgctcctccaacagagaccatggctcctccagtcagggatcctgttcctgggaaacccacggtcaccatccggactcgaggcgccattattcaaaccccaaccctaggccccatccagcctactcgggtgtcagaagctggcaccacagttcctggccagattcgcccaacgatgaccattcctggctatgtggagcctactgcagttgctacccctcccacaaccaccaccaagaagccacgagtatccacaccaaaaccagcaacgccttcaactgactccaccaccaccacgactcgcaggccaaccaagaaaccacggacaccccggccagtgccccgggtcaccaccaaagtttccatcaccagattggaaactgcctcaccgcctactcgtattcgcaccaccaccagtggagtgccccgtggcggagaacccaaccagcgcccagagctcaagaaccatattgacagggtagatgcctgggttggcacctactttgaggtgaagatcccgtcagacactttctatgaccatgaggacaccaccactgacaagctgaagctgaccctgaaactgcgggagcagcagctggtgggcgagaagtcctgggtacagttcaacagcaacagccagctcatgtatggccttcccgacagcagccacgtgggcaaacacgagtatttcatgcatgccacagacaaggggggcctgtcggctgtggatgccttcgagatccacgtccacaggcgcccccaaggggatagggctcctgcaaggttcaaggccaagtttgtgggtgacccggcactggtgttgaatgacatccacaagaagattgccttggtaaagaaactggccttcgcctttggagaccgaaactgtagcaccatcaccctgcagaatatcacccggggctccatcgtggtggaatggaccaacaacacactgcccttggagccctgccccaaggagcagatcgctgggctgagccgccggatcgctgaggatgatggaaaacctcggcctgccttctccaacgccctagagcctgactttaaggccacaagcatcactgtgacgggctctggcagttgtcggcacctacagtttatccctgtggtaccacccaggagagtgccctcagaggcgccgcccacagaagtgcctgacagggaccctgagaagagcagtgaggatgatgtctacctgcacacagtcattccggccgtggtggtcgcagccatcctgctcattgctggcatcattgccatgatctgctaccgcaagaagcggaagggcaagcttacccttgaggaccaggccaccttcatcaagaagggggtgcctatcatctttgcagacgaactggacgactccaagcccccaccctcctccagcatgccactcattctgcaggaggagaaggctcccctaccccctcctgagtaccccaaccagagtgtgcccgagaccactcctctgaaccaggacaccatgggagagtacacgcccctgcgggatgaggatcccaatgcgcctccctaccagcccccaccgcccttcacagcacccatggagggcaagggctcccgtcccaagaacatgaccccataccggtcacctcctccctatgtcccaccttaacccgcaagcgcctgggtggaggcagggtagggcaggggcctggagacgacatggtgttgtctgtggagaccggtggcctgcagaccattgcccaccgggagccgacacctgacctagcacacactgacacaggggcctggacaagcccgccctctctggtcctcccaaaccccaaagcagctggagagactttggggacttttttatttttattttttgcctaacagcttttggtttgttcatagagaattcttcgcttcatttttgatggctggctctgaaagcaccatgtggagtggaggtggagggagcgaggaaccatgaatgaactcgcaggcagtgccgggcggccccctggctctctgcgttttgcctttaacactaactgtactgttttttctattcacgtgtgtctagctgcaggatgtaacatggaaaacagtaactaaagattaaattcaaaggactttcagaagttaaggttaagtttttacgtttaatctgctgtttacctaaacttgtatgtataatttttgggtgggtatggggaattgctttgctaaaaataagctcccagggtgtttcaaacttagagaagaccaagggacagtattttttatcaaaggaatactattttttcacactacgtcaacttggttgctctgataccccagagcctgattgggggcctcccggccctggctcacgccaagtccctggtgctgggtttgctctcccgctgttgccaggggctggaagctggaggggtctcttgggccatggacatccccacttccagcccatgtacactagtggcccacgaccaaggggtcttcatttccatgaaaaagggactccaagaggcagtggtggctgtggcccccaactttggtgctccagggtgggccagctgcttgtgggggcacctgggaggtcaaaggtctccaccacatcaacctattttgttttaccctttttctgtgcattgtttttttttttcctcctaaaaggaatatcacggttttttgaaacactcagtgggggacattttggtgaagatgcaatatttttatgtcatgtgatgctctttcctcacttgaccttggccgctttgtcctaacagtccacagtcctgccccgacccaccccatcccttttctctggcactccagtcccaggccttgggcctgaactactggaaaaggtctggcggctggggaggagtgccagcaatagttcataataaaaatctgttagctctcaaagctaattttttactaaagtttttatacagcctcaaattgttttattaaaaaaaagatttaaaatggtgatgcttacagcagtttgtacgagctcttaagtgttgattccatggaactgacggctttgcttgttttgattcttttccccctacttttcctaatggtttaaattctggaattacactggggttcttttgccttttttagcagaacatccgtccgtccatctgcatctctgtcccatgactcaggggcgcccactctgcttcgattctcctcctgtggaagaaaccattttgagcatgacttttcttgatgtctgaagcgttattttgggtactttttagggaggaatgcctttcgcaataatgtatccattccctgattgagggtgggtgggtggacccaggctccctttgcacacagagcagctacttctaagccatatcgactgttttgcagaggatttgtgtgtgctgcctcaggaggggagggctggtaggagggggggagaggtctctgtcctactgctctccagagggcatttccccttgcgccttctcccacagggcccagcccctctcccctgccccagtccccagggggtactctggagtgagcagtgcccctgtgggggagcctgtaaatgcgggctcagtggaccactggtgactgggctcatgcctccaagtcagagtttccctggtgccccagagacaggagcacaagtgggatctgacctggtgagattatttctgatgacctcatcaaaaaataaacaattcccaatgttccaggtgagggctttgaaaggccttccaaacagctccgtcgcccctagcaactccaccattgggcactgccatgcagagacgtggctggcccagaatggcctgttgccatagcaactggaggcgatggggcagtgaacagaataacaacagcaacaatgcctttgcaggcagcctgctcccctgagcgctgggctggtgatggtcgttggactctgtgagatggagagccaatctcacattcaagtgttcaccaaccactgatgtgtttttatttccttctatatgattttaagatgtgttttctgcattctgtaaagaaacatatcaaactaaataaaagcagtgtctttatt

SEQ ID NO: 9113 - DNA, 432 bp, Homo sapiens
  source 1..432: mol_type = unassigned DNA
atgaccccaaagcaaaggattgacctcctgcacaggatgcggagcttctcagaagtagagcttcacaacatgaaattagtgccggtggtgaataacagactatttgacatgtcggccttcatggctggcccgggaaatgcaaaaaaggtggtggagaatggggcccttctctcctggaagctgggctgctccctgaaccagaacagtgtgcctgacattcatggtgtagaggcccctgccagggagggcgcaatgtctgctcagcttggctaccctgtggtgggttggcacatcgccaataagaagccccccgccctctctggtcctcccaaaccccaaagcagctggagagactttggggacttttttatttttattttttgcctaacagcttttggtttgttcatagagaattcttcgcttcatttttga

SEQ ID NO: 9114 - DNA, 731 bp, Homo sapiens
  source 1..731: mol_type = unassigned DNA
agaagccggcggcgcgcggacagccagtcggcgccgcgcggagctggccgctggattggctgcaacactcgcgtgtcaggcggttgctaggctccggccgcgcgccccgcccttgcgctcagcgccctctcaccgcccggtacgtgctcgcgcgaaggctgcggcgcggcgctcgcgcctcttaggcttggcggtggcggcggcggcagcttcgcgccgaatccccggggagcggcggtggcggcgtcctggggccaggaggagcgaacacctgccgcggtcctcccgccggcgctggggccactgctctccaggaagataaggcttttaaagcagcctagcactagaaggctctgtgtgctccgggatggagcaggtgtgcagagggtgagaacccagctctgggaccaagtcacttgcttccttacttagcaagactatcgacttgagcaaacttggacctgggatgaggatgtctgtgggcctctcgctgctgctgcccctctcggggaggacctttctcctcctgctctctgtggttatggctcagtcccactggcccagtgaaccctcagaggctgtcagggactgggaaaaccagcttgaggcatccatgcactcagtgctctcagacctccacgaggctgttcccacagtggttggcattcctgatggcacggctgtcgtcgggcgctcatttcgagtgaccattccaacagatttgattgcct

SEQ ID NO: 9115 - DNA, 562 bp, Homo sapiens
  source 1..562: mol_type = unassigned DNA
cttaggcttggcggtggcggcggcggcagcttcgcgccgaatccccggggagcggcggtggcggcgtcctggggccaggaggagcgaacacctgccgcggtcctcccgccggcgctgggcacacgactgtctatcccagatggctgcactggcctaggacagacggttcttcccccagtacgtcaagaccctggagggtgcaagctacagaacagctgggctcctgcattcctcccagaccctgtcttcagtaggacaacaggcaacaaacttaaatttgggattctcattctgtctcccatgctggagtgcagtggcgcggtcttggctcactgaaacctttgcttcccagggtcaagcgattcccctgcctcagcttcctgagtagctgggattacaggctctgtgtgctccgggatggagcaggtgtgcagagggtgagaacccagctctgggaccaagtcacttgcttccttacttagcaagactatcgacttgagcaaacttggacctgggatgaggatgtctgtgggcctctcgctgctgctgcccctctcgggga

SEQ ID NO: 9116 - DNA, 579 bp, Homo sapiens
  source 1..579: mol_type = unassigned DNA
aggcagaagccggcggcgcgcggacagccagtcggcgccgcgcggagctggccgctggattggctgcaacactcgcgtgtcaggcggttgctaggctccggccgcgcgccccgcccttgcgctcagcgccctctcaccgcccggctctgtgtgctccgggatggagcaggtgtgcagagggtgagaacccagctctgggaccaagtcacttgcttccttacttagcaagactatcgacttgagcaaacttggacctgggatgaggatgtctgtgggcctctcgctgctgctgcccctctcggggaggacctttctcctcctgctctctgtggttatggctcagtcccactggcccagtgaaccctcagaggctgtcagggactgggaaaaccagcttgaggcatccatgcactcagtgctctcagacctccacgaggctgttcccacagtggttggcattcctgatggcacggctgtcgtcgggcgctcatttcgagtgaccattccaacagatttgattgcctccagtggagatatcatcaaggtatcagcggcagggaaggaggctttgccatcttg

SEQ ID NO: 9117 - DNA, 841 bp, Homo sapiens
  source 1..841: mol_type = unassigned DNA
cgcggcgctcgcgcctcttaggcttggcggtggcggcggcggcagcttcgcgccgaatccccggggagcggcggtggcggcgtcctggggccaggaggagcgaacacctgccgcggtcctcccgccggcgctggacctggttcacctgcgagtgtatttggatagtgtctccacagaaaatgtcgtctcggcttggaatctttttgccataaattctaaggccactgctctccaggaagataaggcttttaaagcagcctagcactagaaggtgaggcacacgactgtctatcccagatggctgcactggcctaggacagacggttcttcccccagtacgtcaagaccctggagggtgcaagctacagaacagctgggctcctgcattcctcccagaccctgtcttcagtaggacaacaggcaacaaacttaaatttggctctgtgtgctccgggatggagcaggtgtgcagagggtgagaacccagctctgggaccaagtcacttgcttccttacttagcaagactatcgacttgagcaaacttggacctgggatgaggatgtctgtgggcctctcgctgctgctgcccctctcggggaggacctttctcctcctgctctctgtggttatggctcagtcccactggcccagtgaaccctcagaggctgtcagggactgggaaaaccagcttgaggcatccatgcactcagtgctctcagacctccacgaggctgttcccacagtggttggcattcctgatggcacggctgtcgtcgggcgctcatttcgagtgaccattccaacagatttgattgcctccagtggagatatcatcaaggt

SEQ ID NO: 9118 - DNA, 397 bp, Homo sapiens
  source 1..397: mol_type = unassigned DNA
aggcttggcggtggcggcggcggcagcttcgcgccgaatccccggggagcggcggtggcggcgtcctggggccaggaggagcgaacacctgccgcggtcctcccgccggcgctgggtgagtgcaccgcccgccctatccgctgtgcctggctgcttgggcccccatccctgctgccggctgagccttccgcggaacacctgctgctgctcgctgttcggcccggggcggggacacggccgcggacgtccttgtgggctctgtgtgctccgggatggagcaggtgtgcagagggtgagaacccagctctgggaccaagtcacttgcttccttacttagcaagactatcgacttgagcaaacttggacctgggatgaggatgtctgtgggcctctcgct

SEQ ID NO: 9119 - DNA, 549 bp, Homo sapiens
  source 1..549: mol_type = unassigned DNA
cttgcgctcagcgccctctcaccgcccgggccactgctctccaggaagataaggcttttaaagcagcctagcactagaaggctctgtgtgctccgggatggagcaggtgtgcagagggtgagaacccagctctgggaccaagtcacttgcttccttacttagcaagactatcgacttgagcaaacttggacctgggatgaggatgtctgtgggcctctcgctgctgctgcccctctcggggaggacctttctcctcctgctctctgtggttatggctcagtcccactggcccagtgaaccctcagaggctgtcagggactgggaaaaccagcttgaggcatccatgcactcagtgctctcagacctccacgaggctgttcccacagtggttggcattcctgatggcacggctgtcgtcgggcgctcatttcgagtgaccattccaacagatttgattgcctccagtggagatatcatcaaggtatcagcggcagggaaggaggctttgccatcttggctgcactgggactcacagagccacaccctgga

SEQ ID NO: 9120 - DNA, 624 bp, Homo sapiens
  source 1..624: mol_type = unassigned DNA
acgtgctcgcgcgaaggctgcggcgcggcgctcgcgcctcttaggcttggcggtggcggcggcggcagcttcgcgccgaatccccggggagcggcggtggcggcgtcctggggccaggaggagcgaacacctgccgcggtcctcccgccggcgctggggattctcattctgtctcccatgctggagtgcagtggcgcggtcttggctcactgaaacctttgcttcccagggtcaagcgattcccctgcctcagcttcctgagtagctgggattacaggctctgtgtgctccgggatggagcaggtgtgcagagggtgagaacccagctctgggaccaagtcacttgcttccttacttagcaagactatcgacttgagcaaacttggacctgggatgaggatgtctgtgggcctctcgctgctgctgcccctctcggggaggacctttctcctcctgctctctgtggttatggctcagtcccactggcccagtgaaccctcagaggctgtcagggactgggaaaaccagcttgaggcatccatgcactcagtgctctcagacctccacgaggctgttcccacagtggttggcattcctgatggcacggctgtcgtcgggcgctca

SEQ ID NO: 9121 - DNA, 588 bp, Homo sapiens
  source 1..588: mol_type = unassigned DNA
gtgctcgcgcgaaggctgcggcgcggcgctcgcgcctcttaggcttggcggtggcggcggcggcagcttcgcgccgaatccccggggagcggcggtggcggcgtcctggggccaggaggagcgaacacctgccgcggtcctcccgccggcgctggggccactgctctccaggaagataaggcttttaaagcagcctagcactagaaggtgaggctctgtgtgctccgggatggagcaggtgtgcagagggtgagaacccagctctgggaccaagtcacttgcttccttacttagcaagactatcgacttgagcaaacttggacctgggatgaggatgtctgtgggcctctcgctgctgctgcccctctcggggaggacctttctcctcctgctctctgtggttatggctcagtcccactggcccagtgaaccctcagaggctgtcagggactgggaaaaccagcttgaggcatccatgcactcagtgctctcagacctccacgaggctgttcccacagtggttggcattcctgatggcacggctgtcgtcgggcgctcatttcgagtgaccattccaacagatttgat

SEQ ID NO: 9122 - DNA, 547 bp, Homo sapiens
  source 1..547: mol_type = unassigned DNA
acgtgctcgcgcgaaggctgcggcgcggcgctcgcgcctcttaggcttggcggtggcggcggcggcagcttcgcgccgaatccccggggagcggcggtggcggcgtcctggggccaggaggagcgaacacctgccgcggtcctcccgccggcgctggatagccctgggatctcctgaatttccaggttgggctactcaggcatggattgactcctacagttcaggcggatggagatcccaccaacccacagcttaattcttcagatgctttatcttcatttctcatgtatcttcagttggcttctaatgctctgtgtgctccgggatggagcaggtgtgcagagggtgagaacccagctctgggaccaagtcacttgcttccttacttagcaagactatcgacttgagcaaacttggacctgggatgaggatgtctgtgggcctctcgctgctgctgcccctctcggggaggacctttctcctcctgctctctgtggttatggctcagtcccactggcccagtgaaccctcagaggctgtcagggac

SEQ ID NO: 9123 - DNA, 5563 bp, Homo sapiens
  source 1..5563: mol_type = unassigned DNA
ttttagtagagacggggtttcacgttgttggtcaggctggtctcaaactcctgacctcaggtgatccacccgccttggcctcccaaagtgctgggattacaggtgtgagccaccgcggctggtcaaaattttttttttttggtactttttttgcagaggcggggtttcgacacgttgcccaggctggtcttgaactcctgagctcaagctatccatccacctgcctcggcctcccatagtgctgggactacaggcgggagcacagcacctagccccttccttttcttgtctctgtgaatgaggtttggagccgagacactgaagtatagataattgcaaaaaggctctgtgtgctccgggatggagcaggtgtgcagagggtgagaacccagctctgggaccaagtcacttgcttccttacttagcaagactatcgacttgagcaaacttggacctgggatgaggatgtctgtgggcctctcgctgctgctgcccctctcggggaggacctttctcctcctgctctctgtggttatggctcagtcccactggcccagtgaaccctcagaggctgtcagggactgggaaaaccagcttgaggcatccatgcactcagtgctctcagacctccacgaggctgttcccacagtggttggcattcctgatggcacggctgtcgtcgggcgctcatttcgagtgaccattccaacagatttgattgcctccagtggagatatcatcaaggtatcagcggcagggaaggaggctttgccatcttggctgcactgggactcacagagccacaccctggagggcctcccccttgacactgataagggtgtgcattacatttcagtgagcgctacacggctgggggccaacgggagccacatcccccagacctccagtgtgttctccatcgaggtctaccctgaagaccacagtgagctgcagtcggtgaggacagcctccccagaccctggtgaggtggtatcatctgcctgtgctgcggatgaacctgtgactgttttgacggtgattttggatgccgacctcaccaagatgaccccaaagcaaaggattgacctcctgcacaggatgcggagcttctcagaagtagagcttcacaacatgaaattagtgccggtggtgaataacagactatttgacatgtcggccttcatggctggcccgggaaatgcaaaaaaggtggtggagaatggggcccttctctcctggaagctgggctgctccctgaaccagaacagtgtgcctgacattcatggtgtagaggcccctgccagggagggcgcaatgtctgctcagcttggctaccctgtggtgggttggcacatcgccaataagaagccccctcttcccaaacgcgtccggaggcagatccatgctacacccacacctgtcactgccattgggcccccaaccacggctatccaggagcccccatccaggatcgtgccaacccccacatctccagccattgctcctccaacagagaccatggctcctccagtcagggatcctgttcctgggaaacccacggtcaccatccggactcgaggcgccattattcaaaccccaaccctaggccccatccagcctactcgggtgtcagaagctggcaccacagttcctggccagattcgcccaacgatgaccattcctggctatgtggagcctactgcagttgctacccctcccacaaccaccaccaagaagccacgagtatccacaccaaaaccagcaacgccttcaactgactccaccaccaccacgactcgcaggccaaccaagaaaccacggacaccccggccagtgccccgggtcaccaccaaagtttccatcaccagattggaaactgcctcaccgcctactcgtattcgcaccaccaccagtggagtgccccgtggcggagaacccaaccagcgcccagagctcaagaaccatattgacagggtagatgcctgggttggcacctactttgaggtgaagatcccgtcagacactttctatgaccatgaggacaccaccactgacaagctgaagctgaccctgaaactgcgggagcagcagctggtgggcgagaagtcctgggtacagttcaacagcaacagccagctcatgtatggccttcccgacagcagccacgtgggcaaacacgagtatttcatgcatgccacagacaaggggggcctgtcggctgtggatgccttcgagatccacgtccacaggcgcccccaaggggatagggctcctgcaaggttcaaggccaagtttgtgggtgacccggcactggtgttgaatgacatccacaagaagattgccttggtaaagaaactggccttcgcctttggagaccgaaactgtagcaccatcaccctgcagaatatcacccggggctccatcgtggtggaatggaccaacaacacactgcccttggagccctgccccaaggagcagatcgctgggctgagccgccggatcgctgaggatgatggaaaacctcggcctgccttctccaacgccctagagcctgactttaaggccacaagcatcactgtgacgggctctggcagttgtcggcacctacagtttatccctgtggtaccacccaggagagtgccctcagaggcgccgcccacagaagtgcctgacagggaccctgagaagagcagtgaggatgatgtctacctgcacacagtcattccggccgtggtggtcgcagccatcctgctcattgctggcatcattgccatgatctgctaccgcaagaagcggaagggcaagcttacccttgaggaccaggccaccttcatcaagaagggggtgcctatcatctttgcagacgaactggacgactccaagcccccaccctcctccagcatgccactcattctgcaggaggagaaggctcccctaccccctcctgagtaccccaaccagagtgtgcccgagaccactcctctgaaccaggacaccatgggagagtacacgcccctgcgggatgaggatcccaatgcgcctccctaccagcccccaccgcccttcacagcacccatggagggcaagggctcccgtcccaagaacatgaccccataccggtcacctcctccctatgtcccaccttaacccgcaagcgcctgggtggaggcagggtagggcaggggcctggagacgacatggtgttgtctgtggagaccggtggcctgcagaccattgcccaccgggagccgacacctgacctagcacacactgacacaggggcctggacaagcccgccctctctggtcctcccaaaccccaaagcagctggagagactttggggacttttttatttttattttttgcctaacagcttttggtttgttcatagagaattcttcgcttcatttttgatggctggctctgaaagcaccatgtggagtggaggtggagggagcgaggaaccatgaatgaactcgcaggcagtgccgggcggccccctggctctctgcgttttgcctttaacactaactgtactgttttttctattcacgtgtgtctagctgcaggatgtaacatggaaaacagtaactaaagattaaattcaaaggactttcagaagttaaggttaagtttttacgtttaatctgctgtttacctaaacttgtatgtataatttttgggtgggtatggggaattgctttgctaaaaataagctcccagggtgtttcaaacttagagaagaccaagggacagtattttttatcaaaggaatactattttttcacactacgtcaacttggttgctctgataccccagagcctgattgggggcctcccggccctggctcacgccaagtccctggtgctgggtttgctctcccgctgttgccaggggctggaagctggaggggtctcttgggccatggacatccccacttccagcccatgtacactagtggcccacgaccaaggggtcttcatttccatgaaaaagggactccaagaggcagtggtggctgtggcccccaactttggtgctccagggtgggccagctgcttgtgggggcacctgggaggtcaaaggtctccaccacatcaacctattttgttttaccctttttctgtgcattgtttttttttttcctcctaaaaggaatatcacggttttttgaaacactcagtgggggacattttggtgaagatgcaatatttttatgtcatgtgatgctctttcctcacttgaccttggccgctttgtcctaacagtccacagtcctgccccgacccaccccatcccttttctctggcactccagtcccaggccttgggcctgaactactggaaaaggtctggcggctggggaggagtgccagcaatagttcataataaaaatctgttagctctcaaagctaattttttactaaagtttttatacagcctcaaattgttttattaaaaaaaagatttaaaatggtgatgcttacagcagtttgtacgagctcttaagtgttgattccatggaactgacggctttgcttgttttgattcttttccccctacttttcctaatggtttaaattctggaattacactggggttcttttgccttttttagcagaacatccgtccgtccatctgcatctctgtcccatgactcaggggcgcccactctgcttcgattctcctcctgtggaagaaaccattttgagcatgacttttcttgatgtctgaagcgttattttgggtactttttagggaggaatgcctttcgcaataatgtatccattccctgattgagggtgggtgggtggacccaggctccctttgcacacagagcagctacttctaagccatatcgactgttttgcagaggatttgtgtgtgctgcctcaggaggggagggctggtaggagggggggagaggtctctgtcctactgctctccagagggcatttccccttgcgccttctcccacagggcccagcccctctcccctgccccagtccccagggggtactctggagtgagcagtgcccctgtgggggagcctgtaaatgcgggctcagtggaccactggtgactgggctcatgcctccaagtcagagtttccctggtgccccagagacaggagcacaagtgggatctgacctggtgagattatttctgatgacctcatcaaaaaataaacaattcccaatgttccaggtgagggctttgaaaggccttccaaacagctccgtcgcccctagcaactccaccattgggcactgccatgcagagacgtggctggcccagaatggcctgttgccatagcaactggaggcgatggggcagtgaacagaataacaacagcaacaatgcctttgcaggcagcctgctcccctgagcgctgggctggtgatggtcgttggactctgtgagatggagagccaatctcacattcaagtgttcaccaaccactgatgtgtttttatttccttctatatgattttaagatgtgttttctgcattctgtaaagaaacatatcaaactaaataaaagcagtgtctttattacaa

SEQ ID NO: 9124 - DNA, 5579 bp, Homo sapiens
  source 1..5579: mol_type = unassigned DNA
aggcagaagccggcggcgcgcggacagccagtcggcgccgcgcggagctggccgctggattggctgcaacactcgcgtgtcaggcggttgctaggctccggccgcgcgccccgcccttgcgctcagcgccctctcaccgcccggtacgtgctcgcgcgaaggctgcggcgcggcgctcgcgcctcttaggcttggcggtggcggcggcggcagcttcgcgccgaatccccggggagcggcggtggcggcgtcctggggccaggaggagcgaacacctgccgcggtcctcccgccggcgctggggccactgctctccaggaagataaggcttttaaagcagcctagcactagaaggtgaggctctgtgtgctccgggatggagcaggtgtgcagagggtgagaacccagctctgggaccaagtcacttgcttccttacttagcaagactatcgacttgagcaaacttggacctgggatgaggatgtctgtgggcctctcgctgctgctgcccctctcggggaggacctttctcctcctgctctctgtggttatggctcagtcccactggcccagtgaaccctcagaggctgtcagggactgggaaaaccagcttgaggcatccatgcactcagtgctctcagacctccacgaggctgttcccacagtggttggcattcctgatggcacggctgtcgtcgggcgctcatttcgagtgaccattccaacagatttgattgcctccagtggagatatcatcaaggtatcagcggcagggaaggaggctttgccatcttggctgcactgggactcacagagccacaccctggagggcctcccccttgacactgataagggtgtgcattacatttcagtgagcgctacacggctgggggccaacgggagccacatcccccagacctccagtgtgttctccatcgaggtctaccctgaagaccacagtgagctgcagtcggtgaggacagcctccccagaccctggtgaggtggtatcatctgcctgtgctgcggatgaacctgtgactgttttgacggtgattttggatgccgacctcaccaagatgaccccaaagcaaaggattgacctcctgcacaggatgcggagcttctcagaagtagagcttcacaacatgaaattagtgccggtggtgaataacagactatttgacatgtcggccttcatggctggcccgggaaatgcaaaaaaggtggtggagaatggggcccttctctcctggaagctgggctgctccctgaaccagaacagtgtgcctgacattcatggtgtagaggcccctgccagggagggcgcaatgtctgctcagcttggctaccctgtggtgggttggcacatcgccaataagaagccccctcttcccaaacgcgtccggaggcagatccatgctacacccacacctgtcactgccattgggcccccaaccacggctatccaggagcccccatccaggatcgtgccaacccccacatctccagccattgctcctccaacagagaccatggctcctccagtcagggatcctgttcctgggaaacccacggtcaccatccggactcgaggcgccattattcaaaccccaaccctaggccccatccagcctactcgggtgtcagaagctggcaccacagttcctggccagattcgcccaacgatgaccattcctggctatgtggagcctactgcagttgctacccctcccacaaccaccaccaagaagccacgagtatccacaccaaaaccagcaacgccttcaactgactccaccaccaccacgactcgcaggccaaccaagaaaccacggacaccccggccagtgccccgggtcaccaccaaagtttccatcaccagattggaaactgcctcaccgcctactcgtattcgcaccaccaccagtggagtgccccgtggcggagaacccaaccagcgcccagagctcaagaaccatattgacagggtagatgcctgggttggcacctactttgaggtgaagatcccgtcagacactttctatgaccatgaggacaccaccactgacaagctgaagctgaccctgaaactgcgggagcagcagctggtgggcgagaagtcctgggtacagttcaacagcaacagccagctcatgtatggccttcccgacagcagccacgtgggcaaacacgagtatttcatgcatgccacagacaaggggggcctgtcggctgtggatgccttcgagatccacgtccacaggcgcccccaaggggatagggctcctgcaaggttcaaggccaagtttgtgggtgacccggcactggtgttgaatgacatccacaagaagattgccttggtaaagaaactggccttcgcctttggagaccgaaactgtagcaccatcaccctgcagaatatcacccggggctccatcgtggtggaatggaccaacaacacactgcccttggagccctgccccaaggagcagatcgctgggctgagccgccggatcgctgaggatgatggaaaacctcggcctgccttctccaacgccctagagcctgactttaaggccacaagcatcactgtgacgggctctggcagttgtcggcacctacagtttatccctgtggtaccacccaggagagtgccctcagaggcgccgcccacagaagtgcctgacagggaccctgagaagagcagtgaggatgatgtctacctgcacacagtcattccggccgtggtggtcgcagccatcctgctcattgctggcatcattgccatgatctgctaccgcaagaagcggaagggcaagcttacccttgaggaccaggccaccttcatcaagaagggggtgcctatcatctttgcagacgaactggacgactccaagcccccaccctcctccagcatgccactcattctgcaggaggagaaggctcccctaccccctcctgagtaccccaaccagagtgtgcccgagaccactcctctgaaccaggacaccatgggagagtacacgcccctgcgggatgaggatcccaatgcgcctccctaccagcccccaccgcccttcacagcacccatggagggcaagggctcccgtcccaagaacatgaccccataccggtcacctcctccctatgtcccaccttaacccgcaagcgcctgggtggaggcagggtagggcaggggcctggagacgacatggtgttgtctgtggagaccggtggcctgcagaccattgcccaccgggagccgacacctgacctagcacacactgacacaggggcctggacaagcccgccctctctggtcctcccaaaccccaaagcagctggagagactttggggacttttttatttttattttttgcctaacagcttttggtttgttcatagagaattcttcgcttcatttttgatggctggctctgaaagcaccatgtggagtggaggtggagggagcgaggaaccatgaatgaactcgcaggcagtgccgggcggccccctggctctctgcgttttgcctttaacactaactgtactgttttttctattcacgtgtgtctagctgcaggatgtaacatggaaaacagtaactaaagattaaattcaaaggactttcagaagttaaggttaagtttttacgtttaatctgctgtttacctaaacttgtatgtataatttttgggtgggtatggggaattgctttgctaaaaataagctcccagggtgtttcaaacttagagaagaccaagggacagtattttttatcaaaggaatactattttttcacactacgtcaacttggttgctctgataccccagagcctgattgggggcctcccggccctggctcacgccaagtccctggtgctgggtttgctctcccgctgttgccaggggctggaagctggaggggtctcttgggccatggacatccccacttccagcccatgtacactagtggcccacgaccaaggggtcttcatttccatgaaaaagggactccaagaggcagtggtggctgtggcccccaactttggtgctccagggtgggccagctgcttgtgggggcacctgggaggtcaaaggtctccaccacatcaacctattttgttttaccctttttctgtgcattgtttttttttttcctcctaaaaggaatatcacggttttttgaaacactcagtgggggacattttggtgaagatgcaatatttttatgtcatgtgatgctctttcctcacttgaccttggccgctttgtcctaacagtccacagtcctgccccgacccaccccatcccttttctctggcactccagtcccaggccttgggcctgaactactggaaaaggtctggcggctggggaggagtgccagcaatagttcataataaaaatctgttagctctcaaagctaattttttactaaagtttttatacagcctcaaattgttttattaaaaaaaagatttaaaatggtgatgcttacagcagtttgtacgagctcttaagtgttgattccatggaactgacggctttgcttgttttgattcttttccccctacttttcctaatggtttaaattctggaattacactggggttcttttgccttttttagcagaacatccgtccgtccatctgcatctctgtcccatgactcaggggcgcccactctgcttcgattctcctcctgtggaagaaaccattttgagcatgacttttcttgatgtctgaagcgttattttgggtactttttagggaggaatgcctttcgcaataatgtatccattccctgattgagggtgggtgggtggacccaggctccctttgcacacagagcagctacttctaagccatatcgactgttttgcagaggatttgtgtgtgctgcctcaggaggggagggctggtaggagggggggagaggtctctgtcctactgctctccagagggcatttccccttgcgccttctcccacagggcccagcccctctcccctgccccagtccccagggggtactctggagtgagcagtgcccctgtgggggagcctgtaaatgcgggctcagtggaccactggtgactgggctcatgcctccaagtcagagtttccctggtgccccagagacaggagcacaagtgggatctgacctggtgagattatttctgatgacctcatcaaaaaataaacaattcccaatgttccaggtgagggctttgaaaggccttccaaacagctccgtcgcccctagcaactccaccattgggcactgccatgcagagacgtggctggcccagaatggcctgttgccatagcaactggaggcgatggggcagtgaacagaataacaacagcaacaatgcctttgcaggcagcctgctcccctgagcgctgggctggtgatggtcgttggactctgtgagatggagagccaatctcacattcaagtgttcaccaaccactgatgtgtttttatttccttctatatgattttaagatgtgttttctgcattctgtaaagaaacatatcaaactaaataaaagcagtgtctttattacaa

SEQ ID NO: 9125 - DNA, 5662 bp, Homo sapiens
  source 1..5662: mol_type = unassigned DNA
aggcagaagccggcggcgcgcggacagccagtcggcgccgcgcggagctggccgctggattggctgcaacactcgcgtgtcaggcggttgctaggctccggccgcgcgccccgcccttgcgctcagcgccctctcaccgcccggtacgtgctcgcgcgaaggctgcggcgcggcgctcgcgcctcttaggcttggcggtggcggcggcggcagcttcgcgccgaatccccggggagcggcggtggcggcgtcctggggccaggaggagcgaacacctgccgcggtcctcccgccggcgctgggtgagtgcaccgcccgccctatccgctgtgcctggctgcttgggcccccatccctgctgccggctgagccttccgcggaacacctgctgctgctcgctgttcggcccggggcggggacacggccgcggacgtccttgtgggctctgtgtgctccgggatggagcaggtgtgcagagggtgagaacccagctctgggaccaagtcacttgcttccttacttagcaagactatcgacttgagcaaacttggacctgggatgaggatgtctgtgggcctctcgctgctgctgcccctctcggggaggacctttctcctcctgctctctgtggttatggctcagtcccactggcccagtgaaccctcagaggctgtcagggactgggaaaaccagcttgaggcatccatgcactcagtgctctcagacctccacgaggctgttcccacagtggttggcattcctgatggcacggctgtcgtcgggcgctcatttcgagtgaccattccaacagatttgattgcctccagtggagatatcatcaaggtatcagcggcagggaaggaggctttgccatcttggctgcactgggactcacagagccacaccctggagggcctcccccttgacactgataagggtgtgcattacatttcagtgagcgctacacggctgggggccaacgggagccacatcccccagacctccagtgtgttctccatcgaggtctaccctgaagaccacagtgagctgcagtcggtgaggacagcctccccagaccctggtgaggtggtatcatctgcctgtgctgcggatgaacctgtgactgttttgacggtgattttggatgccgacctcaccaagatgaccccaaagcaaaggattgacctcctgcacaggatgcggagcttctcagaagtagagcttcacaacatgaaattagtgccggtggtgaataacagactatttgacatgtcggccttcatggctggcccgggaaatgcaaaaaaggtggtggagaatggggcccttctctcctggaagctgggctgctccctgaaccagaacagtgtgcctgacattcatggtgtagaggcccctgccagggagggcgcaatgtctgctcagcttggctaccctgtggtgggttggcacatcgccaataagaagccccctcttcccaaacgcgtccggaggcagatccatgctacacccacacctgtcactgccattgggcccccaaccacggctatccaggagcccccatccaggatcgtgccaacccccacatctccagccattgctcctccaacagagaccatggctcctccagtcagggatcctgttcctgggaaacccacggtcaccatccggactcgaggcgccattattcaaaccccaaccctaggccccatccagcctactcgggtgtcagaagctggcaccacagttcctggccagattcgcccaacgatgaccattcctggctatgtggagcctactgcagttgctacccctcccacaaccaccaccaagaagccacgagtatccacaccaaaaccagcaacgccttcaactgactccaccaccaccacgactcgcaggccaaccaagaaaccacggacaccccggccagtgccccgggtcaccaccaaagtttccatcaccagattggaaactgcctcaccgcctactcgtattcgcaccaccaccagtggagtgccccgtggcggagaacccaaccagcgcccagagctcaagaaccatattgacagggtagatgcctgggttggcacctactttgaggtgaagatcccgtcagacactttctatgaccatgaggacaccaccactgacaagctgaagctgaccctgaaactgcgggagcagcagctggtgggcgagaagtcctgggtacagttcaacagcaacagccagctcatgtatggccttcccgacagcagccacgtgggcaaacacgagtatttcatgcatgccacagacaaggggggcctgtcggctgtggatgccttcgagatccacgtccacaggcgcccccaaggggatagggctcctgcaaggttcaaggccaagtttgtgggtgacccggcactggtgttgaatgacatccacaagaagattgccttggtaaagaaactggccttcgcctttggagaccgaaactgtagcaccatcaccctgcagaatatcacccggggctccatcgtggtggaatggaccaacaacacactgcccttggagccctgccccaaggagcagatcgctgggctgagccgccggatcgctgaggatgatggaaaacctcggcctgccttctccaacgccctagagcctgactttaaggccacaagcatcactgtgacgggctctggcagttgtcggcacctacagtttatccctgtggtaccacccaggagagtgccctcagaggcgccgcccacagaagtgcctgacagggaccctgagaagagcagtgaggatgatgtctacctgcacacagtcattccggccgtggtggtcgcagccatcctgctcattgctggcatcattgccatgatctgctaccgcaagaagcggaagggcaagcttacccttgaggaccaggccaccttcatcaagaagggggtgcctatcatctttgcagacgaactggacgactccaagcccccaccctcctccagcatgccactcattctgcaggaggagaaggctcccctaccccctcctgagtaccccaaccagagtgtgcccgagaccactcctctgaaccaggacaccatgggagagtacacgcccctgcgggatgaggatcccaatgcgcctccctaccagcccccaccgcccttcacagcacccatggagggcaagggctcccgtcccaagaacatgaccccataccggtcacctcctccctatgtcccaccttaacccgcaagcgcctgggtggaggcagggtagggcaggggcctggagacgacatggtgttgtctgtggagaccggtggcctgcagaccattgcccaccgggagccgacacctgacctagcacacactgacacaggggcctggacaagcccgccctctctggtcctcccaaaccccaaagcagctggagagactttggggacttttttatttttattttttgcctaacagcttttggtttgttcatagagaattcttcgcttcatttttgatggctggctctgaaagcaccatgtggagtggaggtggagggagcgaggaaccatgaatgaactcgcaggcagtgccgggcggccccctggctctctgcgttttgcctttaacactaactgtactgttttttctattcacgtgtgtctagctgcaggatgtaacatggaaaacagtaactaaagattaaattcaaaggactttcagaagttaaggttaagtttttacgtttaatctgctgtttacctaaacttgtatgtataatttttgggtgggtatggggaattgctttgctaaaaataagctcccagggtgtttcaaacttagagaagaccaagggacagtattttttatcaaaggaatactattttttcacactacgtcaacttggttgctctgataccccagagcctgattgggggcctcccggccctggctcacgccaagtccctggtgctgggtttgctctcccgctgttgccaggggctggaagctggaggggtctcttgggccatggacatccccacttccagcccatgtacactagtggcccacgaccaaggggtcttcatttccatgaaaaagggactccaagaggcagtggtggctgtggcccccaactttggtgctccagggtgggccagctgcttgtgggggcacctgggaggtcaaaggtctccaccacatcaacctattttgttttaccctttttctgtgcattgtttttttttttcctcctaaaaggaatatcacggttttttgaaacactcagtgggggacattttggtgaagatgcaatatttttatgtcatgtgatgctctttcctcacttgaccttggccgctttgtcctaacagtccacagtcctgccccgacccaccccatcccttttctctggcactccagtcccaggccttgggcctgaactactggaaaaggtctggcggctggggaggagtgccagcaatagttcataataaaaatctgttagctctcaaagctaattttttactaaagtttttatacagcctcaaattgttttattaaaaaaaagatttaaaatggtgatgcttacagcagtttgtacgagctcttaagtgttgattccatggaactgacggctttgcttgttttgattcttttccccctacttttcctaatggtttaaattctggaattacactggggttcttttgccttttttagcagaacatccgtccgtccatctgcatctctgtcccatgactcaggggcgcccactctgcttcgattctcctcctgtggaagaaaccattttgagcatgacttttcttgatgtctgaagcgttattttgggtactttttagggaggaatgcctttcgcaataatgtatccattccctgattgagggtgggtgggtggacccaggctccctttgcacacagagcagctacttctaagccatatcgactgttttgcagaggatttgtgtgtgctgcctcaggaggggagggctggtaggagggggggagaggtctctgtcctactgctctccagagggcatttccccttgcgccttctcccacagggcccagcccctctcccctgccccagtccccagggggtactctggagtgagcagtgcccctgtgggggagcctgtaaatgcgggctcagtggaccactggtgactgggctcatgcctccaagtcagagtttccctggtgccccagagacaggagcacaagtgggatctgacctggtgagattatttctgatgacctcatcaaaaaataaacaattcccaatgttccaggtgagggctttgaaaggccttccaaacagctccgtcgcccctagcaactccaccattgggcactgccatgcagagacgtggctggcccagaatggcctgttgccatagcaactggaggcgatggggcagtgaacagaataacaacagcaacaatgcctttgcaggcagcctgctcccctgagcgctgggctggtgatggtcgttggactctgtgagatggagagccaatctcacattcaagtgttcaccaaccactgatgtgtttttatttccttctatatgattttaagatgtgttttctgcattctgtaaagaaacatatcaaactaaataaaagcagtgtctttattacaa

SEQ ID NO: 9126 - DNA, 5673 bp, Homo sapiens
  source 1..5673: mol_type = unassigned DNA
aggcagaagccggcggcgcgcggacagccagtcggcgccgcgcggagctggccgctggattggctgcaacactcgcgtgtcaggcggttgctaggctccggccgcgcgccccgcccttgcgctcagcgccctctcaccgcccggtacgtgctcgcgcgaaggctgcggcgcggcgctcgcgcctcttaggcttggcggtggcggcggcggcagcttcgcgccgaatccccggggagcggcggtggcggcgtcctggggccaggaggagcgaacacctgccgcggtcctcccgccggcgctggatagccctgggatctcctgaatttccaggttgggctactcaggcatggattgactcctacagttcaggcggatggagatcccaccaacccacagcttaattcttcagatgctttatcttcatttctcatgtatcttcagttggcttctaatgctctgtgtgctccgggatggagcaggtgtgcagagggtgagaacccagctctgggaccaagtcacttgcttccttacttagcaagactatcgacttgagcaaacttggacctgggatgaggatgtctgtgggcctctcgctgctgctgcccctctcggggaggacctttctcctcctgctctctgtggttatggctcagtcccactggcccagtgaaccctcagaggctgtcagggactgggaaaaccagcttgaggcatccatgcactcagtgctctcagacctccacgaggctgttcccacagtggttggcattcctgatggcacggctgtcgtcgggcgctcatttcgagtgaccattccaacagatttgattgcctccagtggagatatcatcaaggtatcagcggcagggaaggaggctttgccatcttggctgcactgggactcacagagccacaccctggagggcctcccccttgacactgataagggtgtgcattacatttcagtgagcgctacacggctgggggccaacgggagccacatcccccagacctccagtgtgttctccatcgaggtctaccctgaagaccacagtgagctgcagtcggtgaggacagcctccccagaccctggtgaggtggtatcatctgcctgtgctgcggatgaacctgtgactgttttgacggtgattttggatgccgacctcaccaagatgaccccaaagcaaaggattgacctcctgcacaggatgcggagcttctcagaagtagagcttcacaacatgaaattagtgccggtggtgaataacagactatttgacatgtcggccttcatggctggcccgggaaatgcaaaaaaggtggtggagaatggggcccttctctcctggaagctgggctgctccctgaaccagaacagtgtgcctgacattcatggtgtagaggcccctgccagggagggcgcaatgtctgctcagcttggctaccctgtggtgggttggcacatcgccaataagaagccccctcttcccaaacgcgtccggaggcagatccatgctacacccacacctgtcactgccattgggcccccaaccacggctatccaggagcccccatccaggatcgtgccaacccccacatctccagccattgctcctccaacagagaccatggctcctccagtcagggatcctgttcctgggaaacccacggtcaccatccggactcgaggcgccattattcaaaccccaaccctaggccccatccagcctactcgggtgtcagaagctggcaccacagttcctggccagattcgcccaacgatgaccattcctggctatgtggagcctactgcagttgctacccctcccacaaccaccaccaagaagccacgagtatccacaccaaaaccagcaacgccttcaactgactccaccaccaccacgactcgcaggccaaccaagaaaccacggacaccccggccagtgccccgggtcaccaccaaagtttccatcaccagattggaaactgcctcaccgcctactcgtattcgcaccaccaccagtggagtgccccgtggcggagaacccaaccagcgcccagagctcaagaaccatattgacagggtagatgcctgggttggcacctactttgaggtgaagatcccgtcagacactttctatgaccatgaggacaccaccactgacaagctgaagctgaccctgaaactgcgggagcagcagctggtgggcgagaagtcctgggtacagttcaacagcaacagccagctcatgtatggccttcccgacagcagccacgtgggcaaacacgagtatttcatgcatgccacagacaaggggggcctgtcggctgtggatgccttcgagatccacgtccacaggcgcccccaaggggatagggctcctgcaaggttcaaggccaagtttgtgggtgacccggcactggtgttgaatgacatccacaagaagattgccttggtaaagaaactggccttcgcctttggagaccgaaactgtagcaccatcaccctgcagaatatcacccggggctccatcgtggtggaatggaccaacaacacactgcccttggagccctgccccaaggagcagatcgctgggctgagccgccggatcgctgaggatgatggaaaacctcggcctgccttctccaacgccctagagcctgactttaaggccacaagcatcactgtgacgggctctggcagttgtcggcacctacagtttatccctgtggtaccacccaggagagtgccctcagaggcgccgcccacagaagtgcctgacagggaccctgagaagagcagtgaggatgatgtctacctgcacacagtcattccggccgtggtggtcgcagccatcctgctcattgctggcatcattgccatgatctgctaccgcaagaagcggaagggcaagcttacccttgaggaccaggccaccttcatcaagaagggggtgcctatcatctttgcagacgaactggacgactccaagcccccaccctcctccagcatgccactcattctgcaggaggagaaggctcccctaccccctcctgagtaccccaaccagagtgtgcccgagaccactcctctgaaccaggacaccatgggagagtacacgcccctgcgggatgaggatcccaatgcgcctccctaccagcccccaccgcccttcacagcacccatggagggcaagggctcccgtcccaagaacatgaccccataccggtcacctcctccctatgtcccaccttaacccgcaagcgcctgggtggaggcagggtagggcaggggcctggagacgacatggtgttgtctgtggagaccggtggcctgcagaccattgcccaccgggagccgacacctgacctagcacacactgacacaggggcctggacaagcccgccctctctggtcctcccaaaccccaaagcagctggagagactttggggacttttttatttttattttttgcctaacagcttttggtttgttcatagagaattcttcgcttcatttttgatggctggctctgaaagcaccatgtggagtggaggtggagggagcgaggaaccatgaatgaactcgcaggcagtgccgggcggccccctggctctctgcgttttgcctttaacactaactgtactgttttttctattcacgtgtgtctagctgcaggatgtaacatggaaaacagtaactaaagattaaattcaaaggactttcagaagttaaggttaagtttttacgtttaatctgctgtttacctaaacttgtatgtataatttttgggtgggtatggggaattgctttgctaaaaataagctcccagggtgtttcaaacttagagaagaccaagggacagtattttttatcaaaggaatactattttttcacactacgtcaacttggttgctctgataccccagagcctgattgggggcctcccggccctggctcacgccaagtccctggtgctgggtttgctctcccgctgttgccaggggctggaagctggaggggtctcttgggccatggacatccccacttccagcccatgtacactagtggcccacgaccaaggggtcttcatttccatgaaaaagggactccaagaggcagtggtggctgtggcccccaactttggtgctccagggtgggccagctgcttgtgggggcacctgggaggtcaaaggtctccaccacatcaacctattttgttttaccctttttctgtgcattgtttttttttttcctcctaaaaggaatatcacggttttttgaaacactcagtgggggacattttggtgaagatgcaatatttttatgtcatgtgatgctctttcctcacttgaccttggccgctttgtcctaacagtccacagtcctgccccgacccaccccatcccttttctctggcactccagtcccaggccttgggcctgaactactggaaaaggtctggcggctggggaggagtgccagcaatagttcataataaaaatctgttagctctcaaagctaattttttactaaagtttttatacagcctcaaattgttttattaaaaaaaagatttaaaatggtgatgcttacagcagtttgtacgagctcttaagtgttgattccatggaactgacggctttgcttgttttgattcttttccccctacttttcctaatggtttaaattctggaattacactggggttcttttgccttttttagcagaacatccgtccgtccatctgcatctctgtcccatgactcaggggcgcccactctgcttcgattctcctcctgtggaagaaaccattttgagcatgacttttcttgatgtctgaagcgttattttgggtactttttagggaggaatgcctttcgcaataatgtatccattccctgattgagggtgggtgggtggacccaggctccctttgcacacagagcagctacttctaagccatatcgactgttttgcagaggatttgtgtgtgctgcctcaggaggggagggctggtaggagggggggagaggtctctgtcctactgctctccagagggcatttccccttgcgccttctcccacagggcccagcccctctcccctgccccagtccccagggggtactctggagtgagcagtgcccctgtgggggagcctgtaaatgcgggctcagtggaccactggtgactgggctcatgcctccaagtcagagtttccctggtgccccagagacaggagcacaagtgggatctgacctggtgagattatttctgatgacctcatcaaaaaataaacaattcccaatgttccaggtgagggctttgaaaggccttccaaacagctccgtcgcccctagcaactccaccattgggcactgccatgcagagacgtggctggcccagaatggcctgttgccatagcaactggaggcgatggggcagtgaacagaataacaacagcaacaatgcctttgcaggcagcctgctcccctgagcgctgggctggtgatggtcgttggactctgtgagatggagagccaatctcacattcaagtgttcaccaaccactgatgtgtttttatttccttctatatgattttaagatgtgttttctgcattctgtaaagaaacatatcaaactaaataaaagcagtgtctttattacaa

SEQ ID NO: 9127 - DNA, 5826 bp, Homo sapiens
  source 1..5826: mol_type = unassigned DNA
aggcagaagccggcggcgcgcggacagccagtcggcgccgcgcggagctggccgctggattggctgcaacactcgcgtgtcaggcggttgctaggctccggccgcgcgccccgcccttgcgctcagcgccctctcaccgcccggtacgtgctcgcgcgaaggctgcggcgcggcgctcgcgcctcttaggcttggcggtggcggcggcggcagcttcgcgccgaatccccggggagcggcggtggcggcgtcctggggccaggaggagcgaacacctgccgcggtcctcccgccggcgctggacctggttcacctgcgagtgtatttggatagtgtctccacagaaaatgtcgtctcggcttggaatctttttgccataaattctaaggccactgctctccaggaagataaggcttttaaagcagcctagcactagaaggtgaggcacacgactgtctatcccagatggctgcactggcctaggacagacggttcttcccccagtacgtcaagaccctggagggtgcaagctacagaacagctgggctcctgcattcctcccagaccctgtcttcagtaggacaacaggcaacaaacttaaatttggctctgtgtgctccgggatggagcaggtgtgcagagggtgagaacccagctctgggaccaagtcacttgcttccttacttagcaagactatcgacttgagcaaacttggacctgggatgaggatgtctgtgggcctctcgctgctgctgcccctctcggggaggacctttctcctcctgctctctgtggttatggctcagtcccactggcccagtgaaccctcagaggctgtcagggactgggaaaaccagcttgaggcatccatgcactcagtgctctcagacctccacgaggctgttcccacagtggttggcattcctgatggcacggctgtcgtcgggcgctcatttcgagtgaccattccaacagatttgattgcctccagtggagatatcatcaaggtatcagcggcagggaaggaggctttgccatcttggctgcactgggactcacagagccacaccctggagggcctcccccttgacactgataagggtgtgcattacatttcagtgagcgctacacggctgggggccaacgggagccacatcccccagacctccagtgtgttctccatcgaggtctaccctgaagaccacagtgagctgcagtcggtgaggacagcctccccagaccctggtgaggtggtatcatctgcctgtgctgcggatgaacctgtgactgttttgacggtgattttggatgccgacctcaccaagatgaccccaaagcaaaggattgacctcctgcacaggatgcggagcttctcagaagtagagcttcacaacatgaaattagtgccggtggtgaataacagactatttgacatgtcggccttcatggctggcccgggaaatgcaaaaaaggtggtggagaatggggcccttctctcctggaagctgggctgctccctgaaccagaacagtgtgcctgacattcatggtgtagaggcccctgccagggagggcgcaatgtctgctcagcttggctaccctgtggtgggttggcacatcgccaataagaagccccctcttcccaaacgcgtccggaggcagatccatgctacacccacacctgtcactgccattgggcccccaaccacggctatccaggagcccccatccaggatcgtgccaacccccacatctccagccattgctcctccaacagagaccatggctcctccagtcagggatcctgttcctgggaaacccacggtcaccatccggactcgaggcgccattattcaaaccccaaccctaggccccatccagcctactcgggtgtcagaagctggcaccacagttcctggccagattcgcccaacgatgaccattcctggctatgtggagcctactgcagttgctacccctcccacaaccaccaccaagaagccacgagtatccacaccaaaaccagcaacgccttcaactgactccaccaccaccacgactcgcaggccaaccaagaaaccacggacaccccggccagtgccccgggtcaccaccaaagtttccatcaccagattggaaactgcctcaccgcctactcgtattcgcaccaccaccagtggagtgccccgtggcggagaacccaaccagcgcccagagctcaagaaccatattgacagggtagatgcctgggttggcacctactttgaggtgaagatcccgtcagacactttctatgaccatgaggacaccaccactgacaagctgaagctgaccctgaaactgcgggagcagcagctggtgggcgagaagtcctgggtacagttcaacagcaacagccagctcatgtatggccttcccgacagcagccacgtgggcaaacacgagtatttcatgcatgccacagacaaggggggcctgtcggctgtggatgccttcgagatccacgtccacaggcgcccccaaggggatagggctcctgcaaggttcaaggccaagtttgtgggtgacccggcactggtgttgaatgacatccacaagaagattgccttggtaaagaaactggccttcgcctttggagaccgaaactgtagcaccatcaccctgcagaatatcacccggggctccatcgtggtggaatggaccaacaacacactgcccttggagccctgccccaaggagcagatcgctgggctgagccgccggatcgctgaggatgatggaaaacctcggcctgccttctccaacgccctagagcctgactttaaggccacaagcatcactgtgacgggctctggcagttgtcggcacctacagtttatccctgtggtaccacccaggagagtgccctcagaggcgccgcccacagaagtgcctgacagggaccctgagaagagcagtgaggatgatgtctacctgcacacagtcattccggccgtggtggtcgcagccatcctgctcattgctggcatcattgccatgatctgctaccgcaagaagcggaagggcaagcttacccttgaggaccaggccaccttcatcaagaagggggtgcctatcatctttgcagacgaactggacgactccaagcccccaccctcctccagcatgccactcattctgcaggaggagaaggctcccctaccccctcctgagtaccccaaccagagtgtgcccgagaccactcctctgaaccaggacaccatgggagagtacacgcccctgcgggatgaggatcccaatgcgcctccctaccagcccccaccgcccttcacagcacccatggagggcaagggctcccgtcccaagaacatgaccccataccggtcacctcctccctatgtcccaccttaacccgcaagcgcctgggtggaggcagggtagggcaggggcctggagacgacatggtgttgtctgtggagaccggtggcctgcagaccattgcccaccgggagccgacacctgacctagcacacactgacacaggggcctggacaagcccgccctctctggtcctcccaaaccccaaagcagctggagagactttggggacttttttatttttattttttgcctaacagcttttggtttgttcatagagaattcttcgcttcatttttgatggctggctctgaaagcaccatgtggagtggaggtggagggagcgaggaaccatgaatgaactcgcaggcagtgccgggcggccccctggctctctgcgttttgcctttaacactaactgtactgttttttctattcacgtgtgtctagctgcaggatgtaacatggaaaacagtaactaaagattaaattcaaaggactttcagaagttaaggttaagtttttacgtttaatctgctgtttacctaaacttgtatgtataatttttgggtgggtatggggaattgctttgctaaaaataagctcccagggtgtttcaaacttagagaagaccaagggacagtattttttatcaaaggaatactattttttcacactacgtcaacttggttgctctgataccccagagcctgattgggggcctcccggccctggctcacgccaagtccctggtgctgggtttgctctcccgctgttgccaggggctggaagctggaggggtctcttgggccatggacatccccacttccagcccatgtacactagtggcccacgaccaaggggtcttcatttccatgaaaaagggactccaagaggcagtggtggctgtggcccccaactttggtgctccagggtgggccagctgcttgtgggggcacctgggaggtcaaaggtctccaccacatcaacctattttgttttaccctttttctgtgcattgtttttttttttcctcctaaaaggaatatcacggttttttgaaacactcagtgggggacattttggtgaagatgcaatatttttatgtcatgtgatgctctttcctcacttgaccttggccgctttgtcctaacagtccacagtcctgccccgacccaccccatcccttttctctggcactccagtcccaggccttgggcctgaactactggaaaaggtctggcggctggggaggagtgccagcaatagttcataataaaaatctgttagctctcaaagctaattttttactaaagtttttatacagcctcaaattgttttattaaaaaaaagatttaaaatggtgatgcttacagcagtttgtacgagctcttaagtgttgattccatggaactgacggctttgcttgttttgattcttttccccctacttttcctaatggtttaaattctggaattacactggggttcttttgccttttttagcagaacatccgtccgtccatctgcatctctgtcccatgactcaggggcgcccactctgcttcgattctcctcctgtggaagaaaccattttgagcatgacttttcttgatgtctgaagcgttattttgggtactttttagggaggaatgcctttcgcaataatgtatccattccctgattgagggtgggtgggtggacccaggctccctttgcacacagagcagctacttctaagccatatcgactgttttgcagaggatttgtgtgtgctgcctcaggaggggagggctggtaggagggggggagaggtctctgtcctactgctctccagagggcatttccccttgcgccttctcccacagggcccagcccctctcccctgccccagtccccagggggtactctggagtgagcagtgcccctgtgggggagcctgtaaatgcgggctcagtggaccactggtgactgggctcatgcctccaagtcagagtttccctggtgccccagagacaggagcacaagtgggatctgacctggtgagattatttctgatgacctcatcaaaaaataaacaattcccaatgttccaggtgagggctttgaaaggccttccaaacagctccgtcgcccctagcaactccaccattgggcactgccatgcagagacgtggctggcccagaatggcctgttgccatagcaactggaggcgatggggcagtgaacagaataacaacagcaacaatgcctttgcaggcagcctgctcccctgagcgctgggctggtgatggtcgttggactctgtgagatggagagccaatctcacattcaagtgttcaccaaccactgatgtgtttttatttccttctatatgattttaagatgtgttttctgcattctgtaaagaaacatatcaaactaaataaaagcagtgtctttattacaa

SEQ ID NO: 9128 - DNA, 3271 bp, Homo sapiens
  source 1..3271: mol_type = unassigned DNA
ggggcgcccaagatggcggcgggcggcgcggagggcggctcgggccccggcgccgccatgggggactgcgcggagattaagtcgcaattccgcacgcgcgagggtttctacaagctactcccgggcgacggcgccgctcgcaggtcgggtccggcttccgcccagactccggtgccgcctcagccaccgcagcccccgcccggccctgcctccgcctccggtcccggcgctgcaggccccgcgtcgtccccgccgcccgcaggccccggacccgggcccgccctgcccgccgtgcgcctcagcctcgtgcgcctcggggagccggacagcgccggggccggggagccgcccgccacgcccgcggggctgggctcggggggagaccgcgtctgcttcaacttgggccgtgagctctatttctacccaggctgctgtcgtcgtgggagccaacggtccattgacctcaacaagccaattgacaagcggatctacaagggcacccagcccacctgccacgatttcaaccagttcactgctgccaccgagaccatctcgctgctggtgggcttctcagcgggtcaagtgcagtacctggatctcatcaaaaaggacaccagcaagctgttcaatgaggagcggttgatcgacaagaccaaggtgacatatctgaagtggctgcctgagtcggagagcctgttcctggcatcacacgccagtggccacctgtacctgtacaacgtcagccacccctgcgcctcggccccgccccagtacagcctgctgaagcagggcgagggcttctctgtctatgctgccaagagcaaggcaccccgcaacccgctggccaagtgggcggtgggtgaggggcccctcaacgagttcgccttctcgcccgatggccggcacctggcctgtgtgagccaggatggctgcctgcgcgtcttccacttcgactccatgctcctgcgtgggctcatgaagagctactttgggggcctgctgtgtgtgtgctggagccctgacggccgctacgtggtgacgggtggcgaagatgacctggtcaccgtgtggtccttcaccgagggccgcgtggtggctcgaggccatggccacaagtcctgggtcaacgctgtggcctttgacccctacaccacaagggcagaggaggcggcgacagcagccggtgctgatggggagcggagcggcgaagaggaggaggaggagcccgaggctgcgggcacaggctcggccgggggcgccccgctctctccactgcccaaggctggctccattacttaccgctttggctcggcgggccaggacacgcagttctgcctgtgggacctcactgaagacgtgctctacccgcacccccccctggcccgcacccgcaccctccctggcacacctggcaccacgccaccggccgccagcagctcgaggggtggcgagcctggcccaggccccctgcctcgctcgctgtcccgctccaacagtctcccgcacccagctggcgggggcaaggcgggcggcccgggtgtggcggcagagcctggcacaccattcagcattggccgcttcgccacgctcacactgcaggagcggcgggaccggggggcagagaaggagcacaagcgctaccacagcctgggcaacatcagccggggtggcagtggcggcagtggcagtggtggggagaagcccagcggccctgttccccgcagccgcctggaccccgccaaggtgctgggcactgcgctgtgcccgcgcatccacgaggtgcccctgctggagccccttgtgtgcaagaagatcgcccaggagcggctcacagtcctcctgttcctggaggactgcatcatcactgcctgccaggagggcctcatctgcacctgggcccggccgggcaaggcgttcacagacgaggagaccgaggcccagacaggggaaggaagttggcccaggtcacccagcaagtcagtggtagagggcatctcctcccaaccaggcaactccccgagtggcacagtggtgtgaagccatggatatcgggcccccccaaccccatgcccccagcctcctagccataaccctccctgctgacctcacagatcaacgtattaacaagactaaccatgatggatggactgctccagtccccccacctgcacaaaatttgggggccccccagactggcccggacacgggcgatgtaatagcccttgtggcctcagccttgtcccccacccactgccaagtacaatgacctcttcctctgaaacatcagtgttaccctcatccctgtccccagcatgtgactggtcactcctggggagagactccccgcccctgccacaagagccccaggtctgcagtgtgcccctcagttgagtgggcagggccgggggtggtccagccctcgcccggcccccaccccagctgcccttgctattgtctgtgcttttgaagagtgttaaattatggaagcccctcaggttcctccctgtcccgcaggacctcttatttatactaaagttccctgttttctcagcgggtctgtccccttcggaggagatgatgtagaggacctgtgtgtgtactctgtggttctaggcagtccgctttccccagaggaggagtgcaggcctgctcccagcccagcgcctcccaccccttttcatagcaggaaaagccggagcccagggagggaacggacctgcgagtcacacaactggtgacccacaccagcggctggagcaggaccctcttggggagaagagcatcctgcccgcagccagggcccctcatcaaagtcctcggtgttttttaaattatcagaactgcccaggaccacgtttcccaggccctgcccagctgggactcctcggtccttgcctcctagtttctcaggcctggccctctcaaggcccaggcaccccaggccggttggaggccccgacttccactctggagaaccgtccaccctggaaagaagagctcagattcctcttggctctcggagccgcagggagtgtgtcttcccgcgccaccctccaccccccgaaatgtttctgtttctaatcccagcctgggcaggaatgtggctccccggccaggggccaaggagctattttggggtctcgtttgcccagggagggcttggctccaccactttcctcccccagcctttgggcagcaggtcacccctgttcaggctctgagggtgccccctcctggtcctgtcctcaccaccccttccccacctcctggg

SEQ ID NO: 9129 - DNA, 2863 bp, Homo sapiens
  source 1..2863: mol_type = unassigned DNA
aggggggctggaccaaggggtggggagaaggggaggaggcctcggccggccgcagagagaagtggccagagaggcccaggggacagccagggacaggcagacatgcagccagggctccagggcctggacaggggctgccaggccctgtgacaggaggaccccgagcccccggcccggggaggggccatggtgctgcctgtccaacatgtcagccgaggtgcggctgaggcggctccagcagctggtgttggacccgggcttcctggggctggagcccctgctcgaccttctcctgggcgtccaccaggagctgggcgcctccgaactggcccaggacaagtacgtggccgacttcttgcagtgggcggagcccatcgtggtgaggcttaaggaggtccgactgcagagggacgacttcgagattctgaaggtgatcggacgcggggcgttcagcgaggtagcggtagtgaagatgaagcagacgggccaggtgtatgccatgaagatcatgaacaagtgggacatgctgaagaggggcgaggtgtcgtgcttccgtgaggagagggacgtgttggtgaatggggaccggcggtggatcacgcagctgcacttcgccttccaggatgagaactacctgtacctggtcatggagtattacgtgggcggggacctgctgacactgctgagcaagtttggggagcggattccggccgagatggcgcgcttctacctggcggagattgtcatggccatagactcggtgcaccggcttggctacgtgcacagggacatcaaacccgacaacatcctgctggaccgctgtggccacatccgcctggccgacttcggctcttgcctcaagctgcgggcagatggaacggtgcggtcgctggtggctgtgggcaccccagactacctgtcccccgagatcctgcaggctgtgggcggtgggcctgggacaggcagctacgggcccgagtgtgactggtgggcgctgggtgtattcgcctatgaaatgttctatgggcagacgcccttctacgcggattccacggcggagacctatggcaagatcgtccactacaaggagcacctctctctgccgctggtggacgaaggggtccctgaggaggctcgagacttcattcagcggttgctgtgtcccccggagacacggctgggccggggtggagcaggcgacttccggacacatcccttcttctttggcctcgactgggatggtctccgggacagcgtgcccccctttacaccggatttcgaaggtgccaccgacacatgcaacttcgacttggtggaggacgggctcactgccatggtgagcgggggcggggagacactgtcggacattcgggaaggtgcgccgctaggggtccacctgccttttgtgggctactcctactcctgcatggccctcagggacagtgaggtcccaggccccacacccatggaactggaggccgagcagctgcttgagccacacgtgcaagcgcccagcctggagccctcggtgtccccacaggatgaaacagctgaagtggcagttccagcggctgtccctgcggcagaggctgaggccgaggtgacgctgcgggagctccaggaagccctggaggaggaggtgctcacccggcagagcctgagccgggagatggaggccatccgcacggacaaccagaacttcgccagtcaactacgcgaggcagaggctcggaaccgggacctagaggcacacgtccggcagttgcaggagcggatggagttgctgcaggcagagggagccacagctgtcacgggggtccccagtccccgggccacggatccaccttcccatctagatggccccccggccgtggctgtgggccagtgcccgctggtggggccaggccccatgcaccgccgccacctgctgctccctgccagggtccctaggcctggcctatcggaggcgctttccctgctcctgttcgccgttgttctgtctcgtgccgccgccctgggctgcattgggttggtggcccacgccggccaactcaccgcagtctggcgccgcccaggagccgcccgcgctccctgaaccctagaactgtcttcgactccggggccccgttggaagactgagtgcccggggcacggcacagaagccgcgcccaccgcctgccagttcacaaccgctccgagcgtgggtctccgcccagctccagtcctgtgatccgggcccgccccctagcggccggggagggaggggccgggtccgcggccggcgaacggggctcgaagggtccttgtagccgggaatgctgctgctgctgctgctgctgctgctgctgctgctgctgctgctgctgctgctgctgctggggggatcacagaccatttctttctttcggccaggctgaggccctgacgtggatgggcaaactgcaggcctgggaaggcagcaagccgggccgtccgtgttccatcctccacgcacccccacctatcgttggttcgcaaagtgcaaagctttcttgtgcatgacgccctgctctggggagcgtctggcgcgatctctgcctgcttactcgggaaatttgcttttgccaaacccgctttttcggggatcccgcgcccccctcctcacttgcgctgctctcggagccccagccggctccgcccgcttcggcggtttggatatttattgacctcgtcctccgactcgctgacaggctacaggacccccaacaaccccaatccacgttttggatgcactgagaccccgacattcctcggtatttattgtctgtccccacctaggacccccacccccgaccctcgcgaataaaaggccctccatctgccc

SEQ ID NO: 9130 - DNA, 2872 bp, Homo sapiens
  source 1..2872: mol_type = unassigned DNA
ggctggaccaaggggtggggagaaggggaggaggcctcggccggccgcagagagaagtggccagagaggcccaggggacagccagggacaggcagacatgcagccagggctccagggcctggacaggggctgccaggccctgtgacaggaggaccccgagcccccggcccggggaggggccatggtgctgcctgtccaacatgtcagccgaggtgcggctgaggcggctccagcagctggtgttggacccgggcttcctggggctggagcccctgctcgaccttctcctgggcgtccaccaggagctgggcgcctccgaactggcccaggacaagtacgtggccgacttcttgcagtgggccccaaatccagggttttccaaagtgtggttcaagaaccacctgcatctgaatctagagcggagcccatcgtggtgaggcttaaggaggtccgactgcagagggacgacttcgagattctgaaggtgatcggacgcggggcgttcagcgaggtagcggtagtgaagatgaagcagacgggccaggtgtatgccatgaagatcatgaacaagtgggacatgctgaagaggggcgaggtgtcgtgcttccgtgaggagagggacgtgttggtgaatggggaccggcggtggatcacgcagctgcacttcgccttccaggatgagaactacctgtacctggtcatggagtattacgtgggcggggacctgctgacactgctgagcaagtttggggagcggattccggccgagatggcgcgcttctacctggcggagattgtcatggccatagactcggtgcaccggcttggctacgtgcacagggacatcaaacccgacaacatcctgctggaccgctgtggccacatccgcctggccgacttcggctcttgcctcaagctgcgggcagatggaacggtgcggtcgctggtggctgtgggcaccccagactacctgtcccccgagatcctgcaggctgtgggcggtgggcctgggacaggcagctacgggcccgagtgtgactggtgggcgctgggtgtattcgcctatgaaatgttctatgggcagacgcccttctacgcggattccacggcggagacctatggcaagatcgtccactacaaggagcacctctctctgccgctggtggacgaaggggtccctgaggaggctcgagacttcattcagcggttgctgtgtcccccggagacacggctgggccggggtggagcaggcgacttccggacacatcccttcttctttggcctcgactgggatggtctccgggacagcgtgcccccctttacaccggatttcgaaggtgccaccgacacatgcaacttcgacttggtggaggacgggctcactgccatggtgagcgggggcggggagacactgtcggacattcgggaaggtgcgccgctaggggtccacctgccttttgtgggctactcctactcctgcatggccctcagggacagtgaggtcccaggccccacacccatggaactggaggccgagcagctgcttgagccacacgtgcaagcgcccagcctggagccctcggtgtccccacaggatgaaacagctgaagtggcagttccagcggctgtccctgcggcagaggctgaggccgaggtgacgctgcgggagctccaggaagccctggaggaggaggtgctcacccggcagagcctgagccgggagatggaggccatccgcacggacaaccagaacttcgccagtcaactacgcgaggcagaggctcggaaccgggacctagaggcacacgtccggcagttgcaggagcggatggagttgctgcaggcagagggagccacagctgtcacgggggtccccagtccccgggccacggatccaccttcccatctagatggccccccggccgtggctgtgggccagtgcccgctggtggggccaggccccatgcaccgccgccacctgctgctccctgccagggtccctaggcctggcctatcggaggcgctttccctgctcctgttcgccgttgttctgtctcgtgccgccgccctgggctgcattgggttggtggcccacgccggccaactcaccgcagtctggcgccgcccaggagccgcccgcgctccctgaaccctagaactgtcttcgactccggggccccgttggaagactgagtgcccggggcacggcacagaagccgcgcccaccgcctgccagttcacaaccgctccgagcgtgggtctccgcccagctccagtcctgtgatccgggcccgccccctagcggccggggagggaggggccgggtccgcggccggcgaacggggctcgaagggtccttgtagccgggaatgctgctgctgctgctggggggatcacagaccatttctttctttcggccaggctgaggccctgacgtggatgggcaaactgcaggcctgggaaggcagcaagccgggccgtccgtgttccatcctccacgcacccccacctatcgttggttcgcaaagtgcaaagctttcttgtgcatgacgccctgctctggggagcgtctggcgcgatctctgcctgcttactcgggaaatttgcttttgccaaacccgctttttcggggatcccgcgcccccctcctcacttgcgctgctctcggagccccagccggctccgcccgcttcggcggtttggatatttattgacctcgtcctccgactcgctgacaggctacaggacccccaacaaccccaatccacgttttggatgcactgagaccccgacattcctcggtatttattgtctgtccccacctaggacccccacccccgaccctcgcgaataaaaggccctccatctgccc

SEQ ID NO: 9131 - DNA, 3232 bp, Homo sapiens
  source 1..3232: mol_type = unassigned DNA
gccacaagcctccaccccagctggtcccccacccaggctgcccagtttaacattcctagtcataggaccttgacttctgagaggcctgattgtcatctgtaaataaggggtaggactaaagcactcctcctggaggactgagagatgggctggaccggagcacttgagtctgggatatgtgaccatgctacctttgtctccctgtcctgttccttcccccagccccaaatccagggttttccaaagtgtggttcaagaaccacctgcatctgaatctagaggtactggatacaaccccacgtctgggccgttacccaggacattctacatgagaacgtgggggtggggccctggctgcacctgaactgtcacctggagtcagggtggaaggtggaagaactgggtcttatttccttctccccttgttctttagggtctgtccttctgcagactccgttaccccaccctaaccatcctgcacacccttggagccctctgggccaatgccctgtcccgcaaagggcttctcaggcatctcacctctatgggagggcatttttggcccccagaaccttacacggtgtttatgtggggaagcccctgggaagcagacagtcctagggtgaagctgagaggcagagagaaggggagacagacagagggtggggctttcccccttgtctccagtgccctttctggtgaccctcggttcttttcccccaccacccccccagcggagcccatcgtggtgaggcttaaggaggtccgactgcagagggacgacttcgagattctgaaggtgatcggacgcggggcgttcagcgaggtagcggtagtgaagatgaagcagacgggccaggtgtatgccatgaagatcatgaacaagtgggacatgctgaagaggggcgaggtgtcgtgcttccgtgaggagagggacgtgttggtgaatggggaccggcggtggatcacgcagctgcacttcgccttccaggatgagaactacctgtacctggtcatggagtattacgtgggcggggacctgctgacactgctgagcaagtttggggagcggattccggccgagatggcgcgcttctacctggcggagattgtcatggccatagactcggtgcaccggcttggctacgtgcacagggacatcaaacccgacaacatcctgctggaccgctgtggccacatccgcctggccgacttcggctcttgcctcaagctgcgggcagatggaacggtgcggtcgctggtggctgtgggcaccccagactacctgtcccccgagatcctgcaggctgtgggcggtgggcctgggacaggcagctacgggcccgagtgtgactggtgggcgctgggtgtattcgcctatgaaatgttctatgggcagacgcccttctacgcggattccacggcggagacctatggcaagatcgtccactacaaggagcacctctctctgccgctggtggacgaaggggtccctgaggaggctcgagacttcattcagcggttgctgtgtcccccggagacacggctgggccggggtggagcaggcgacttccggacacatcccttcttctttggcctcgactgggatggtctccgggacagcgtgcccccctttacaccggatttcgaaggtgccaccgacacatgcaacttcgacttggtggaggacgggctcactgccatggtgagcgggggcggggagacactgtcggacattcgggaaggtgcgccgctaggggtccacctgccttttgtgggctactcctactcctgcatggccctcagggacagtgaggtcccaggccccacacccatggaactggaggccgagcagctgcttgagccacacgtgcaagcgcccagcctggagccctcggtgtccccacaggatgaaacagctgaagtggcagttccagcggctgtccctgcggcagaggctgaggccgaggtgacgctgcgggagctccaggaagccctggaggaggaggtgctcacccggcagagcctgagccgggagatggaggccatccgcacggacaaccagaacttcgccagtcaactacgcgaggcagaggctcggaaccgggacctagaggcacacgtccggcagttgcaggagcggatggagttgctgcaggcagagggagccacagctgtcacgggggtccccagtccccgggccacggatccaccttcccatctagatggccccccggccgtggctgtgggccagtgcccgctggtggggccaggccccatgcaccgccgccacctgctgctccctgccagggtccctaggcctggcctatcggaggcgctttccctgctcctgttcgccgttgttctgtctcgtgccgccgccctgggctgcattgggttggtggcccacgccggccaactcaccgcagtctggcgccgcccaggagccgcccgcgctccctgaaccctagaactgtcttcgactccggggccccgttggaagactgagtgcccggggcacggcacagaagccgcgcccaccgcctgccagttcacaaccgctccgagcgtgggtctccgcccagctccagtcctgtgatccgggcccgccccctagcggccggggagggaggggccgggtccgcggccggcgaacggggctcgaagggtccttgtagccgggaatgctgctgctgctgctgctgctgctgctgctgctgctgctgctgctgctgctgctgctgctggggggatcacagaccatttctttctttcggccaggctgaggccctgacgtggatgggcaaactgcaggcctgggaaggcagcaagccgggccgtccgtgttccatcctccacgcacccccacctatcgttggttcgcaaagtgcaaagctttcttgtgcatgacgccctgctctggggagcgtctggcgcgatctctgcctgcttactcgggaaatttgcttttgccaaacccgctttttcggggatcccgcgcccccctcctcacttgcgctgctctcggagccccagccggctccgcccgcttcggcggtttggatatttattgacctcgtcctccgactcgctgacaggctacaggacccccaacaaccccaatccacgttttggatgcactgagaccccgacattcctcggtatttattgtctgtccccacctaggacccccacccccgaccctcgcgaataaaaggccctccatctgccc

SEQ ID NO: 9132 - DNA, 2550 bp, Homo sapiens
  source 1..2550: mol_type = unassigned DNA
atgggagggcatttttggcccccagaaccttacacggtgtttatgtggggaagcccctgggaagcagacagtcctagggtgaagctgagaggcagagagaaggggagacagacagagggtggggctttcccccttgtctccagtgccctttctggtgaccctcggttcttttcccccaccacccccccagcggagcccatcgtggtgaggcttaaggaggtccgactgcagagggacgacttcgagattctgaaggtgatcggacgcggggcgttcagcgaggtagcggtagtgaagatgaagcagacgggccaggtgtatgccatgaagatcatgaacaagtgggacatgctgaagaggggcgaggtgtcgtgcttccgtgaggagagggacgtgttggtgaatggggaccggcggtggatcacgcagctgcacttcgccttccaggatgagaactacctgtacctggtcatggagtattacgtgggcggggacctgctgacactgctgagcaagtttggggagcggattccggccgagatggcgcgcttctacctggcggagattgtcatggccatagactcggtgcaccggcttggctacgtgcacagggacatcaaacccgacaacatcctgctggaccgctgtggccacatccgcctggccgacttcggctcttgcctcaagctgcgggcagatggaacggtgcggtcgctggtggctgtgggcaccccagactacctgtcccccgagatcctgcaggctgtgggcggtgggcctgggacaggcagctacgggcccgagtgtgactggtgggcgctgggtgtattcgcctatgaaatgttctatgggcagacgcccttctacgcggattccacggcggagacctatggcaagatcgtccactacaaggagcacctctctctgccgctggtggacgaaggggtccctgaggaggctcgagacttcattcagcggttgctgtgtcccccggagacacggctgggccggggtggagcaggcgacttccggacacatcccttcttctttggcctcgactgggatggtctccgggacagcgtgcccccctttacaccggatttcgaaggtgccaccgacacatgcaacttcgacttggtggaggacgggctcactgccatggtgagcgggggcggggagacactgtcggacattcgggaaggtgcgccgctaggggtccacctgccttttgtgggctactcctactcctgcatggccctcagggacagtgaggtcccaggccccacacccatggaactggaggccgagcagctgcttgagccacacgtgcaagcgcccagcctggagccctcggtgtccccacaggatgaaacagctgaagtggcagttccagcggctgtccctgcggcagaggctgaggccgaggtgacgctgcgggagctccaggaagccctggaggaggaggtgctcacccggcagagcctgagccgggagatggaggccatccgcacggacaaccagaacttcgccagtcaactacgcgaggcagaggctcggaaccgggacctagaggcacacgtccggcagttgcaggagcggatggagttgctgcaggcagagggagccacagctgtcacgggggtccccagtccccgggccacggatccaccttcccatgtccctaggcctggcctatcggaggcgctttccctgctcctgttcgccgttgttctgtctcgtgccgccgccctgggctgcattgggttggtggcccacgccggccaactcaccgcagtctggcgccgcccaggagccgcccgcgctccctgaaccctagaactgtcttcgactccggggccccgttggaagactgagtgcccggggcacggcacagaagccgcgcccaccgcctgccagttcacaaccgctccgagcgtgggtctccgcccagctccagtcctgtgatccgggcccgccccctagcggccggggagggaggggccgggtccgcggccggcgaacggggctcgaagggtccttgtagccgggaatgctgctgctgctggggggatcacagaccatttctttctttcggccaggctgaggccctgacgtggatgggcaaactgcaggcctgggaaggcagcaagccgggccgtccgtgttccatcctccacgcacccccacctatcgttggttcgcaaagtgcaaagctttcttgtgcatgacgccctgctctggggagcgtctggcgcgatctctgcctgcttactcgggaaatttgcttttgccaaacccgctttttcggggatcccgcgcccccctcctcacttgcgctgctctcggagccccagccggctccgcccgcttcggcggtttggatatttattgacctcgtcctccgactcgctgacaggctacaggacccccaacaaccccaatccacgttttggatgcactgagaccccgacattcctcggtatttattgtctgtccccacctaggacccccacccccgaccctcgcgaataaaaggccctccatctgccc

SEQ ID NO: 9133 - DNA, 1982 bp, Homo sapiens
  source 1..1982: mol_type = unassigned DNA
gagaggcccaggggacagccagggacaggcagacatgcagccagggctccagggcctggacaggggctgccaggccctgtgacaggaggaccccgagcccccggcccggggaggggccatggtgctgcctgtccaacatgtcagccgaggtgcggctgaggcggctccagcagctggtgttggacccgggcttcctggggctggagcccctgctcgaccttctcctgggcgtccaccaggagctgggcgcctccgaactggcccaggacaagtacgtggccgacttcttgcagtgggcggagcccatcgtggtgaggcttaaggaggtccgactgcagagggacgacttcgagattctgaaggtgatcggacgcggggcgttcagcgaggtagcggtagtgaagatgaagcagacgggccaggtgtatgccatgaagatcatgaacaagtgggacatgctgaagaggggcgaggtgtcgtgcttccgtgaggagagggacgtgttggtgaatggggaccggcggtggatcacgcagctgcacttcgccttccaggatgagaactacctgtacctggtcatggagtattacgtgggcggggacctgctgacactgctgagcaagtttggggagcggattccggccgagatggcgcgcttctacctggcggagattgtcatggccatagactcggtgcaccggcttggctacgtgcacagggacatcaaacccgacaacatcctgctggaccgctgtggccacatccgcctggccgacttcggctcttgcctcaagctgcgggcagatggaacggtgcggtcgctggtggctgtgggcaccccagactacctgtcccccgagatcctgcaggctgtgggcggtgggcctgggacaggcagctacgggcccgagtgtgactggtgggcgctgggtgtattcgcctatgaaatgttctatgggcagacgcccttctacgcggattccacggcggagacctatggcaagatcgtccactacaaggagcacctctctctgccgctggtggacgaaggggtccctgaggaggctcgagacttcattcagcggttgctgtgtcccccggagacacggctgggccggggtggagcaggcgacttccggacacatcccttcttctttggcctcgactgggatggtctccgggacagcgtgcccccctttacaccggatttcgaaggtgccaccgacacatgcaacttcgacttggtggaggacgggctcactgccatggagacactgtcggacattcgggaaggtgcgccgctaggggtccacctgccttttgtgggctactcctactcctgcatggccctcagggacagtgaggtcccaggccccacacccatggaactggaggccgagcagctgcttgagccacacgtgcaagcgcccagcctggagccctcggtgtccccacaggatgaaacagctgaagtggcagttccagcggctgtccctgcggcagaggctgaggccgaggtgacgctgcgggagctccaggaagccctggaggaggaggtgctcacccggcagagcctgagccgggagatggaggccatccgcacggacaaccagaacttcgccagtcaactacgcgaggcagaggctcggaaccgggacctagaggcacacgtccggcagttgcaggagcggatggagttgctgcaggcagagggagccacaggtccctaggcctggcctatcggaggcgctttccctgctcctgttcgccgttgttctgtctcgtgccgccgccctgggctgcattgggttggtggcccacgccggccaactcaccgcagtctggcgccgcccaggagccgcccgcgctccctgaaccctagaactgtcttcgactccggggccccgttggaagactgagtgcccggggcacggcacagaagccgcgcccaccgcctgccagttcacaaccgctccgagcgt

SEQ ID NO: 9134 - DNA, 2712 bp, Homo sapiens
  source 1..2712: mol_type = unassigned DNA
gggacagccagggacaggcagacatgcagccagggctccagggcctggacaggggctgccaggccctgtgacaggaggaccccgagcccccggcccggggaggggccatggtgctgcctgtccaacatgtcagccgaggtgcggctgaggcggctccagcagctggtgttggacccgggcttcctggggctggagcccctgctcgaccttctcctgggcgtccaccaggagctgggcgcctccgaactggcccaggacaagtacgtggccgacttcttgcagtgggcggagcccatcgtggtgaggcttaaggaggtccgactgcagagggacgacttcgagattctgaaggtgatcggacgcggggcgttcagcgaggtagcggtagtgaagatgaagcagacgggccaggtgtatgccatgaagatcatgaacaagtgggacatgctgaagaggggcgaggtgtcgtgcttccgtgaggagagggacgtgttggtgaatggggaccggcggtggatcacgcagctgcacttcgccttccaggatgagaactacctgtacctggtcatggagtattacgtgggcggggacctgctgacactgctgagcaagtttggggagcggattccggccgagatggcgcgcttctacctggcggagattgtcatggccatagactcggtgcaccggcttggctacgtgcacagggacatcaaacccgacaacatcctgctggaccgctgtggccacatccgcctggccgacttcggctcttgcctcaagctgcgggcagatggaacggtgcggtcgctggtggctgtgggcaccccagactacctgtcccccgagatcctgcaggctgtgggcggtgggcctgggacaggcagctacgggcccgagtgtgactggtgggcgctgggtgtattcgcctatgaaatgttctatgggcagacgcccttctacgcggattccacggcggagacctatggcaagatcgtccactacaaggagcacctctctctgccgctggtggacgaaggggtccctgaggaggctcgagacttcattcagcggttgctgtgtcccccggagacacggctgggccggggtggagcaggcgacttccggacacatcccttcttctttggcctcgactgggatggtctccgggacagcgtgcccccctttacaccggatttcgaaggtgccaccgacacatgcaacttcgacttggtggaggacgggctcactgccatggagacactgtcggacattcgggaaggtgcgccgctaggggtccacctgccttttgtgggctactcctactcctgcatggccctcagggacagtgaggtcccaggccccacacccatggaactggaggccgagcagctgcttgagccacacgtgcaagcgcccagcctggagccctcggtgtccccacaggatgaaacagctgaagtggcagttccagcggctgtccctgcggcagaggctgaggccgaggtgacgctgcgggagctccaggaagccctggaggaggaggtgctcacccggcagagcctgagccgggagatggaggccatccgcacggacaaccagaacttcgccagtcaactacgcgaggcagaggctcggaaccgggacctagaggcacacgtccggcagttgcaggagcggatggagttgctgcaggcagagggagccacagctgtcacgggggtccccagtccccgggccacggatccaccttcccatctagatggccccccgtggctgtgggccagtgcccgctggtggggccagatgcaccgccgccacctgctgctccctgccagggtccctaggcctggcctatcggaggcgctttccctgctcctgttcgccgttgttctgtctcgtgccgccgccctgggctgcattgggttggtggcccacgccggccaactcaccgcagtctggcgccgcccaggagccgcccgcgctccctgaaccctagaactgtcttcgactccggggccccgttggaagactgagtgcccggggcacggcacagaagccgcgcccaccgcctgccagttcacaaccgctccgagcgtgggtctccgcccagctccagtcctgtgatccgggcccgccccctagcggccggggagggaggggccgggtccgcggccggcgaacggggctcgaagggtccttgtagccgggaatgctgctgctgctggggggatcacagaccatttctttctttcggccaggctgaggccctgacgtggatgggcaaactgcaggcctgggaaggcagcaagccgggccgtccgtgttccatcctccacgcacccccacctatcgttggttcgcaaagtgcaaagctttcttgtgcatgacgccctgctctggggagcgtctggcgcgatctctgcctgcttactcgggaaatttgcttttgccaaacccgctttttcggggatcccgcgcccccctcctcacttgcgctgctctcggagccccagccggctccgcccgcttcggcggtttggatatttattgacctcgtcctccgactcgctgacaggctacaggacccccaacaaccccaatccacgttttggatgcactgagaccccgacattcctcggtatttattgtctgtccccacctaggacccccacccccgaccctcgcgaataaaaggccctccatctgccc

SEQ ID NO: 9135 - DNA, 2848 bp, Homo sapiens
  source 1..2848: mol_type = unassigned DNA
aggggggctggaccaaggggtggggagaaggggaggaggcctcggccggccgcagagagaagtggccagagaggcccaggggacagccagggacaggcagacatgcagccagggctccagggcctggacaggggctgccaggccctgtgacaggaggaccccgagcccccggcccggggaggggccatggtgctgcctgtccaacatgtcagccgaggtgcggctgaggcggctccagcagctggtgttggacccgggcttcctggggctggagcccctgctcgaccttctcctgggcgtccaccaggagctgggcgcctccgaactggcccaggacaagtacgtggccgacttcttgcagtgggcggagcccatcgtggtgaggcttaaggaggtccgactgcagagggacgacttcgagattctgaaggtgatcggacgcggggcgttcagcgaggtagcggtagtgaagatgaagcagacgggccaggtgtatgccatgaagatcatgaacaagtgggacatgctgaagaggggcgaggtgtcgtgcttccgtgaggagagggacgtgttggtgaatggggaccggcggtggatcacgcagctgcacttcgccttccaggatgagaactacctgtacctggtcatggagtattacgtgggcggggacctgctgacactgctgagcaagtttggggagcggattccggccgagatggcgcgcttctacctggcggagattgtcatggccatagactcggtgcaccggcttggctacgtgcacagggacatcaaacccgacaacatcctgctggaccgctgtggccacatccgcctggccgacttcggctcttgcctcaagctgcgggcagatggaacggtgcggtcgctggtggctgtgggcaccccagactacctgtcccccgagatcctgcaggctgtgggcggtgggcctgggacaggcagctacgggcccgagtgtgactggtgggcgctgggtgtattcgcctatgaaatgttctatgggcagacgcccttctacgcggattccacggcggagacctatggcaagatcgtccactacaaggagcacctctctctgccgctggtggacgaaggggtccctgaggaggctcgagacttcattcagcggttgctgtgtcccccggagacacggctgggccggggtggagcaggcgacttccggacacatcccttcttctttggcctcgactgggatggtctccgggacagcgtgcccccctttacaccggatttcgaaggtgccaccgacacatgcaacttcgacttggtggaggacgggctcactgccatggagacactgtcggacattcgggaaggtgcgccgctaggggtccacctgccttttgtgggctactcctactcctgcatggccctcagggacagtgaggtcccaggccccacacccatggaactggaggccgagcagctgcttgagccacacgtgcaagcgcccagcctggagccctcggtgtccccacaggatgaaacagctgaagtggcagttccagcggctgtccctgcggcagaggctgaggccgaggtgacgctgcgggagctccaggaagccctggaggaggaggtgctcacccggcagagcctgagccgggagatggaggccatccgcacggacaaccagaacttcgccagtcaactacgcgaggcagaggctcggaaccgggacctagaggcacacgtccggcagttgcaggagcggatggagttgctgcaggcagagggagccacagctgtcacgggggtccccagtccccgggccacggatccaccttcccatctagatggccccccggccgtggctgtgggccagtgcccgctggtggggccaggccccatgcaccgccgccacctgctgctccctgccagggtccctaggcctggcctatcggaggcgctttccctgctcctgttcgccgttgttctgtctcgtgccgccgccctgggctgcattgggttggtggcccacgccggccaactcaccgcagtctggcgccgcccaggagccgcccgcgctccctgaaccctagaactgtcttcgactccggggccccgttggaagactgagtgcccggggcacggcacagaagccgcgcccaccgcctgccagttcacaaccgctccgagcgtgggtctccgcccagctccagtcctgtgatccgggcccgccccctagcggccggggagggaggggccgggtccgcggccggcgaacggggctcgaagggtccttgtagccgggaatgctgctgctgctgctgctgctgctgctgctgctgctgctgctgctgctgctgctgctgctggggggatcacagaccatttctttctttcggccaggctgaggccctgacgtggatgggcaaactgcaggcctgggaaggcagcaagccgggccgtccgtgttccatcctccacgcacccccacctatcgttggttcgcaaagtgcaaagctttcttgtgcatgacgccctgctctggggagcgtctggcgcgatctctgcctgcttactcgggaaatttgcttttgccaaacccgctttttcggggatcccgcgcccccctcctcacttgcgctgctctcggagccccagccggctccgcccgcttcggcggtttggatatttattgacctcgtcctccgactcgctgacaggctacaggacccccaacaaccccaatccacgttttggatgcactgagaccccgacattcctcggtatttattgtctgtccccacctaggacccccacccccgaccctcgcgaataaaaggccctccatctgccc

SEQ ID NO: 9136 - DNA, 2844 bp, Homo sapiens
  source 1..2844: mol_type = unassigned DNA
aggggggctggaccaaggggtggggagaaggggaggaggcctcggccggccgcagagagaagtggccagagaggcccaggggacagccagggacaggcagacatgcagccagggctccagggcctggacaggggctgccaggccctgtgacaggaggaccccgagcccccggcccggggaggggccatggtgctgcctgtccaacatgtcagccgaggtgcggctgaggcggctccagcagctggtgttggacccgggcttcctggggctggagcccctgctcgaccttctcctgggcgtccaccaggagctgggcgcctccgaactggcccaggacaagtacgtggccgacttcttgcagtgggcggagcccatcgtggtgaggcttaaggaggtccgactgcagagggacgacttcgagattctgaaggtgatcggacgcggggcgttcagcgaggtagcggtagtgaagatgaagcagacgggccaggtgtatgccatgaagatcatgaacaagtgggacatgctgaagaggggcgaggtgtcgtgcttccgtgaggagagggacgtgttggtgaatggggaccggcggtggatcacgcagctgcacttcgccttccaggatgagaactacctgtacctggtcatggagtattacgtgggcggggacctgctgacactgctgagcaagtttggggagcggattccggccgagatggcgcgcttctacctggcggagattgtcatggccatagactcggtgcaccggcttggctacgtgcacagggacatcaaacccgacaacatcctgctggaccgctgtggccacatccgcctggccgacttcggctcttgcctcaagctgcgggcagatggaacggtgcggtcgctggtggctgtgggcaccccagactacctgtcccccgagatcctgcaggctgtgggcggtgggcctgggacaggcagctacgggcccgagtgtgactggtgggcgctgggtgtattcgcctatgaaatgttctatgggcagacgcccttctacgcggattccacggcggagacctatggcaagatcgtccactacaaggagcacctctctctgccgctggtggacgaaggggtccctgaggaggctcgagacttcattcagcggttgctgtgtcccccggagacacggctgggccggggtggagcaggcgacttccggacacatcccttcttctttggcctcgactgggatggtctccgggacagcgtgcccccctttacaccggatttcgaaggtgccaccgacacatgcaacttcgacttggtggaggacgggctcactgccatggagacactgtcggacattcgggaaggtgcgccgctaggggtccacctgccttttgtgggctactcctactcctgcatggccctcagggacagtgaggtcccaggccccacacccatggaactggaggccgagcagctgcttgagccacacgtgcaagcgcccagcctggagccctcggtgtccccacaggatgaaacagctgaagtggcagttccagcggctgtccctgcggcagaggctgaggccgaggtgacgctgcgggagctccaggaagccctggaggaggaggtgctcacccggcagagcctgagccgggagatggaggccatccgcacggacaaccagaacttcgccagtcaactacgcgaggcagaggctcggaaccgggacctagaggcacacgtccggcagttgcaggagcggatggagttgctgcaggcagagggagccacagctgtcacgggggtccccagtccccgggccacggatccaccttcccatatggccccccggccgtggctgtgggccagtgcccgctggtggggccaggccccatgcaccgccgccacctgctgctccctgccagggtccctaggcctggcctatcggaggcgctttccctgctcctgttcgccgttgttctgtctcgtgccgccgccctgggctgcattgggttggtggcccacgccggccaactcaccgcagtctggcgccgcccaggagccgcccgcgctccctgaaccctagaactgtcttcgactccggggccccgttggaagactgagtgcccggggcacggcacagaagccgcgcccaccgcctgccagttcacaaccgctccgagcgtgggtctccgcccagctccagtcctgtgatccgggcccgccccctagcggccggggagggaggggccgggtccgcggccggcgaacggggctcgaagggtccttgtagccgggaatgctgctgctgctgctgctgctgctgctgctgctgctgctgctgctgctgctgctgctgctggggggatcacagaccatttctttctttcggccaggctgaggccctgacgtggatgggcaaactgcaggcctgggaaggcagcaagccgggccgtccgtgttccatcctccacgcacccccacctatcgttggttcgcaaagtgcaaagctttcttgtgcatgacgccctgctctggggagcgtctggcgcgatctctgcctgcttactcgggaaatttgcttttgccaaacccgctttttcggggatcccgcgcccccctcctcacttgcgctgctctcggagccccagccggctccgcccgcttcggcggtttggatatttattgacctcgtcctccgactcgctgacaggctacaggacccccaacaaccccaatccacgttttggatgcactgagaccccgacattcctcggtatttattgtctgtccccacctaggacccccacccccgaccctcgcgaataaaaggccctccatctgccc

SEQ ID NO: 9137 - DNA, 599 bp, Homo sapiens
  source 1..599: mol_type = unassigned DNA
aggccccacacccatggaactggaggccgagcagctgcttgagccacacgtgcaagcgcccagcctggagccctcggtgtccccacaggatgaaacagctgaagtggcagttccagcggctgtccctgcggcagaggctgaggccgaggtgacgctgcgggagctccaggaagccctggaggaggaggtgctcacccggcagagcctgagccgggagatggaggccatccgcacggacaaccagaacttcgccagtcaactacgcgaggcagaggctcggaaccgggacctagaggcacacgtccggcagttgcaggagcggatggagttgctgcaggcagagggagccacagctagatggccccccggccgtggctgtgggccagtgcccgctggtggggccaggccccatgcaccgccgccacctgctgctccctgccagggtccctaggcctggcctatcggaggcgctttccctgctcctgttcgccgttgttctgtctcgtgccgccgccctgggctgcattgggttggtggcccacgccggccaactcaccgcagtctggcgccgcccaggagccgcccgcgctccctgaacc

SEQ ID NO: 9138 - DNA, 7048 bp, Homo sapiens
  source 1..7048: mol_type = unassigned DNA
acactagcaatggcaaagctttgtgcggaggcattgctggctgctctgaactaaaagcatccgtggggaccgaaagaggtttttgcacaccttattaaggaactccaggatggcattgggcagcggcaaactgttgtcagaacattgaatgcaactggggaagaaataattcagcaatcctcaaaaacagatgccagtattctacaggaaaaattgggaagcctgaatctgcggtggcaggaggtctgcaaacagctgtcagacagaaaaaagaggctagaagaacaaaagaatatcttgtcagaatttcaaagagatttaaatgaatttgttttatggttggaggaagcagataacattgctagtatcccacttgaacctggaaaagagcagcaactaaaagaaaagcttgagcaagtcaagttactggtggaagagttgcccctgcgccagggaattctcaaacaattaaatgaaactggaggacccgtgcttgtaagtgctcccataagcccagaagagcaagataaacttgaaaataagctcaagcagacaaatctccagtggataaaggtttccagagctttacctgagaaacaaggagaaattgaagctcaaataaaagaccttgggcagcttgaaaaaaagcttgaagaccttgaagagcagttaaatcatctgctgctgtggttatctcctattaggaatcagttggaaatttataaccaaccaaaccaagaaggaccatttgacgttaaggaaactgaaatagcagttcaagctaaacaaccggatgtggaagagattttgtctaaagggcagcatttgtacaaggaaaaaccagccactcagccagtgaagaggaagttagaagatctgagctctgagtggaaggcggtaaaccgtttacttcaagagctgagggcaaagcagcctgacctagctcctggactgaccactattggagcctctcctactcagactgttactctggtgacacaacctgtggttactaaggaaactgccatctccaaactagaaatgccatcttccttgatgttggaggtacctgctctggcagatttcaaccgggcttggacagaacttaccgactggctttctctgcttgatcaagttataaaatcacagagggtgatggtgggtgaccttgaggatatcaacgagatgatcatcaagcagaaggcaacaatgcaggatttggaacagaggcgtccccagttggaagaactcattaccgctgcccaaaatttgaaaaacaagaccagcaatcaagaggctagaacaatcattacggatcgaattgaaagaattcagaatcagtgggatgaagtacaagaacaccttcagaaccggaggcaacagttgaatgaaatgttaaaggattcaacacaatggctggaagctaaggaagaagctgagcaggtcttaggacaggccagagccaagcttgagtcatggaaggagggtccctatacagtagatgcaatccaaaagaaaatcacagaaaccaagcagttggccaaagacctccgccagtggcagacaaatgtagatgtggcaaatgacttggccctgaaacttctccgggattattctgcagatgataccagaaaagtccacatgataacagagaatatcaatgcctcttggagaagcattcataaaagggtgagtgagcgagaggctgctttggaagaaactcatagattactgcaacagttccccctggacctggaaaagtttcttgcctggcttacagaagctgaaacaactgccaatgtcctacaggatgctacccgtaaggaaaggctcctagaagactccaagggagtaaaagagctgatgaaacaatggcaagacctccaaggtgaaattgaagctcacacagatgtttatcacaacctggatgaaaacagccaaaaaatcctgagatccctggaaggttccgatgatgcagtcctgttacaaagacgtttggataacatgaacttcaagtggagtgaacttcggaaaaagtctctcaacattaggtcccatttggaagccagttctgaccagtggaagcgtctgcacctttctctgcaggaacttctggtgtggctacagctgaaagatgatgaattaagccggcaggcacctattggaggcgactttccagcagttcagaagcagaacgatgtacatagggccttcaagagggaattgaaaactaaagaacctgtaatcatgagtactcttgagactgtacgaatatttctgacagagcagcctttggaaggactagagaaactctaccaggagcccagagagctgcctcctgaggagagagcccagaatgtcactcggcttctacgaaagcaggctgaggaggtcaatactgagtgggaaaaattgaacctgcactccgctgactggcagagaaaaatagatgagacccttgaaagactccgggaacttcaagaggccacggatgagctggacctcaagctgcgccaagctgaggtgatcaagggatcctggcagcccgtgggcgatctcctcattgactctctccaagatcacctcgagaaagtcaaggcacttcgaggagaaattgcgcctctgaaagagaacgtgagccacgtcaatgaccttgctcgccagcttaccactttgggcattcagctctcaccgtataacctcagcactctggaagacctgaacaccagatggaagcttctgcaggtggccgtcgaggaccgagtcaggcagctgcatgaagcccacagggactttggtccagcatctcagcactttctttccacgtctgtccagggtccctgggagagagccatctcgccaaacaaagtgccctactatatcaaccacgagactcaaacaacttgctgggaccatcccaaaatgacagagctctaccagtctttagctgacctgaataatgtcagattctcagcttataggactgccatgaaactccgaagactgcagaaggccctttgcttggatctcttgagcctgtcagctgcatgtgatgccttggaccagcacaacctcaagcaaaatgaccagcccatggatatcctgcagattattaattgtttgaccactatttatgaccgcctggagcaagagcacaacaatttggtcaacgtccctctctgcgtggatatgtgtctgaactggctgctgaatgtttatgatacgggacgaacagggaggatccgtgtcctgtcttttaaaactggcatcatttccctgtgtaaagcacatttggaagacaagtacagataccttttcaagcaagtggcaagttcaacaggattttgtgaccagcgcaggctgggcctccttctgcatgattctatccaaattccaagacagttgggtgaagttgcatcctttgggggcagtaacattgagccaagtgtccggagctgcttccaatttgctaataataagccagagatcgaagcggccctcttcctagactggatgagactggaaccccagtccatggtgtggctgcccgtcctgcacagagtggctgctgcagaaactgccaagcatcaggccaaatgtaacatctgcaaagagtgtccaatcattggattcaggtacaggagtctaaagcactttaattatgacatctgccaaagctgctttttttctggtcgagttgcaaaaggccataaaatgcactatcccatggtggaatattgcactccgactacatcaggagaagatgttcgagactttgccaaggtactaaaaaacaaatttcgaaccaaaaggtattttgcgaagcatccccgaatgggctacctgccagtgcagactgtcttagagggggacaacatggaaacgaatctgcaagcagaatatgaccgtctaaagcagcagcacgaacataaaggcctgtccccactgccgtcccctcctgaaatgatgcccacctctccccagagtccccgggatgctgagctcattgctgaggccaagctactgcgtcaacacaaaggccgcctggaagccaggatgcaaatcctggaagaccacaataaacagctggagtcacagttacacaggctaaggcagctgctggagcaaccccaggcagaggccaaagtgaatggcacaacggtgtcctctccttctacctctctacagaggtccgacagcagtcagcctatgctgctccgagtggttggcagtcaaacttcggactccatgggtgaggaagatcttctcagtcctccccaggacacaagcacagggttagaggaggtgatggagcaactcaacaactccttccctagttcaagaggacacaatgtaggaagtcttttccacatggcagatgatttgggcagagcgatggagtccttagtatcagtcatgacagatgaagaaggagcagaataaatgttttacaactcctgattcccgcatggtttttataatattcatacaacaaagaggattagacagtaagagtttacaagaaataaatctatatttttgtgaagggtagtggtattatactgtagatttcagtagtttctaagtctgttattgttttgttaacaatggcaggttttacacgtctatgcaattgtacaaaaaagttataagaaaactacatgtaaaatcttgatagctaaataacttgccatttctttatatggaacgcattttgggttgtttaaaaatttataacagttataaagaaagattgtaaactaaagtgtgctttataaaaaaaagttgtttataaaaacccctaaaaacaaaacaaacacacacacacacacatacacacacacacacaaaactttgaggcagcgcattgttttgcatccttttggcgtgatatccatatgaaattcatggctttttctttttttgcatattaaagataagacttcctctaccaccacaccaaatgactactacacactgctcatttgagaactgtcagctgagtggggcaggcttgagttttcatttcatatatctatatgtctataagtatataaatactatagttatatagataaagagatacgaatttctatagactgactttttccattttttaaatgttcatgtcacatcctaatagaaagaaattacttctagtcagtcatccaggcttacctgcttggtctagaatggatttttcccggagccggaagccaggaggaaactacaccacactaaaacattgtctacagctccagatgtttctcattttaaacaactttccactgacaacgaaagtaaagtaaagtattggatttttttaaagggaacatgtgaatgaatacacaggacttattatatcagagtgagtaatcggttggttggttgattgattgattgattgatacattcagcttcctgctgctagcaatgccacgatttagatttaatgatgcttcagtggaaatcaatcagaaggtattctgaccttgtgaacatcagaaggtattttttaactcccaagcagtagcaggacgatgatagggctggagggctatggattcccagcccatccctgtgaaggagtaggccactctttaagtgaaggattggatgattgttcataatacataaagttctctgtaattacaactaaattattatgccctcttctcacagtcaaaaggaactgggtggtttggtttttgttgcttttttagatttattgtcccatgtgggatgagtttttaaatgccacaagacataatttaaaataaataaactttgggaaaaggtgtaaaacagtagccccatcacatttgtgatactgacaggtatcaacccagaagcccatgaactgtgtttccatcctttgcatttctctgcgagtagttccacacaggtttgtaagtaagtaagaaagaaggcaaattgattcaaatgttacaaaaaaacccttcttggtggattagacaggttaaatatataaacaaacaaacaaaaattgctcaaaaaagaggagaaaagctcaagaggaaaagctaaggactggtaggaaaaagctttactctttcatgccattttatttctttttgatttttaaatcattcattcaatagataccaccgtgtgacctataattttgcaaatctgttacctctgacatcaagtgtaattagcttttggagagtgggctgacatcaagtgtaattagcttttggagagtgggttttgtccattattaataattaattaattaacatcaaacacggcttctcatgctatttctacctcactttggttttggggtgttcctgataattgtgcacacctgagttcacagcttcaccacttgtccattgcgttattttctttttcctttataattctttctttttccttcataattttcaaaagaaaacccaaagctctaaggtaacaaattaccaaattacatgaagatttggtttttgtcttgcatttttttcctttatgtgacgctggaccttttctttacccaaggatttttaaaactcagatttaaaacaaggggttactttacatcctactaagaagtttaagtaagtaagtttcattctaaaatcagaggtaaatagagtgcataaataattttgttttaatctttttgtttttcttttagacacattagctctggagtgagtctgtcataatatttgaacaaaaattgagagctttattgctgcattttaagcataattaatttggacattatttcgtgttgtgttctttataaccaccaagtattaaactgtaaatcataatgtaactgaagcataaacatcacatggcatgttttgtcattgttttcaggtactgagttcttacttgagtatcataatatattgtgttttaacaccaacactgtaacatttacgaattatttttttaaacttcagttttactgcattttcacaacatatcagacttcaccaaatatatgccttactattgtattatagtactgctttactgtgtatctcaataaagcacgcagttatgttac

SEQ ID NO: 9139 - DNA, 13956 bp, Homo sapiens
  source 1..13956: mol_type = unassigned DNA
gggatcactcactttccccctacaggactcagatctgggaggcaattaccttcggagaaaaacgaataggaaaaactgaagtgttactttttttaaagctgctgaagtttgttggtttctcattgtttttaagcctactggagcaataaagtttgaagaacttttaccaggttttttttatcgctgccttgatatacacttttcaaaatgctttggtgggaagaagtagaggactgttatgaaagagaagatgttcaaaagaaaacattcacaaaatgggtaaatgcacaattttctaagtttgggaagcagcatattgagaacctcttcagtgacctacaggatgggaggcgcctcctagacctcctcgaaggcctgacagggcaaaaactgccaaaagaaaaaggatccacaagagttcatgccctgaacaatgtcaacaaggcactgcgggttttgcagaacaataatgttgatttagtgaatattggaagtactgacatcgtagatggaaatcataaactgactcttggtttgatttggaatataatcctccactggcaggtcaaaaatgtaatgaaaaatatcatggctggattgcaacaaaccaacagtgaaaagattctcctgagctgggtccgacaatcaactcgtaattatccacaggttaatgtaatcaacttcaccaccagctggtctgatggcctggctttgaatgctctcatccatagtcataggccagacctatttgactggaatagtgtggtttgccagcagtcagccacacaacgactggaacatgcattcaacatcgccagatatcaattaggcatagagaaactactcgatcctgaagatgttgataccacctatccagataagaagtccatcttaatgtacatcacatcactcttccaagttttgcctcaacaagtgagcattgaagccatccaggaagtggaaatgttgccaaggccacctaaagtgactaaagaagaacattttcagttacatcatcaaatgcactattctcaacagatcacggtcagtctagcacagggatatgagagaacttcttcccctaagcctcgattcaagagctatgcctacacacaggctgcttatgtcaccacctctgaccctacacggagcccatttccttcacagcatttggaagctcctgaagacaagtcatttggcagttcattgatggagagtgaagtaaacctggaccgttatcaaacagctttagaagaagtattatcgtggcttctttctgctgaggacacattgcaagcacaaggagagatttctaatgatgtggaagtggtgaaagaccagtttcatactcatgaggggtacatgatggatttgacagcccatcagggccgggttggtaatattctacaattgggaagtaagctgattggaacaggaaaattatcagaagatgaagaaactgaagtacaagagcagatgaatctcctaaattcaagatgggaatgcctcagggtagctagcatggaaaaacaaagcaatttacatagagttttaatggatctccagaatcagaaactgaaagagttgaatgactggctaacaaaaacagaagaaagaacaaggaaaatggaggaagagcctcttggacctgatcttgaagacctaaaacgccaagtacaacaacataaggtgcttcaagaagatctagaacaagaacaagtcagggtcaattctctcactcacatggtggtggtagttgatgaatctagtggagatcacgcaactgctgctttggaagaacaacttaaggtattgggagatcgatgggcaaacatctgtagatggacagaagaccgctgggttcttttacaagacatccttctcaaatggcaacgtcttactgaagaacagtgcctttttagtgcatggctttcagaaaaagaagatgcagtgaacaagattcacacaactggctttaaagatcaaaatgaaatgttatcaagtcttcaaaaactggccgttttaaaagcggatctagaaaagaaaaagcaatccatgggcaaactgtattcactcaaacaagatcttctttcaacactgaagaataagtcagtgacccagaagacggaagcatggctggataactttgcccggtgttgggataatttagtccaaaaacttgaaaagagtacagcacagatttcacaggctgtcaccaccactcagccatcactaacacagacaactgtaatggaaacagtaactacggtgaccacaagggaacagatcctggtaaagcatgctcaagaggaacttccaccaccacctccccaaaagaagaggcagattactgtggattctgaaattaggaaaaggttggatgttgatataactgaacttcacagctggattactcgctcagaagctgtgttgcagagtcctgaatttgcaatctttcggaaggaaggcaacttctcagacttaaaagaaaaagtcaatgccatagagcgagaaaaagctgagaagttcagaaaactgcaagatgccagcagatcagctcaggccctggtggaacagatggtgaatgagggtgttaatgcagatagcatcaaacaagcctcagaacaactgaacagccggtggatcgaattctgccagttgctaagtgagagacttaactggctggagtatcagaacaacatcatcgctttctataatcagctacaacaattggagcagatgacaactactgctgaaaactggttgaaaatccaacccaccaccccatcagagccaacagcaattaaaagtcagttaaaaatttgtaaggatgaagtcaaccggctatcagatcttcaacctcaaattgaacgattaaaaattcaaagcatagccctgaaagagaaaggacaaggacccatgttcctggatgcagactttgtggcctttacaaatcattttaagcaagtcttttctgatgtgcaggccagagagaaagagctacagacaatttttgacactttgccaccaatgcgctatcaggagaccatgagtgccatcaggacatgggtccagcagtcagaaaccaaactctccatacctcaacttagtgtcaccgactatgaaatcatggagcagagactcggggaattgcaggctttacaaagttctctgcaagagcaacaaagtggcctatactatctcagcaccactgtgaaagagatgtcgaagaaagcgccctctgaaattagccggaaatatcaatcagaatttgaagaaattgagggacgctggaagaagctctcctcccagctggttgagcattgtcaaaagctagaggagcaaatgaataaactccgaaaaattcagaatcacatacaaaccctgaagaaatggatggctgaagttgatgtttttctgaaggaggaatggcctgcccttggggattcagaaattctaaaaaagcagctgaaacagtgcagacttttagtcagtgatattcagacaattcagcccagtctaaacagtgtcaatgaaggtgggcagaagataaagaatgaagcagagccagagtttgcttcgagacttgagacagaactcaaagaacttaacactcagtgggatcacatgtgccaacaggtctatgccagaaaggaggccttgaagggaggtttggagaaaactgtaagcctccagaaagatctatcagagatgcacgaatggatgacacaagctgaagaagagtatcttgagagagattttgaatataaaactccagatgaattacagaaagcagttgaagagatgaagagagctaaagaagaggcccaacaaaaagaagcgaaagtgaaactccttactgagtctgtaaatagtgtcatagctcaagctccacctgtagcacaagaggccttaaaaaaggaacttgaaactctaaccaccaactaccagtggctctgcactaggctgaatgggaaatgcaagactttggaagaagtttgggcatgttggcatgagttattgtcatacttggagaaagcaaacaagtggctaaatgaagtagaatttaaacttaaaaccactgaaaacattcctggcggagctgaggaaatctctgaggtgctagattcacttgaaaatttgatgcgacattcagaggataacccaaatcagattcgcatattggcacagaccctaacagatggcggagtcatggatgagctaatcaatgaggaacttgagacatttaattctcgttggagggaactacatgaagaggctgtaaggaggcaaaagttgcttgaacagagcatccagtctgcccaggagactgaaaaatccttacacttaatccaggagtccctcacattcattgacaagcagttggcagcttatattgcagacaaggtggacgcagctcaaatgcctcaggaagcccagaaaatccaatctgatttgacaagtcatgagatcagtttagaagaaatgaagaaacataatcaggggaaggaggctgcccaaagagtcctgtctcagattgatgttgcacagaaaaaattacaagatgtctccatgaagtttcgattattccagaaaccagccaattttgagcagcgtctacaagaaagtaagatgattttagatgaagtgaagatgcacttgcctgcattggaaacaaagagtgtggaacaggaagtagtacagtcacagctaaatcattgtgtgaacttgtataaaagtctgagtgaagtgaagtctgaagtggaaatggtgataaagactggacgtcagattgtacagaaaaagcagacggaaaatcccaaagaacttgatgaaagagtaacagctttgaaattgcattataatgagctgggagcaaaggtaacagaaagaaagcaacagttggagaaatgcttgaaattgtcccgtaagatgcgaaaggaaatgaatgtcttgacagaatggctggcagctacagatatggaattgacaaagagatcagcagttgaaggaatgcctagtaatttggattctgaagttgcctggggaaaggctactcaaaaagagattgagaaacagaaggtgcacctgaagagtatcacagaggtaggagaggccttgaaaacagttttgggcaagaaggagacgttggtggaagataaactcagtcttctgaatagtaactggatagctgtcacctcccgagcagaagagtggttaaatcttttgttggaataccagaaacacatggaaacttttgaccagaatgtggaccacatcacaaagtggatcattcaggctgacacacttttggatgaatcagagaaaaagaaaccccagcaaaaagaagacgtgcttaagcgtttaaaggcagaactgaatgacatacgcccaaaggtggactctacacgtgaccaagcagcaaacttgatggcaaaccgcggtgaccactgcaggaaattagtagagccccaaatctcagagctcaaccatcgatttgcagccatttcacacagaattaagactggaaaggcctccattcctttgaaggaattggagcagtttaactcagatatacaaaaattgcttgaaccactggaggctgaaattcagcagggggtgaatctgaaagaggaagacttcaataaagatatgaatgaagacaatgagggtactgtaaaagaattgttgcaaagaggagacaacttacaacaaagaatcacagatgagagaaagcgagaggaaataaagataaaacagcagctgttacagacaaaacataatgctctcaaggatttgaggtctcaaagaagaaaaaaggctctagaaatttctcatcagtggtatcagtacaagaggcaggctgatgatctcctgaaatgcttggatgacattgaaaaaaaattagccagcctacctgagcccagagatgaaaggaaaataaaggaaattgatcgggaattgcagaagaagaaagaggagctgaatgcagtgcgtaggcaagctgagggcttgtctgaggatggggccgcaatggcagtggagccaactcagatccagctcagcaagcgctggcgggaaattgagagcaaatttgctcagtttcgaagactcaactttgcacaaattcacactgtccgtgaagaaacgatgatggtgatgactgaagacatgcctttggaaatttcttatgtgccttctacttatttgactgaaatcactcatgtctcacaagccctattagaagtggaacaacttctcaatgctcctgacctctgtgctaaggactttgaagatctctttaagcaagaggagtctctgaagaatataaaagatagtctacaacaaagctcaggtcggattgacattattcatagcaagaagacagcagcattgcaaagtgcaacgcctgtggaaagggtgaagctacaggaagctctctcccagcttgatttccaatgggaaaaagttaacaaaatgtacaaggaccgacaagggcgatttgacagatctgttgagaaatggcggcgttttcattatgatataaagatatttaatcagtggctaacagaagctgaacagtttctcagaaagacacaaattcctgagaattgggaacatgctaaatacaaatggtatcttaaggaactccaggatggcattgggcagcggcaaactgttgtcagaacattgaatgcaactggggaagaaataattcagcaatcctcaaaaacagatgccagtattctacaggaaaaattgggaagcctgaatctgcggtggcaggaggtctgcaaacagctgtcagacagaaaaaagaggctagaagaacaaaagaatatcttgtcagaatttcaaagagatttaaatgaatttgttttatggttggaggaagcagataacattgctagtatcccacttgaacctggaaaagagcagcaactaaaagaaaagcttgagcaagtcaagttactggtggaagagttgcccctgcgccagggaattctcaaacaattaaatgaaactggaggacccgtgcttgtaagtgctcccataagcccagaagagcaagataaacttgaaaataagctcaagcagacaaatctccagtggataaaggtttccagagctttacctgagaaacaaggagaaattgaagctcaaataaaagaccttgggcagcttgaaaaaaagcttgaagaccttgaagagcagttaaatcatctgctgctgtggttatctcctattaggaatcagttggaaatttataaccaaccaaaccaagaaggaccatttgacgttaaggaaactgaaatagcagttcaagctaaacaaccggatgtggaagagattttgtctaaagggcagcatttgtacaaggaaaaaccagccactcagccagtgaagaggaagttagaagatctgagctctgagtggaaggcggtaaaccgtttacttcaagagctgagggcaaagcagcctgacctagctcctggactgaccactattggagcctctcctactcagactgttactctggtgacacaacctgtggttactaaggaaactgccatctccaaactagaaatgccatcttccttgatgttggaggtacctgctctggcagatttcaaccgggcttggacagaacttaccgactggctttctctgcttgatcaagttataaaatcacagagggtgatggtgggtgaccttgaggatatcaacgagatgatcatcaagcagaaggcaacaatgcaggatttggaacagaggcgtccccagttggaagaactcattaccgctgcccaaaatttgaaaaacaagaccagcaatcaagaggctagaacaatcattacggatcgaattgaaagaattcagaatcagtgggatgaagtacaagaacaccttcagaaccggaggcaacagttgaatgaaatgttaaaggattcaacacaatggctggaagctaaggaagaagctgagcaggtcttaggacaggccagagccaagcttgagtcatggaaggagggtccctatacagtagatgcaatccaaaagaaaatcacagaaaccaagcagttggccaaagacctccgccagtggcagacaaatgtagatgtggcaaatgacttggccctgaaacttctccgggattattctgcagatgataccagaaaagtccacatgataacagagaatatcaatgcctcttggagaagcattcataaaagggtgagtgagcgagaggctgctttggaagaaactcatagattactgcaacagttccccctggacctggaaaagtttcttgcctggcttacagaagctgaaacaactgccaatgtcctacaggatgctacccgtaaggaaaggctcctagaagactccaagggagtaaaagagctgatgaaacaatggcaagacctccaaggtgaaattgaagctcacacagatgtttatcacaacctggatgaaaacagccaaaaaatcctgagatccctggaaggttccgatgatgcagtcctgttacaaagacgtttggataacatgaacttcaagtggagtgaacttcggaaaaagtctctcaacattaggtcccatttggaagccagttctgaccagtggaagcgtctgcacctttctctgcaggaacttctggtgtggctacagctgaaagatgatgaattaagccggcaggcacctattggaggcgactttccagcagttcagaagcagaacgatgtacatagggccttcaagagggaattgaaaactaaagaacctgtaatcatgagtactcttgagactgtacgaatatttctgacagagcagcctttggaaggactagagaaactctaccaggagcccagagagctgcctcctgaggagagagcccagaatgtcactcggcttctacgaaagcaggctgaggaggtcaatactgagtgggaaaaattgaacctgcactccgctgactggcagagaaaaatagatgagacccttgaaagactccgggaacttcaagaggccacggatgagctggacctcaagctgcgccaagctgaggtgatcaagggatcctggcagcccgtgggcgatctcctcattgactctctccaagatcacctcgagaaagtcaaggcacttcgaggagaaattgcgcctctgaaagagaacgtgagccacgtcaatgaccttgctcgccagcttaccactttgggcattcagctctcaccgtataacctcagcactctggaagacctgaacaccagatggaagcttctgcaggtggccgtcgaggaccgagtcaggcagctgcatgaagcccacagggactttggtccagcatctcagcactttctttccacgtctgtccagggtccctgggagagagccatctcgccaaacaaagtgccctactatatcaaccacgagactcaaacaacttgctgggaccatcccaaaatgacagagctctaccagtctttagctgacctgaataatgtcagattctcagcttataggactgccatgaaactccgaagactgcagaaggccctttgcttggatctcttgagcctgtcagctgcatgtgatgccttggaccagcacaacctcaagcaaaatgaccagcccatggatatcctgcagattattaattgtttgaccactatttatgaccgcctggagcaagagcacaacaatttggtcaacgtccctctctgcgtggatatgtgtctgaactggctgctgaatgtttatgatacgggacgaacagggaggatccgtgtcctgtcttttaaaactggcatcatttccctgtgtaaagcacatttggaagacaagtacagataccttttcaagcaagtggcaagttcaacaggattttgtgaccagcgcaggctgggcctccttctgcatgattctatccaaattccaagacagttgggtgaagttgcatcctttgggggcagtaacattgagccaagtgtccggagctgcttccaatttgctaataataagccagagatcgaagcggccctcttcctagactggatgagactggaaccccagtccatggtgtggctgcccgtcctgcacagagtggctgctgcagaaactgccaagcatcaggccaaatgtaacatctgcaaagagtgtccaatcattggattcaggtacaggagtctaaagcactttaattatgacatctgccaaagctgctttttttctggtcgagttgcaaaaggccataaaatgcactatcccatggtggaatattgcactccgactacatcaggagaagatgttcgagactttgccaaggtactaaaaaacaaatttcgaaccaaaaggtattttgcgaagcatccccgaatgggctacctgccagtgcagactgtcttagagggggacaacatggaaactcccgttactctgatcaacttctggccagtagattctgcgcctgcctcgtcccctcagctttcacacgatgatactcattcacgcattgaacattatgctagcaggctagcagaaatggaaaacagcaatggatcttatctaaatgatagcatctctcctaatgagagcatagatgatgaacatttgttaatccagcattactgccaaagtttgaaccaggactcccccctgagccagcctcgtagtcctgcccagatcttgatttccttagagagtgaggaaagaggggagctagagagaatcctagcagatcttgaggaagaaaacaggaatctgcaagcagaatatgaccgtctaaagcagcagcacgaacataaaggcctgtccccactgccgtcccctcctgaaatgatgcccacctctccccagagtccccgggatgctgagctcattgctgaggccaagctactgcgtcaacacaaaggccgcctggaagccaggatgcaaatcctggaagaccacaataaacagctggagtcacagttacacaggctaaggcagctgctggagcaaccccaggcagaggccaaagtgaatggcacaacggtgtcctctccttctacctctctacagaggtccgacagcagtcagcctatgctgctccgagtggttggcagtcaaacttcggactccatgggtgaggaagatcttctcagtcctccccaggacacaagcacagggttagaggaggtgatggagcaactcaacaactccttccctagttcaagaggaagaaatacccctggaaagccaatgagagaggacacaatgtaggaagtcttttccacatggcagatgatttgggcagagcgatggagtccttagtatcagtcatgacagatgaagaaggagcagaataaatgttttacaactcctgattcccgcatggtttttataatattcatacaacaaagaggattagacagtaagagtttacaagaaataaatctatatttttgtgaagggtagtggtattatactgtagatttcagtagtttctaagtctgttattgttttgttaacaatggcaggttttacacgtctatgcaattgtacaaaaaagttataagaaaactacatgtaaaatcttgatagctaaataacttgccatttctttatatggaacgcattttgggttgtttaaaaatttataacagttataaagaaagattgtaaactaaagtgtgctttataaaaaaaagttgtttataaaaacccctaaaaacaaaacaaacacacacacacacacatacacacacacacacaaaactttgaggcagcgcattgttttgcatccttttggcgtgatatccatatgaaattcatggctttttctttttttgcatattaaagataagacttcctctaccaccacaccaaatgactactacacactgctcatttgagaactgtcagctgagtggggcaggcttgagttttcatttcatatatctatatgtctataagtatataaatactatagttatatagataaagagatacgaatttctatagactgactttttccattttttaaatgttcatgtcacatcctaatagaaagaaattacttctagtcagtcatccaggcttacctgcttggtctagaatggatttttcccggagccggaagccaggaggaaactacaccacactaaaacattgtctacagctccagatgtttctcattttaaacaactttccactgacaacgaaagtaaagtaaagtattggatttttttaaagggaacatgtgaatgaatacacaggacttattatatcagagtgagtaatcggttggttggttgattgattgattgattgatacattcagcttcctgctgctagcaatgccacgatttagatttaatgatgcttcagtggaaatcaatcagaaggtattctgaccttgtgaacatcagaaggtattttttaactcccaagcagtagcaggacgatgatagggctggagggctatggattcccagcccatccctgtgaaggagtaggccactctttaagtgaaggattggatgattgttcataatacataaagttctctgtaattacaactaaattattatgccctcttctcacagtcaaaaggaactgggtggtttggtttttgttgcttttttagatttattgtcccatgtgggatgagtttttaaatgccacaagacataatttaaaataaataaactttgggaaaaggtgtaaaacagtagccccatcacatttgtgatactgacaggtatcaacccagaagcccatgaactgtgtttccatcctttgcatttctctgcgagtagttccacacaggtttgtaagtaagtaagaaagaaggcaaattgattcaaatgttacaaaaaaacccttcttggtggattagacaggttaaatatataaacaaacaaacaaaaattgctcaaaaaagaggagaaaagctcaagaggaaaagctaaggactggtaggaaaaagctttactctttcatgccattttatttctttttgatttttaaatcattcattcaatagataccaccgtgtgacctataattttgcaaatctgttacctctgacatcaagtgtaattagcttttggagagtgggctgacatcaagtgtaattagcttttggagagtgggttttgtccattattaataattaattaattaacatcaaacacggcttctcatgctatttctacctcactttggttttggggtgttcctgataattgtgcacacctgagttcacagcttcaccacttgtccattgcgttattttctttttcctttataattctttctttttccttcataattttcaaaagaaaacccaaagctctaaggtaacaaattaccaaattacatgaagatttggtttttgtcttgcatttttttcctttatgtgacgctggaccttttctttacccaaggatttttaaaactcagatttaaaacaaggggttactttacatcctactaagaagtttaagtaagtaagtttcattctaaaatcagaggtaaatagagtgcataaataattttgttttaatctttttgtttttcttttagacacattagctctggagtgagtctgtcataatatttgaacaaaaattgagagctttattgctgcattttaagcataattaatttggacattatttcgtgttgtgttctttataaccaccaagtattaaactgtaaatcataatgtaactgaagcataaacatcacatggcatgttttgtcattgttttcaggtactgagttcttacttgagtatcataatatattgtgttttaacaccaacactgtaacatttacgaattatttttttaaacttcagttttactgcattttcacaacatatcagacttcaccaaatatatgccttactattgtattatagtactgctttactgtgtatctcaataaagcacgcagttatgttac

SEQ ID NO: 9140 - DNA, 7339 bp, Homo sapiens
  source 1..7339: mol_type = unassigned DNA
acactagcaatggcaaagctttgtgcggaggcattgctggctgctctgaactaaaagcatccgtggggaccgaaagaggtttttgcacaccttattaaggaactccaggatggcattgggcagcggcaaactgttgtcagaacattgaatgcaactggggaagaaataattcagcaatcctcaaaaacagatgccagtattctacaggaaaaattgggaagcctgaatctgcggtggcaggaggtctgcaaacagctgtcagacagaaaaaagaggctagaagaacaaaagaatatcttgtcagaatttcaaagagatttaaatgaatttgttttatggttggaggaagcagataacattgctagtatcccacttgaacctggaaaagagcagcaactaaaagaaaagcttgagcaagtcaagttactggtggaagagttgcccctgcgccagggaattctcaaacaattaaatgaaactggaggacccgtgcttgtaagtgctcccataagcccagaagagcaagataaacttgaaaataagctcaagcagacaaatctccagtggataaaggtttccagagctttacctgagaaacaaggagaaattgaagctcaaataaaagaccttgggcagcttgaaaaaaagcttgaagaccttgaagagcagttaaatcatctgctgctgtggttatctcctattaggaatcagttggaaatttataaccaaccaaaccaagaaggaccatttgacgttaaggaaactgaaatagcagttcaagctaaacaaccggatgtggaagagattttgtctaaagggcagcatttgtacaaggaaaaaccagccactcagccagtgaagaggaagttagaagatctgagctctgagtggaaggcggtaaaccgtttacttcaagagctgagggcaaagcagcctgacctagctcctggactgaccactattggagcctctcctactcagactgttactctggtgacacaacctgtggttactaaggaaactgccatctccaaactagaaatgccatcttccttgatgttggaggtacctgctctggcagatttcaaccgggcttggacagaacttaccgactggctttctctgcttgatcaagttataaaatcacagagggtgatggtgggtgaccttgaggatatcaacgagatgatcatcaagcagaaggcaacaatgcaggatttggaacagaggcgtccccagttggaagaactcattaccgctgcccaaaatttgaaaaacaagaccagcaatcaagaggctagaacaatcattacggatcgaattgaaagaattcagaatcagtgggatgaagtacaagaacaccttcagaaccggaggcaacagttgaatgaaatgttaaaggattcaacacaatggctggaagctaaggaagaagctgagcaggtcttaggacaggccagagccaagcttgagtcatggaaggagggtccctatacagtagatgcaatccaaaagaaaatcacagaaaccaagcagttggccaaagacctccgccagtggcagacaaatgtagatgtggcaaatgacttggccctgaaacttctccgggattattctgcagatgataccagaaaagtccacatgataacagagaatatcaatgcctcttggagaagcattcataaaagggtgagtgagcgagaggctgctttggaagaaactcatagattactgcaacagttccccctggacctggaaaagtttcttgcctggcttacagaagctgaaacaactgccaatgtcctacaggatgctacccgtaaggaaaggctcctagaagactccaagggagtaaaagagctgatgaaacaatggcaagacctccaaggtgaaattgaagctcacacagatgtttatcacaacctggatgaaaacagccaaaaaatcctgagatccctggaaggttccgatgatgcagtcctgttacaaagacgtttggataacatgaacttcaagtggagtgaacttcggaaaaagtctctcaacattaggtcccatttggaagccagttctgaccagtggaagcgtctgcacctttctctgcaggaacttctggtgtggctacagctgaaagatgatgaattaagccggcaggcacctattggaggcgactttccagcagttcagaagcagaacgatgtacatagggccttcaagagggaattgaaaactaaagaacctgtaatcatgagtactcttgagactgtacgaatatttctgacagagcagcctttggaaggactagagaaactctaccaggagcccagagagctgcctcctgaggagagagcccagaatgtcactcggcttctacgaaagcaggctgaggaggtcaatactgagtgggaaaaattgaacctgcactccgctgactggcagagaaaaatagatgagacccttgaaagactccgggaacttcaagaggccacggatgagctggacctcaagctgcgccaagctgaggtgatcaagggatcctggcagcccgtgggcgatctcctcattgactctctccaagatcacctcgagaaagtcaaggcacttcgaggagaaattgcgcctctgaaagagaacgtgagccacgtcaatgaccttgctcgccagcttaccactttgggcattcagctctcaccgtataacctcagcactctggaagacctgaacaccagatggaagcttctgcaggtggccgtcgaggaccgagtcaggcagctgcatgaagcccacagggactttggtccagcatctcagcactttctttccacgtctgtccagggtccctgggagagagccatctcgccaaacaaagtgccctactatatcaaccacgagactcaaacaacttgctgggaccatcccaaaatgacagagctctaccagtctttagctgacctgaataatgtcagattctcagcttataggactgccatgaaactccgaagactgcagaaggccctttgcttggatctcttgagcctgtcagctgcatgtgatgccttggaccagcacaacctcaagcaaaatgaccagcccatggatatcctgcagattattaattgtttgaccactatttatgaccgcctggagcaagagcacaacaatttggtcaacgtccctctctgcgtggatatgtgtctgaactggctgctgaatgtttatgatacgggacgaacagggaggatccgtgtcctgtcttttaaaactggcatcatttccctgtgtaaagcacatttggaagacaagtacagataccttttcaagcaagtggcaagttcaacaggattttgtgaccagcgcaggctgggcctccttctgcatgattctatccaaattccaagacagttgggtgaagttgcatcctttgggggcagtaacattgagccaagtgtccggagctgcttccaatttgctaataataagccagagatcgaagcggccctcttcctagactggatgagactggaaccccagtccatggtgtggctgcccgtcctgcacagagtggctgctgcagaaactgccaagcatcaggccaaatgtaacatctgcaaagagtgtccaatcattggattcaggtacaggagtctaaagcactttaattatgacatctgccaaagctgctttttttctggtcgagttgcaaaaggccataaaatgcactatcccatggtggaatattgcactccgactacatcaggagaagatgttcgagactttgccaaggtactaaaaaacaaatttcgaaccaaaaggtattttgcgaagcatccccgaatgggctacctgccagtgcagactgtcttagagggggacaacatggaaacgcctgcctcgtcccctcagctttcacacgatgatactcattcacgcattgaacattatgctagcaggctagcagaaatggaaaacagcaatggatcttatctaaatgatagcatctctcctaatgagagcatagatgatgaacatttgttaatccagcattactgccaaagtttgaaccaggactcccccctgagccagcctcgtagtcctgcccagatcttgatttccttagagagtgaggaaagaggggagctagagagaatcctagcagatcttgaggaagaaaacaggaatctgcaagcagaatatgaccgtctaaagcagcagcacgaacataaaggcctgtccccactgccgtcccctcctgaaatgatgcccacctctccccagagtccccgggatgctgagctcattgctgaggccaagctactgcgtcaacacaaaggccgcctggaagccaggatgcaaatcctggaagaccacaataaacagctggagtcacagttacacaggctaaggcagctgctggagcaaccccaggcagaggccaaagtgaatggcacaacggtgtcctctccttctacctctctacagaggtccgacagcagtcagcctatgctgctccgagtggttggcagtcaaacttcggactccatgggtgaggaagatcttctcagtcctccccaggacacaagcacagggttagaggaggtgatggagcaactcaacaactccttccctagttcaagaggacacaatgtaggaagtcttttccacatggcagatgatttgggcagagcgatggagtccttagtatcagtcatgacagatgaagaaggagcagaataaatgttttacaactcctgattcccgcatggtttttataatattcatacaacaaagaggattagacagtaagagtttacaagaaataaatctatatttttgtgaagggtagtggtattatactgtagatttcagtagtttctaagtctgttattgttttgttaacaatggcaggttttacacgtctatgcaattgtacaaaaaagttataagaaaactacatgtaaaatcttgatagctaaataacttgccatttctttatatggaacgcattttgggttgtttaaaaatttataacagttataaagaaagattgtaaactaaagtgtgctttataaaaaaaagttgtttataaaaacccctaaaaacaaaacaaacacacacacacacacatacacacacacacacaaaactttgaggcagcgcattgttttgcatccttttggcgtgatatccatatgaaattcatggctttttctttttttgcatattaaagataagacttcctctaccaccacaccaaatgactactacacactgctcatttgagaactgtcagctgagtggggcaggcttgagttttcatttcatatatctatatgtctataagtatataaatactatagttatatagataaagagatacgaatttctatagactgactttttccattttttaaatgttcatgtcacatcctaatagaaagaaattacttctagtcagtcatccaggcttacctgcttggtctagaatggatttttcccggagccggaagccaggaggaaactacaccacactaaaacattgtctacagctccagatgtttctcattttaaacaactttccactgacaacgaaagtaaagtaaagtattggatttttttaaagggaacatgtgaatgaatacacaggacttattatatcagagtgagtaatcggttggttggttgattgattgattgattgatacattcagcttcctgctgctagcaatgccacgatttagatttaatgatgcttcagtggaaatcaatcagaaggtattctgaccttgtgaacatcagaaggtattttttaactcccaagcagtagcaggacgatgatagggctggagggctatggattcccagcccatccctgtgaaggagtaggccactctttaagtgaaggattggatgattgttcataatacataaagttctctgtaattacaactaaattattatgccctcttctcacagtcaaaaggaactgggtggtttggtttttgttgcttttttagatttattgtcccatgtgggatgagtttttaaatgccacaagacataatttaaaataaataaactttgggaaaaggtgtaaaacagtagccccatcacatttgtgatactgacaggtatcaacccagaagcccatgaactgtgtttccatcctttgcatttctctgcgagtagttccacacaggtttgtaagtaagtaagaaagaaggcaaattgattcaaatgttacaaaaaaacccttcttggtggattagacaggttaaatatataaacaaacaaacaaaaattgctcaaaaaagaggagaaaagctcaagaggaaaagctaaggactggtaggaaaaagctttactctttcatgccattttatttctttttgatttttaaatcattcattcaatagataccaccgtgtgacctataattttgcaaatctgttacctctgacatcaagtgtaattagcttttggagagtgggctgacatcaagtgtaattagcttttggagagtgggttttgtccattattaataattaattaattaacatcaaacacggcttctcatgctatttctacctcactttggttttggggtgttcctgataattgtgcacacctgagttcacagcttcaccacttgtccattgcgttattttctttttcctttataattctttctttttccttcataattttcaaaagaaaacccaaagctctaaggtaacaaattaccaaattacatgaagatttggtttttgtcttgcatttttttcctttatgtgacgctggaccttttctttacccaaggatttttaaaactcagatttaaaacaaggggttactttacatcctactaagaagtttaagtaagtaagtttcattctaaaatcagaggtaaatagagtgcataaataattttgttttaatctttttgtttttcttttagacacattagctctggagtgagtctgtcataatatttgaacaaaaattgagagctttattgctgcattttaagcataattaatttggacattatttcgtgttgtgttctttataaccaccaagtattaaactgtaaatcataatgtaactgaagcataaacatcacatggcatgttttgtcattgttttcaggtactgagttcttacttgagtatcataatatattgtgttttaacaccaacactgtaacatttacgaattatttttttaaacttcagttttactgcattttcacaacatatcagacttcaccaaatatatgccttactattgtattatagtactgctttactgtgtatctcaataaagcacgcagttatgttac

SEQ ID NO: 9141 - DNA, 2224 bp, Homo sapiens
  source 1..2224: mol_type = unassigned DNA
actttcggggagcccggcggctctgggaagctcactcctccactcgtacccacactcgaccgcggagcccttgcagccatgagggaacagctcaaaggccacgagactcaaacaacttgctgggaccatcccaaaatgacagagctctaccagtctttagctgacctgaataatgtcagattctcagcttataggactgccatgaaactccgaagactgcagaaggccctttgcttggatctcttgagcctgtcagctgcatgtgatgccttggaccagcacaacctcaagcaaaatgaccagcccatggatatcctgcagattattaattgtttgaccactatttatgaccgcctggagcaagagcacaacaatttggtcaacgtccctctctgcgtggatatgtgtctgaactggctgctgaatgtttatgatacgggacgaacagggaggatccgtgtcctgtcttttaaaactggcatcatttccctgtgtaaagcacatttggaagacaagtacagataccttttcaagcaagtggcaagttcaacaggattttgtgaccagcgcaggctgggcctccttctgcatgattctatccaaattccaagacagttgggtgaagttgcatcctttgggggcagtaacattgagccaagtgtccggagctgcttccaatttgctaataataagccagagatcgaagcggccctcttcctagactggatgagactggaaccccagtccatggtgtggctgcccgtcctgcacagagtggctgctgcagaaactgccaagcatcaggccaaatgtaacatctgcaaagagtgtccaatcattggattcaggtacaggagtctaaagcactttaattatgacatctgccaaagctgctttttttctggtcgagttgcaaaaggccataaaatgcactatcccatggtggaatattgcactccgactacatcaggagaagatgttcgagactttgccaaggtactaaaaaacaaatttcgaaccaaaaggtattttgcgaagcatccccgaatgggctacctgccagtgcagactgtcttagagggggacaacatggaaacgcctgcctcgtcccctcagctttcacacgatgatactcattcacgcattgaacattatgctagcaggctagcagaaatggaaaacagcaatggatcttatctaaatgatagcatctctcctaatgagagcatagatgatgaacatttgttaatccagcattactgccaaagtttgaaccaggactcccccctgagccagcctcgtagtcctgcccagatcttgatttccttagagagtgaggaaagaggggagctagagagaatcctagcagatcttgaggaagaaaacaggaatctgcaagcagaatatgaccgtctaaagcagcagcacgaacataaaggcctgtccccactgccgtcccctcctgaaatgatgcccacctctccccagagtccccgggatgctgagctcattgctgaggccaagctactgcgtcaacacaaaggccgcctggaagccaggatgcaaatcctggaagaccacaataaacagctggagtcacagttacacaggctaaggcagctgctggagcaaccccaggcagaggccaaagtgaatggcacaacggtgtcctctccttctacctctctacagaggtccgacagcagtcagcctatgctgctccgagtggttggcagtcaaacttcggactccatgggtgaggaagatcttctcagtcctccccaggacacaagcacagggttagaggaggtgatggagcaactcaacaactccttccctagttcaagaggacacaatgtaggaagtcttttccacatggcagatgatttgggcagagcgatggagtccttagtatcagtcatgacagatgaagaaggagcagaataaatgttttacaactcctgattcccgcatggtttttataatattcatacaacaaagaggattagacagtaagagtttacaagaaataaatctatatttttgtgaagggtagtggtattatactgtagatttcagtagtttctaagtctgttattgttttgttaacaatggcaggttttacacgtctatgcaattgtacaaaaaagttataagaaaactacatgtaaaatcttgatagctaaataacttgccatttctttatatggaacgcattttgggt

SEQ ID NO: 9142 - DNA, 13932 bp, Homo sapiens
  source 1..13932: mol_type = unassigned DNA
gtgcaaaaagattgtgtgtttgtctgcttttgtgaggctggtcagagattctgtgcctgctttatctgtgcttggctatgactctacctccaggtttaccataccccatagaatgtgtaagagaaaagtaccaacagggaaatcagcaaaaagctttcctatgaaggtgtgtagccagcctccgcagaatttgaaatgtctgaggtctcatctgatgaaagagaagatgttcaaaagaaaacattcacaaaatgggtaaatgcacaattttctaagtttgggaagcagcatattgagaacctcttcagtgacctacaggatgggaggcgcctcctagacctcctcgaaggcctgacagggcaaaaactgccaaaagaaaaaggatccacaagagttcatgccctgaacaatgtcaacaaggcactgcgggttttgcagaacaataatgttgatttagtgaatattggaagtactgacatcgtagatggaaatcataaactgactcttggtttgatttggaatataatcctccactggcaggtcaaaaatgtaatgaaaaatatcatggctggattgcaacaaaccaacagtgaaaagattctcctgagctgggtccgacaatcaactcgtaattatccacaggttaatgtaatcaacttcaccaccagctggtctgatggcctggctttgaatgctctcatccatagtcataggccagacctatttgactggaatagtgtggtttgccagcagtcagccacacaacgactggaacatgcattcaacatcgccagatatcaattaggcatagagaaactactcgatcctgaagatgttgataccacctatccagataagaagtccatcttaatgtacatcacatcactcttccaagttttgcctcaacaagtgagcattgaagccatccaggaagtggaaatgttgccaaggccacctaaagtgactaaagaagaacattttcagttacatcatcaaatgcactattctcaacagatcacggtcagtctagcacagggatatgagagaacttcttcccctaagcctcgattcaagagctatgcctacacacaggctgcttatgtcaccacctctgaccctacacggagcccatttccttcacagcatttggaagctcctgaagacaagtcatttggcagttcattgatggagagtgaagtaaacctggaccgttatcaaacagctttagaagaagtattatcgtggcttctttctgctgaggacacattgcaagcacaaggagagatttctaatgatgtggaagtggtgaaagaccagtttcatactcatgaggggtacatgatggatttgacagcccatcagggccgggttggtaatattctacaattgggaagtaagctgattggaacaggaaaattatcagaagatgaagaaactgaagtacaagagcagatgaatctcctaaattcaagatgggaatgcctcagggtagctagcatggaaaaacaaagcaatttacatagagttttaatggatctccagaatcagaaactgaaagagttgaatgactggctaacaaaaacagaagaaagaacaaggaaaatggaggaagagcctcttggacctgatcttgaagacctaaaacgccaagtacaacaacataaggtgcttcaagaagatctagaacaagaacaagtcagggtcaattctctcactcacatggtggtggtagttgatgaatctagtggagatcacgcaactgctgctttggaagaacaacttaaggtattgggagatcgatgggcaaacatctgtagatggacagaagaccgctgggttcttttacaagacatccttctcaaatggcaacgtcttactgaagaacagtgcctttttagtgcatggctttcagaaaaagaagatgcagtgaacaagattcacacaactggctttaaagatcaaaatgaaatgttatcaagtcttcaaaaactggccgttttaaaagcggatctagaaaagaaaaagcaatccatgggcaaactgtattcactcaaacaagatcttctttcaacactgaagaataagtcagtgacccagaagacggaagcatggctggataactttgcccggtgttgggataatttagtccaaaaacttgaaaagagtacagcacagatttcacaggctgtcaccaccactcagccatcactaacacagacaactgtaatggaaacagtaactacggtgaccacaagggaacagatcctggtaaagcatgctcaagaggaacttccaccaccacctccccaaaagaagaggcagattactgtggattctgaaattaggaaaaggttggatgttgatataactgaacttcacagctggattactcgctcagaagctgtgttgcagagtcctgaatttgcaatctttcggaaggaaggcaacttctcagacttaaaagaaaaagtcaatgccatagagcgagaaaaagctgagaagttcagaaaactgcaagatgccagcagatcagctcaggccctggtggaacagatggtgaatgagggtgttaatgcagatagcatcaaacaagcctcagaacaactgaacagccggtggatcgaattctgccagttgctaagtgagagacttaactggctggagtatcagaacaacatcatcgctttctataatcagctacaacaattggagcagatgacaactactgctgaaaactggttgaaaatccaacccaccaccccatcagagccaacagcaattaaaagtcagttaaaaatttgtaaggatgaagtcaaccggctatcagatcttcaacctcaaattgaacgattaaaaattcaaagcatagccctgaaagagaaaggacaaggacccatgttcctggatgcagactttgtggcctttacaaatcattttaagcaagtcttttctgatgtgcaggccagagagaaagagctacagacaatttttgacactttgccaccaatgcgctatcaggagaccatgagtgccatcaggacatgggtccagcagtcagaaaccaaactctccatacctcaacttagtgtcaccgactatgaaatcatggagcagagactcggggaattgcaggctttacaaagttctctgcaagagcaacaaagtggcctatactatctcagcaccactgtgaaagagatgtcgaagaaagcgccctctgaaattagccggaaatatcaatcagaatttgaagaaattgagggacgctggaagaagctctcctcccagctggttgagcattgtcaaaagctagaggagcaaatgaataaactccgaaaaattcagaatcacatacaaaccctgaagaaatggatggctgaagttgatgtttttctgaaggaggaatggcctgcccttggggattcagaaattctaaaaaagcagctgaaacagtgcagacttttagtcagtgatattcagacaattcagcccagtctaaacagtgtcaatgaaggtgggcagaagataaagaatgaagcagagccagagtttgcttcgagacttgagacagaactcaaagaacttaacactcagtgggatcacatgtgccaacaggtctatgccagaaaggaggccttgaagggaggtttggagaaaactgtaagcctccagaaagatctatcagagatgcacgaatggatgacacaagctgaagaagagtatcttgagagagattttgaatataaaactccagatgaattacagaaagcagttgaagagatgaagagagctaaagaagaggcccaacaaaaagaagcgaaagtgaaactccttactgagtctgtaaatagtgtcatagctcaagctccacctgtagcacaagaggccttaaaaaaggaacttgaaactctaaccaccaactaccagtggctctgcactaggctgaatgggaaatgcaagactttggaagaagtttgggcatgttggcatgagttattgtcatacttggagaaagcaaacaagtggctaaatgaagtagaatttaaacttaaaaccactgaaaacattcctggcggagctgaggaaatctctgaggtgctagattcacttgaaaatttgatgcgacattcagaggataacccaaatcagattcgcatattggcacagaccctaacagatggcggagtcatggatgagctaatcaatgaggaacttgagacatttaattctcgttggagggaactacatgaagaggctgtaaggaggcaaaagttgcttgaacagagcatccagtctgcccaggagactgaaaaatccttacacttaatccaggagtccctcacattcattgacaagcagttggcagcttatattgcagacaaggtggacgcagctcaaatgcctcaggaagcccagaaaatccaatctgatttgacaagtcatgagatcagtttagaagaaatgaagaaacataatcaggggaaggaggctgcccaaagagtcctgtctcagattgatgttgcacagaaaaaattacaagatgtctccatgaagtttcgattattccagaaaccagccaattttgagcagcgtctacaagaaagtaagatgattttagatgaagtgaagatgcacttgcctgcattggaaacaaagagtgtggaacaggaagtagtacagtcacagctaaatcattgtgtgaacttgtataaaagtctgagtgaagtgaagtctgaagtggaaatggtgataaagactggacgtcagattgtacagaaaaagcagacggaaaatcccaaagaacttgatgaaagagtaacagctttgaaattgcattataatgagctgggagcaaaggtaacagaaagaaagcaacagttggagaaatgcttgaaattgtcccgtaagatgcgaaaggaaatgaatgtcttgacagaatggctggcagctacagatatggaattgacaaagagatcagcagttgaaggaatgcctagtaatttggattctgaagttgcctggggaaaggctactcaaaaagagattgagaaacagaaggtgcacctgaagagtatcacagaggtaggagaggccttgaaaacagttttgggcaagaaggagacgttggtggaagataaactcagtcttctgaatagtaactggatagctgtcacctcccgagcagaagagtggttaaatcttttgttggaataccagaaacacatggaaacttttgaccagaatgtggaccacatcacaaagtggatcattcaggctgacacacttttggatgaatcagagaaaaagaaaccccagcaaaaagaagacgtgcttaagcgtttaaaggcagaactgaatgacatacgcccaaaggtggactctacacgtgaccaagcagcaaacttgatggcaaaccgcggtgaccactgcaggaaattagtagagccccaaatctcagagctcaaccatcgatttgcagccatttcacacagaattaagactggaaaggcctccattcctttgaaggaattggagcagtttaactcagatatacaaaaattgcttgaaccactggaggctgaaattcagcagggggtgaatctgaaagaggaagacttcaataaagatatgaatgaagacaatgagggtactgtaaaagaattgttgcaaagaggagacaacttacaacaaagaatcacagatgagagaaagcgagaggaaataaagataaaacagcagctgttacagacaaaacataatgctctcaaggatttgaggtctcaaagaagaaaaaaggctctagaaatttctcatcagtggtatcagtacaagaggcaggctgatgatctcctgaaatgcttggatgacattgaaaaaaaattagccagcctacctgagcccagagatgaaaggaaaataaaggaaattgatcgggaattgcagaagaagaaagaggagctgaatgcagtgcgtaggcaagctgagggcttgtctgaggatggggccgcaatggcagtggagccaactcagatccagctcagcaagcgctggcgggaaattgagagcaaatttgctcagtttcgaagactcaactttgcacaaattcacactgtccgtgaagaaacgatgatggtgatgactgaagacatgcctttggaaatttcttatgtgccttctacttatttgactgaaatcactcatgtctcacaagccctattagaagtggaacaacttctcaatgctcctgacctctgtgctaaggactttgaagatctctttaagcaagaggagtctctgaagaatataaaagatagtctacaacaaagctcaggtcggattgacattattcatagcaagaagacagcagcattgcaaagtgcaacgcctgtggaaagggtgaagctacaggaagctctctcccagcttgatttccaatgggaaaaagttaacaaaatgtacaaggaccgacaagggcgatttgacagatctgttgagaaatggcggcgttttcattatgatataaagatatttaatcagtggctaacagaagctgaacagtttctcagaaagacacaaattcctgagaattgggaacatgctaaatacaaatggtatcttaaggaactccaggatggcattgggcagcggcaaactgttgtcagaacattgaatgcaactggggaagaaataattcagcaatcctcaaaaacagatgccagtattctacaggaaaaattgggaagcctgaatctgcggtggcaggaggtctgcaaacagctgtcagacagaaaaaagaggctagaagaacaaaagaatatcttgtcagaatttcaaagagatttaaatgaatttgttttatggttggaggaagcagataacattgctagtatcccacttgaacctggaaaagagcagcaactaaaagaaaagcttgagcaagtcaagttactggtggaagagttgcccctgcgccagggaattctcaaacaattaaatgaaactggaggacccgtgcttgtaagtgctcccataagcccagaagagcaagataaacttgaaaataagctcaagcagacaaatctccagtggataaaggtttccagagctttacctgagaaacaaggagaaattgaagctcaaataaaagaccttgggcagcttgaaaaaaagcttgaagaccttgaagagcagttaaatcatctgctgctgtggttatctcctattaggaatcagttggaaatttataaccaaccaaaccaagaaggaccatttgacgttaaggaaactgaaatagcagttcaagctaaacaaccggatgtggaagagattttgtctaaagggcagcatttgtacaaggaaaaaccagccactcagccagtgaagaggaagttagaagatctgagctctgagtggaaggcggtaaaccgtttacttcaagagctgagggcaaagcagcctgacctagctcctggactgaccactattggagcctctcctactcagactgttactctggtgacacaacctgtggttactaaggaaactgccatctccaaactagaaatgccatcttccttgatgttggaggtacctgctctggcagatttcaaccgggcttggacagaacttaccgactggctttctctgcttgatcaagttataaaatcacagagggtgatggtgggtgaccttgaggatatcaacgagatgatcatcaagcagaaggcaacaatgcaggatttggaacagaggcgtccccagttggaagaactcattaccgctgcccaaaatttgaaaaacaagaccagcaatcaagaggctagaacaatcattacggatcgaattgaaagaattcagaatcagtgggatgaagtacaagaacaccttcagaaccggaggcaacagttgaatgaaatgttaaaggattcaacacaatggctggaagctaaggaagaagctgagcaggtcttaggacaggccagagccaagcttgagtcatggaaggagggtccctatacagtagatgcaatccaaaagaaaatcacagaaaccaagcagttggccaaagacctccgccagtggcagacaaatgtagatgtggcaaatgacttggccctgaaacttctccgggattattctgcagatgataccagaaaagtccacatgataacagagaatatcaatgcctcttggagaagcattcataaaagggtgagtgagcgagaggctgctttggaagaaactcatagattactgcaacagttccccctggacctggaaaagtttcttgcctggcttacagaagctgaaacaactgccaatgtcctacaggatgctacccgtaaggaaaggctcctagaagactccaagggagtaaaagagctgatgaaacaatggcaagacctccaaggtgaaattgaagctcacacagatgtttatcacaacctggatgaaaacagccaaaaaatcctgagatccctggaaggttccgatgatgcagtcctgttacaaagacgtttggataacatgaacttcaagtggagtgaacttcggaaaaagtctctcaacattaggtcccatttggaagccagttctgaccagtggaagcgtctgcacctttctctgcaggaacttctggtgtggctacagctgaaagatgatgaattaagccggcaggcacctattggaggcgactttccagcagttcagaagcagaacgatgtacatagggccttcaagagggaattgaaaactaaagaacctgtaatcatgagtactcttgagactgtacgaatatttctgacagagcagcctttggaaggactagagaaactctaccaggagcccagagagctgcctcctgaggagagagcccagaatgtcactcggcttctacgaaagcaggctgaggaggtcaatactgagtgggaaaaattgaacctgcactccgctgactggcagagaaaaatagatgagacccttgaaagactccgggaacttcaagaggccacggatgagctggacctcaagctgcgccaagctgaggtgatcaagggatcctggcagcccgtgggcgatctcctcattgactctctccaagatcacctcgagaaagtcaaggcacttcgaggagaaattgcgcctctgaaagagaacgtgagccacgtcaatgaccttgctcgccagcttaccactttgggcattcagctctcaccgtataacctcagcactctggaagacctgaacaccagatggaagcttctgcaggtggccgtcgaggaccgagtcaggcagctgcatgaagcccacagggactttggtccagcatctcagcactttctttccacgtctgtccagggtccctgggagagagccatctcgccaaacaaagtgccctactatatcaaccacgagactcaaacaacttgctgggaccatcccaaaatgacagagctctaccagtctttagctgacctgaataatgtcagattctcagcttataggactgccatgaaactccgaagactgcagaaggccctttgcttggatctcttgagcctgtcagctgcatgtgatgccttggaccagcacaacctcaagcaaaatgaccagcccatggatatcctgcagattattaattgtttgaccactatttatgaccgcctggagcaagagcacaacaatttggtcaacgtccctctctgcgtggatatgtgtctgaactggctgctgaatgtttatgatacgggacgaacagggaggatccgtgtcctgtcttttaaaactggcatcatttccctgtgtaaagcacatttggaagacaagtacagataccttttcaagcaagtggcaagttcaacaggattttgtgaccagcgcaggctgggcctccttctgcatgattctatccaaattccaagacagttgggtgaagttgcatcctttgggggcagtaacattgagccaagtgtccggagctgcttccaatttgctaataataagccagagatcgaagcggccctcttcctagactggatgagactggaaccccagtccatggtgtggctgcccgtcctgcacagagtggctgctgcagaaactgccaagcatcaggccaaatgtaacatctgcaaagagtgtccaatcattggattcaggtacaggagtctaaagcactttaattatgacatctgccaaagctgctttttttctggtcgagttgcaaaaggccataaaatgcactatcccatggtggaatattgcactccgactacatcaggagaagatgttcgagactttgccaaggtactaaaaaacaaatttcgaaccaaaaggtattttgcgaagcatccccgaatgggctacctgccagtgcagactgtcttagagggggacaacatggaaactcccgttactctgatcaacttctggccagtagattctgcgcctgcctcgtcccctcagctttcacacgatgatactcattcacgcattgaacattatgctagcaggctagcagaaatggaaaacagcaatggatcttatctaaatgatagcatctctcctaatgagagcatagatgatgaacatttgttaatccagcattactgccaaagtttgaaccaggactcccccctgagccagcctcgtagtcctgcccagatcttgatttccttagagagtgaggaaagaggggagctagagagaatcctagcagatcttgaggaagaaaacaggaatctgcaagcagaatatgaccgtctaaagcagcagcacgaacataaaggcctgtccccactgccgtcccctcctgaaatgatgcccacctctccccagagtccccgggatgctgagctcattgctgaggccaagctactgcgtcaacacaaaggccgcctggaagccaggatgcaaatcctggaagaccacaataaacagctggagtcacagttacacaggctaaggcagctgctggagcaaccccaggcagaggccaaagtgaatggcacaacggtgtcctctccttctacctctctacagaggtccgacagcagtcagcctatgctgctccgagtggttggcagtcaaacttcggactccatgggtgaggaagatcttctcagtcctccccaggacacaagcacagggttagaggaggtgatggagcaactcaacaactccttccctagttcaagaggaagaaatacccctggaaagccaatgagagaggacacaatgtaggaagtcttttccacatggcagatgatttgggcagagcgatggagtccttagtatcagtcatgacagatgaagaaggagcagaataaatgttttacaactcctgattcccgcatggtttttataatattcatacaacaaagaggattagacagtaagagtttacaagaaataaatctatatttttgtgaagggtagtggtattatactgtagatttcagtagtttctaagtctgttattgttttgttaacaatggcaggttttacacgtctatgcaattgtacaaaaaagttataagaaaactacatgtaaaatcttgatagctaaataacttgccatttctttatatggaacgcattttgggttgtttaaaaatttataacagttataaagaaagattgtaaactaaagtgtgctttataaaaaaaagttgtttataaaaacccctaaaaacaaaacaaacacacacacacacacatacacacacacacacaaaactttgaggcagcgcattgttttgcatccttttggcgtgatatccatatgaaattcatggctttttctttttttgcatattaaagataagacttcctctaccaccacaccaaatgactactacacactgctcatttgagaactgtcagctgagtggggcaggcttgagttttcatttcatatatctatatgtctataagtatataaatactatagttatatagataaagagatacgaatttctatagactgactttttccattttttaaatgttcatgtcacatcctaatagaaagaaattacttctagtcagtcatccaggcttacctgcttggtctagaatggatttttcccggagccggaagccaggaggaaactacaccacactaaaacattgtctacagctccagatgtttctcattttaaacaactttccactgacaacgaaagtaaagtaaagtattggatttttttaaagggaacatgtgaatgaatacacaggacttattatatcagagtgagtaatcggttggttggttgattgattgattgattgatacattcagcttcctgctgctagcaatgccacgatttagatttaatgatgcttcagtggaaatcaatcagaaggtattctgaccttgtgaacatcagaaggtattttttaactcccaagcagtagcaggacgatgatagggctggagggctatggattcccagcccatccctgtgaaggagtaggccactctttaagtgaaggattggatgattgttcataatacataaagttctctgtaattacaactaaattattatgccctcttctcacagtcaaaaggaactgggtggtttggtttttgttgcttttttagatttattgtcccatgtgggatgagtttttaaatgccacaagacataatttaaaataaataaactttgggaaaaggtgtaaaacagtagccccatcacatttgtgatactgacaggtatcaacccagaagcccatgaactgtgtttccatcctttgcatttctctgcgagtagttccacacaggtttgtaagtaagtaagaaagaaggcaaattgattcaaatgttacaaaaaaacccttcttggtggattagacaggttaaatatataaacaaacaaacaaaaattgctcaaaaaagaggagaaaagctcaagaggaaaagctaaggactggtaggaaaaagctttactctttcatgccattttatttctttttgatttttaaatcattcattcaatagataccaccgtgtgacctataattttgcaaatctgttacctctgacatcaagtgtaattagcttttggagagtgggctgacatcaagtgtaattagcttttggagagtgggttttgtccattattaataattaattaattaacatcaaacacggcttctcatgctatttctacctcactttggttttggggtgttcctgataattgtgcacacctgagttcacagcttcaccacttgtccattgcgttattttctttttcctttataattctttctttttccttcataattttcaaaagaaaacccaaagctctaaggtaacaaattaccaaattacatgaagatttggtttttgtcttgcatttttttcctttatgtgacgctggaccttttctttacccaaggatttttaaaactcagatttaaaacaaggggttactttacatcctactaagaagtttaagtaagtaagtttcattctaaaatcagaggtaaatagagtgcataaataattttgttttaatctttttgtttttcttttagacacattagctctggagtgagtctgtcataatatttgaacaaaaattgagagctttattgctgcattttaagcataattaatttggacattatttcgtgttgtgttctttataaccaccaagtattaaactgtaaatcataatgtaactgaagcataaacatcacatggcatgttttgtcattgttttcaggtactgagttcttacttgagtatcataatatattgtgttttaacaccaacactgtaacatttacgaattatttttttaaacttcagttttactgcattttcacaacatatcagacttcaccaaatatatgccttactattgtattatagtactgctttactgtgtatctcaataaagcacgcagttatgttac

SEQ ID NO: 9143 - DNA, 7032 bp, Homo sapiens
  source 1..7032: mol_type = unassigned DNA
atgactgagatgattttgctaattttttttccagcctatttccttaatgctgtaaggaggcaaaagttgcttgaacagagcatccagtctgcccaggagactgaaaaatccttacacttaatccaggagtccctcacattcattgacaagcagttggcagcttatattgcagacaaggtggacgcagctcaaatgcctcaggaagcccagaaaatccaatctgatttgacaagtcatgagatcagtttagaagaaatgaagaaacataatcaggggaaggaggctgcccaaagagtcctgtctcagattgatgttgcacagaaaaaattacaagatgtctccatgaagtttcgattattccagaaaccagccaattttgagcagcgtctacaagaaagtaagatgattttagatgaagtgaagatgcacttgcctgcattggaaacaaagagtgtggaacaggaagtagtacagtcacagctaaatcattgtgtgaacttgtataaaagtctgagtgaagtgaagtctgaagtggaaatggtgataaagactggacgtcagattgtacagaaaaagcagacggaaaatcccaaagaacttgatgaaagagtaacagctttgaaattgcattataatgagctgggagcaaaggtaacagaaagaaagcaacagttggagaaatgcttgaaattgtcccgtaagatgcgaaaggaaatgaatgtcttgacagaatggctggcagctacagatatggaattgacaaagagatcagcagttgaaggaatgcctagtaatttggattctgaagttgcctggggaaaggctactcaaaaagagattgagaaacagaaggtgcacctgaagagtatcacagaggtaggagaggccttgaaaacagttttgggcaagaaggagacgttggtggaagataaactcagtcttctgaatagtaactggatagctgtcacctcccgagcagaagagtggttaaatcttttgttggaataccagaaacacatggaaacttttgaccagaatgtggaccacatcacaaagtggatcattcaggctgacacacttttggatgaatcagagaaaaagaaaccccagcaaaaagaagacgtgcttaagcgtttaaaggcagaactgaatgacatacgcccaaaggtggactctacacgtgaccaagcagcaaacttgatggcaaaccgcggtgaccactgcaggaaattagtagagccccaaatctcagagctcaaccatcgatttgcagccatttcacacagaattaagactggaaaggcctccattcctttgaaggaattggagcagtttaactcagatatacaaaaattgcttgaaccactggaggctgaaattcagcagggggtgaatctgaaagaggaagacttcaataaagatatgaatgaagacaatgagggtactgtaaaagaattgttgcaaagaggagacaacttacaacaaagaatcacagatgagagaaagcgagaggaaataaagataaaacagcagctgttacagacaaaacataatgctctcaaggatttgaggtctcaaagaagaaaaaaggctctagaaatttctcatcagtggtatcagtacaagaggcaggctgatgatctcctgaaatgcttggatgacattgaaaaaaaattagccagcctacctgagcccagagatgaaaggaaaataaaggaaattgatcgggaattgcagaagaagaaagaggagctgaatgcagtgcgtaggcaagctgagggcttgtctgaggatggggccgcaatggcagtggagccaactcagatccagctcagcaagcgctggcgggaaattgagagcaaatttgctcagtttcgaagactcaactttgcacaaattcacactgtccgtgaagaaacgatgatggtgatgactgaagacatgcctttggaaatttcttatgtgccttctacttatttgactgaaatcactcatgtctcacaagccctattagaagtggaacaacttctcaatgctcctgacctctgtgctaaggactttgaagatctctttaagcaagaggagtctctgaagaatataaaagatagtctacaacaaagctcaggtcggattgacattattcatagcaagaagacagcagcattgcaaagtgcaacgcctgtggaaagggtgaagctacaggaagctctctcccagcttgatttccaatgggaaaaagttaacaaaatgtacaaggaccgacaagggcgatttgacagatctgttgagaaatggcggcgttttcattatgatataaagatatttaatcagtggctaacagaagctgaacagtttctcagaaagacacaaattcctgagaattgggaacatgctaaatacaaatggtatcttaaggaactccaggatggcattgggcagcggcaaactgttgtcagaacattgaatgcaactggggaagaaataattcagcaatcctcaaaaacagatgccagtattctacaggaaaaattgggaagcctgaatctgcggtggcaggaggtctgcaaacagctgtcagacagaaaaaagaggctagaagaacaaaagaatatcttgtcagaatttcaaagagatttaaatgaatttgttttatggttggaggaagcagataacattgctagtatcccacttgaacctggaaaagagcagcaactaaaagaaaagcttgagcaagtcaagttactggtggaagagttgcccctgcgccagggaattctcaaacaattaaatgaaactggaggacccgtgcttgtaagtgctcccataagcccagaagagcaagataaacttgaaaataagctcaagcagacaaatctccagtggataaaggtttccagagctttacctgagaaacaaggagaaattgaagctcaaataaaagaccttgggcagcttgaaaaaaagcttgaagaccttgaagagcagttaaatcatctgctgctgtggttatctcctattaggaatcagttggaaatttataaccaaccaaaccaagaaggaccatttgacgttaaggaaactgaaatagcagttcaagctaaacaaccggatgtggaagagattttgtctaaagggcagcatttgtacaaggaaaaaccagccactcagccagtgaagaggaagttagaagatctgagctctgagtggaaggcggtaaaccgtttacttcaagagctgagggcaaagcagcctgacctagctcctggactgaccactattggagcctctcctactcagactgttactctggtgacacaacctgtggttactaaggaaactgccatctccaaactagaaatgccatcttccttgatgttggaggtacctgctctggcagatttcaaccgggcttggacagaacttaccgactggctttctctgcttgatcaagttataaaatcacagagggtgatggtgggtgaccttgaggatatcaacgagatgatcatcaagcagaaggcaacaatgcaggatttggaacagaggcgtccccagttggaagaactcattaccgctgcccaaaatttgaaaaacaagaccagcaatcaagaggctagaacaatcattacggatcgaattgaaagaattcagaatcagtgggatgaagtacaagaacaccttcagaaccggaggcaacagttgaatgaaatgttaaaggattcaacacaatggctggaagctaaggaagaagctgagcaggtcttaggacaggccagagccaagcttgagtcatggaaggagggtccctatacagtagatgcaatccaaaagaaaatcacagaaaccaagcagttggccaaagacctccgccagtggcagacaaatgtagatgtggcaaatgacttggccctgaaacttctccgggattattctgcagatgataccagaaaagtccacatgataacagagaatatcaatgcctcttggagaagcattcataaaagggtgagtgagcgagaggctgctttggaagaaactcatagattactgcaacagttccccctggacctggaaaagtttcttgcctggcttacagaagctgaaacaactgccaatgtcctacaggatgctacccgtaaggaaaggctcctagaagactccaagggagtaaaagagctgatgaaacaatggcaagacctccaaggtgaaattgaagctcacacagatgtttatcacaacctggatgaaaacagccaaaaaatcctgagatccctggaaggttccgatgatgcagtcctgttacaaagacgtttggataacatgaacttcaagtggagtgaacttcggaaaaagtctctcaacattaggtcccatttggaagccagttctgaccagtggaagcgtctgcacctttctctgcaggaacttctggtgtggctacagctgaaagatgatgaattaagccggcaggcacctattggaggcgactttccagcagttcagaagcagaacgatgtacatagggccttcaagagggaattgaaaactaaagaacctgtaatcatgagtactcttgagactgtacgaatatttctgacagagcagcctttggaaggactagagaaactctaccaggagcccagagagctgcctcctgaggagagagcccagaatgtcactcggcttctacgaaagcaggctgaggaggtcaatactgagtgggaaaaattgaacctgcactccgctgactggcagagaaaaatagatgagacccttgaaagactccgggaacttcaagaggccacggatgagctggacctcaagctgcgccaagctgaggtgatcaagggatcctggcagcccgtgggcgatctcctcattgactctctccaagatcacctcgagaaagtcaaggcacttcgaggagaaattgcgcctctgaaagagaacgtgagccacgtcaatgaccttgctcgccagcttaccactttgggcattcagctctcaccgtataacctcagcactctggaagacctgaacaccagatggaagcttctgcaggtggccgtcgaggaccgagtcaggcagctgcatgaagcccacagggactttggtccagcatctcagcactttctttccacgtctgtccagggtccctgggagagagccatctcgccaaacaaagtgccctactatatcaaccacgagactcaaacaacttgctgggaccatcccaaaatgacagagctctaccagtctttagctgacctgaataatgtcagattctcagcttataggactgccatgaaactccgaagactgcagaaggccctttgcttggatctcttgagcctgtcagctgcatgtgatgccttggaccagcacaacctcaagcaaaatgaccagcccatggatatcctgcagattattaattgtttgaccactatttatgaccgcctggagcaagagcacaacaatttggtcaacgtccctctctgcgtggatatgtgtctgaactggctgctgaatgtttatgatacgggacgaacagggaggatccgtgtcctgtcttttaaaactggcatcatttccctgtgtaaagcacatttggaagacaagtacagataccttttcaagcaagtggcaagttcaacaggattttgtgaccagcgcaggctgggcctccttctgcatgattctatccaaattccaagacagttgggtgaagttgcatcctttgggggcagtaacattgagccaagtgtccggagctgcttccaatttgctaataataagccagagatcgaagcggccctcttcctagactggatgagactggaaccccagtccatggtgtggctgcccgtcctgcacagagtggctgctgcagaaactgccaagcatcaggccaaatgtaacatctgcaaagagtgtccaatcattggattcaggtacaggagtctaaagcactttaattatgacatctgccaaagctgctttttttctggtcgagttgcaaaaggccataaaatgcactatcccatggtggaatattgcactccgactacatcaggagaagatgttcgagactttgccaaggtactaaaaaacaaatttcgaaccaaaaggtattttgcgaagcatccccgaatgggctacctgccagtgcagactgtcttagagggggacaacatggaaactcccgttactctgatcaacttctggccagtagattctgcgcctgcctcgtcccctcagctttcacacgatgatactcattcacgcattgaacattatgctagcaggctagcagaaatggaaaacagcaatggatcttatctaaatgatagcatctctcctaatgagagcatagatgatgaacatttgttaatccagcattactgccaaagtttgaaccaggactcccccctgagccagcctcgtagtcctgcccagatcttgatttccttagagagtgaggaaagaggggagctagagagaatcctagcagatcttgaggaagaaaacaggaatctgcaagcagaatatgaccgtctaaagcagcagcacgaacataaaggcctgtccccactgccgtcccctcctgaaatgatgcccacctctccccagagtccccgggatgctgagctcattgctgaggccaagctactgcgtcaacacaaaggccgcctggaagccaggatgcaaatcctggaagaccacaataaacagctggagtcacagttacacaggctaaggcagctgctggagcaaccccaggcagaggccaaagtgaatggcacaacggtgtcctctccttctacctctctacagaggtccgacagcagtcagcctatgctgctccgagtggttggcagtcaaacttcggactccatgggtgaggaagatcttctcagtcctccccaggacacaagcacagggttagaggaggtgatggagcaactcaacaactccttccctagttcaagaggaagaaatacccctggaaagccaatgagagaggacaccccc

SEQ ID NO: 9144 - DNA, 7023 bp, Homo sapiens
  source 1..7023: mol_type = unassigned DNA
atgagtgccaggaagctgcgaaatctgtcttacaaaaaggctgtaaggaggcaaaagttgcttgaacagagcatccagtctgcccaggagactgaaaaatccttacacttaatccaggagtccctcacattcattgacaagcagttggcagcttatattgcagacaaggtggacgcagctcaaatgcctcaggaagcccagaaaatccaatctgatttgacaagtcatgagatcagtttagaagaaatgaagaaacataatcaggggaaggaggctgcccaaagagtcctgtctcagattgatgttgcacagaaaaaattacaagatgtctccatgaagtttcgattattccagaaaccagccaattttgagcagcgtctacaagaaagtaagatgattttagatgaagtgaagatgcacttgcctgcattggaaacaaagagtgtggaacaggaagtagtacagtcacagctaaatcattgtgtgaacttgtataaaagtctgagtgaagtgaagtctgaagtggaaatggtgataaagactggacgtcagattgtacagaaaaagcagacggaaaatcccaaagaacttgatgaaagagtaacagctttgaaattgcattataatgagctgggagcaaaggtaacagaaagaaagcaacagttggagaaatgcttgaaattgtcccgtaagatgcgaaaggaaatgaatgtcttgacagaatggctggcagctacagatatggaattgacaaagagatcagcagttgaaggaatgcctagtaatttggattctgaagttgcctggggaaaggctactcaaaaagagattgagaaacagaaggtgcacctgaagagtatcacagaggtaggagaggccttgaaaacagttttgggcaagaaggagacgttggtggaagataaactcagtcttctgaatagtaactggatagctgtcacctcccgagcagaagagtggttaaatcttttgttggaataccagaaacacatggaaacttttgaccagaatgtggaccacatcacaaagtggatcattcaggctgacacacttttggatgaatcagagaaaaagaaaccccagcaaaaagaagacgtgcttaagcgtttaaaggcagaactgaatgacatacgcccaaaggtggactctacacgtgaccaagcagcaaacttgatggcaaaccgcggtgaccactgcaggaaattagtagagccccaaatctcagagctcaaccatcgatttgcagccatttcacacagaattaagactggaaaggcctccattcctttgaaggaattggagcagtttaactcagatatacaaaaattgcttgaaccactggaggctgaaattcagcagggggtgaatctgaaagaggaagacttcaataaagatatgaatgaagacaatgagggtactgtaaaagaattgttgcaaagaggagacaacttacaacaaagaatcacagatgagagaaagcgagaggaaataaagataaaacagcagctgttacagacaaaacataatgctctcaaggatttgaggtctcaaagaagaaaaaaggctctagaaatttctcatcagtggtatcagtacaagaggcaggctgatgatctcctgaaatgcttggatgacattgaaaaaaaattagccagcctacctgagcccagagatgaaaggaaaataaaggaaattgatcgggaattgcagaagaagaaagaggagctgaatgcagtgcgtaggcaagctgagggcttgtctgaggatggggccgcaatggcagtggagccaactcagatccagctcagcaagcgctggcgggaaattgagagcaaatttgctcagtttcgaagactcaactttgcacaaattcacactgtccgtgaagaaacgatgatggtgatgactgaagacatgcctttggaaatttcttatgtgccttctacttatttgactgaaatcactcatgtctcacaagccctattagaagtggaacaacttctcaatgctcctgacctctgtgctaaggactttgaagatctctttaagcaagaggagtctctgaagaatataaaagatagtctacaacaaagctcaggtcggattgacattattcatagcaagaagacagcagcattgcaaagtgcaacgcctgtggaaagggtgaagctacaggaagctctctcccagcttgatttccaatgggaaaaagttaacaaaatgtacaaggaccgacaagggcgatttgacagatctgttgagaaatggcggcgttttcattatgatataaagatatttaatcagtggctaacagaagctgaacagtttctcagaaagacacaaattcctgagaattgggaacatgctaaatacaaatggtatcttaaggaactccaggatggcattgggcagcggcaaactgttgtcagaacattgaatgcaactggggaagaaataattcagcaatcctcaaaaacagatgccagtattctacaggaaaaattgggaagcctgaatctgcggtggcaggaggtctgcaaacagctgtcagacagaaaaaagaggctagaagaacaaaagaatatcttgtcagaatttcaaagagatttaaatgaatttgttttatggttggaggaagcagataacattgctagtatcccacttgaacctggaaaagagcagcaactaaaagaaaagcttgagcaagtcaagttactggtggaagagttgcccctgcgccagggaattctcaaacaattaaatgaaactggaggacccgtgcttgtaagtgctcccataagcccagaagagcaagataaacttgaaaataagctcaagcagacaaatctccagtggataaaggtttccagagctttacctgagaaacaaggagaaattgaagctcaaataaaagaccttgggcagcttgaaaaaaagcttgaagaccttgaagagcagttaaatcatctgctgctgtggttatctcctattaggaatcagttggaaatttataaccaaccaaaccaagaaggaccatttgacgttaaggaaactgaaatagcagttcaagctaaacaaccggatgtggaagagattttgtctaaagggcagcatttgtacaaggaaaaaccagccactcagccagtgaagaggaagttagaagatctgagctctgagtggaaggcggtaaaccgtttacttcaagagctgagggcaaagcagcctgacctagctcctggactgaccactattggagcctctcctactcagactgttactctggtgacacaacctgtggttactaaggaaactgccatctccaaactagaaatgccatcttccttgatgttggaggtacctgctctggcagatttcaaccgggcttggacagaacttaccgactggctttctctgcttgatcaagttataaaatcacagagggtgatggtgggtgaccttgaggatatcaacgagatgatcatcaagcagaaggcaacaatgcaggatttggaacagaggcgtccccagttggaagaactcattaccgctgcccaaaatttgaaaaacaagaccagcaatcaagaggctagaacaatcattacggatcgaattgaaagaattcagaatcagtgggatgaagtacaagaacaccttcagaaccggaggcaacagttgaatgaaatgttaaaggattcaacacaatggctggaagctaaggaagaagctgagcaggtcttaggacaggccagagccaagcttgagtcatggaaggagggtccctatacagtagatgcaatccaaaagaaaatcacagaaaccaagcagttggccaaagacctccgccagtggcagacaaatgtagatgtggcaaatgacttggccctgaaacttctccgggattattctgcagatgataccagaaaagtccacatgataacagagaatatcaatgcctcttggagaagcattcataaaagggtgagtgagcgagaggctgctttggaagaaactcatagattactgcaacagttccccctggacctggaaaagtttcttgcctggcttacagaagctgaaacaactgccaatgtcctacaggatgctacccgtaaggaaaggctcctagaagactccaagggagtaaaagagctgatgaaacaatggcaagacctccaaggtgaaattgaagctcacacagatgtttatcacaacctggatgaaaacagccaaaaaatcctgagatccctggaaggttccgatgatgcagtcctgttacaaagacgtttggataacatgaacttcaagtggagtgaacttcggaaaaagtctctcaacattaggtcccatttggaagccagttctgaccagtggaagcgtctgcacctttctctgcaggaacttctggtgtggctacagctgaaagatgatgaattaagccggcaggcacctattggaggcgactttccagcagttcagaagcagaacgatgtacatagggccttcaagagggaattgaaaactaaagaacctgtaatcatgagtactcttgagactgtacgaatatttctgacagagcagcctttggaaggactagagaaactctaccaggagcccagagagctgcctcctgaggagagagcccagaatgtcactcggcttctacgaaagcaggctgaggaggtcaatactgagtgggaaaaattgaacctgcactccgctgactggcagagaaaaatagatgagacccttgaaagactccgggaacttcaagaggccacggatgagctggacctcaagctgcgccaagctgaggtgatcaagggatcctggcagcccgtgggcgatctcctcattgactctctccaagatcacctcgagaaagtcaaggcacttcgaggagaaattgcgcctctgaaagagaacgtgagccacgtcaatgaccttgctcgccagcttaccactttgggcattcagctctcaccgtataacctcagcactctggaagacctgaacaccagatggaagcttctgcaggtggccgtcgaggaccgagtcaggcagctgcatgaagcccacagggactttggtccagcatctcagcactttctttccacgtctgtccagggtccctgggagagagccatctcgccaaacaaagtgccctactatatcaaccacgagactcaaacaacttgctgggaccatcccaaaatgacagagctctaccagtctttagctgacctgaataatgtcagattctcagcttataggactgccatgaaactccgaagactgcagaaggccctttgcttggatctcttgagcctgtcagctgcatgtgatgccttggaccagcacaacctcaagcaaaatgaccagcccatggatatcctgcagattattaattgtttgaccactatttatgaccgcctggagcaagagcacaacaatttggtcaacgtccctctctgcgtggatatgtgtctgaactggctgctgaatgtttatgatacgggacgaacagggaggatccgtgtcctgtcttttaaaactggcatcatttccctgtgtaaagcacatttggaagacaagtacagataccttttcaagcaagtggcaagttcaacaggattttgtgaccagcgcaggctgggcctccttctgcatgattctatccaaattccaagacagttgggtgaagttgcatcctttgggggcagtaacattgagccaagtgtccggagctgcttccaatttgctaataataagccagagatcgaagcggccctcttcctagactggatgagactggaaccccagtccatggtgtggctgcccgtcctgcacagagtggctgctgcagaaactgccaagcatcaggccaaatgtaacatctgcaaagagtgtccaatcattggattcaggtacaggagtctaaagcactttaattatgacatctgccaaagctgctttttttctggtcgagttgcaaaaggccataaaatgcactatcccatggtggaatattgcactccgactacatcaggagaagatgttcgagactttgccaaggtactaaaaaacaaatttcgaaccaaaaggtattttgcgaagcatccccgaatgggctacctgccagtgcagactgtcttagagggggacaacatggaaactcccgttactctgatcaacttctggccagtagattctgcgcctgcctcgtcccctcagctttcacacgatgatactcattcacgcattgaacattatgctagcaggctagcagaaatggaaaacagcaatggatcttatctaaatgatagcatctctcctaatgagagcatagatgatgaacatttgttaatccagcattactgccaaagtttgaaccaggactcccccctgagccagcctcgtagtcctgcccagatcttgatttccttagagagtgaggaaagaggggagctagagagaatcctagcagatcttgaggaagaaaacaggaatctgcaagcagaatatgaccgtctaaagcagcagcacgaacataaaggcctgtccccactgccgtcccctcctgaaatgatgcccacctctccccagagtccccgggatgctgagctcattgctgaggccaagctactgcgtcaacacaaaggccgcctggaagccaggatgcaaatcctggaagaccacaataaacagctggagtcacagttacacaggctaaggcagctgctggagcaaccccaggcagaggccaaagtgaatggcacaacggtgtcctctccttctacctctctacagaggtccgacagcagtcagcctatgctgctccgagtggttggcagtcaaacttcggactccatgggtgaggaagatcttctcagtcctccccaggacacaagcacagggttagaggaggtgatggagcaactcaacaactccttccctagttcaagaggaagaaatacccctggaaagccaatgagagaggacaccccc

SEQ ID NO: 9145 - DNA, 2617 bp, Homo sapiens
  source 1..2617: mol_type = unassigned DNA
cacactcgaccgcggagcccttgcagccatgagggaacagctcaaaggccacgagactcaaacaacttgctgggaccatcccaaaatgacagagctctaccagtctttagctgacctgaataatgtcagattctcagcttataggactgccatgaaactccgaagactgcagaaggccctttgcttggatctcttgagcctgtcagctgcatgtgatgccttggaccagcacaacctcaagcaaaatgaccagcccatggatatcctgcagattattaattgtttgaccactatttatgaccgcctggagcaagagcacaacaatttggtcaacgtccctctctgcgtggatatgtgtctgaactggctgctgaatgtttatgatacgggacgaacagggaggatccgtgtcctgtcttttaaaactggcatcatttccctgtgtaaagcacatttggaagacaagtacagataccttttcaagcaagtggcaagttcaacaggattttgtgaccagcgcaggctgggcctccttctgcatgattctatccaaattccaagacagttgggtgaagttgcatcctttgggggcagtaacattgagccaagtgtccggagctgcttccaatttgctaataataagccagagatcgaagcggccctcttcctagactggatgagactggaaccccagtccatggtgtggctgcccgtcctgcacagagtggctgctgcagaaactgccaagcatcaggccaaatgtaacatctgcaaagagtgtccaatcattggattcaggtacaggagtctaaagcactttaattatgacatctgccaaagctgctttttttctggtcgagttgcaaaaggccataaaatgcactatcccatggtggaatattgcactccgactacatcaggagaagatgttcgagactttgccaaggtactaaaaaacaaatttcgaaccaaaaggtattttgcgaagcatccccgaatgggctacctgccagtgcagactgtcttagagggggacaacatggaaactcccgttactctgatcaacttctggccagtagattctgcgcctgcctcgtcccctcagctttcacacgatgatactcattcacgcattgaacattatgctagcaggctagcagaaatggaaaacagcaatggatcttatctaaatgatagcatctctcctaatgagagcatagatgatgaacatttgttaatccagcattactgccaaagtttgaaccaggactcccccctgagccagcctcgtagtcctgcccagatcttgatttccttagagagtgaggaaagaggggagctagagagaatcctagcagatcttgaggaagaaaacaggaatctgcaagcagaatatgaccgtctaaagcagcagcacgaacataaaggcctgtccccactgccgtcccctcctgaaatgatgcccacctctccccagagtccccgggatgctgagctcattgctgaggccaagctactgcgtcaacacaaaggccgcctggaagccaggatgcaaatcctggaagaccacaataaacagctggagtcacagttacacaggctaaggcagctgctggagcaaccccaggcagaggccaaagtgaatggcacaacggtgtcctctccttctacctctctacagaggtccgacagcagtcagcctatgctgctccgagtggttggcagtcaaacttcggactccatgggtgaggaagatcttctcagtcctccccaggacacaagcacagggttagaggaggtgatggagcaactcaacaactccttccctagttcaagaggaagaaatacccctggaaagccaatgagagaggacacaatgtaggaagtcttttccacatggcagatgatttgggcagagcgatggagtccttagtatcagtcatgacagatgaagaaggagcagaataaatgttttacaactcctgattcccgcatggtttttataatattcatacaacaaagaggattagacagtaagagtttacaagaaataaatctatatttttgtgaagggtagtggtattatactgtagatttcagtagtttctaagtctgttattgttttgttaacaatggcaggttttacacgtctatgcaattgtacaaaaaagttataagaaaactacatgtaaaatcttgatagctaaataacttgccatttctttatatggaacgcattttgggttgtttaaaaatttataacagttataaagaaagattgtaaactaaagtgtgctttataaaaaaaagttgtttataaaaacccctaaaaacaaaacaaacacacacacacacacatacacacacacacacaaaactttgaggcagcgcattgttttgcatccttttggcgtgatatccatatgaaattcatggctttttctttttttgcatattaaagataagacttcctctaccaccacaccaaatgactactacacactgctcatttgagaactgtcagctgagtggggcaggcttgagttttcatttcatatatctatatgtctataagtatataaatactatagttatatagataaagagatacgaattt

SEQ ID NO: 9146 - DNA, 7410 bp, Homo sapiens
  source 1..7410: mol_type = unassigned DNA
acactagcaatggcaaagctttgtgcggaggcattgctggctgctctgaactaaaagcatccgtggggaccgaaagaggtttttgcacaccttattaaggaactccaggatggcattgggcagcggcaaactgttgtcagaacattgaatgcaactggggaagaaataattcagcaatcctcaaaaacagatgccagtattctacaggaaaaattgggaagcctgaatctgcggtggcaggaggtctgcaaacagctgtcagacagaaaaaagaggctagaagaacaaaagaatatcttgtcagaatttcaaagagatttaaatgaatttgttttatggttggaggaagcagataacattgctagtatcccacttgaacctggaaaagagcagcaactaaaagaaaagcttgagcaagtcaagttactggtggaagagttgcccctgcgccagggaattctcaaacaattaaatgaaactggaggacccgtgcttgtaagtgctcccataagcccagaagagcaagataaacttgaaaataagctcaagcagacaaatctccagtggataaaggtttccagagctttacctgagaaacaaggagaaattgaagctcaaataaaagaccttgggcagcttgaaaaaaagcttgaagaccttgaagagcagttaaatcatctgctgctgtggttatctcctattaggaatcagttggaaatttataaccaaccaaaccaagaaggaccatttgacgttaaggaaactgaaatagcagttcaagctaaacaaccggatgtggaagagattttgtctaaagggcagcatttgtacaaggaaaaaccagccactcagccagtgaagaggaagttagaagatctgagctctgagtggaaggcggtaaaccgtttacttcaagagctgagggcaaagcagcctgacctagctcctggactgaccactattggagcctctcctactcagactgttactctggtgacacaacctgtggttactaaggaaactgccatctccaaactagaaatgccatcttccttgatgttggaggtacctgctctggcagatttcaaccgggcttggacagaacttaccgactggctttctctgcttgatcaagttataaaatcacagagggtgatggtgggtgaccttgaggatatcaacgagatgatcatcaagcagaaggcaacaatgcaggatttggaacagaggcgtccccagttggaagaactcattaccgctgcccaaaatttgaaaaacaagaccagcaatcaagaggctagaacaatcattacggatcgaattgaaagaattcagaatcagtgggatgaagtacaagaacaccttcagaaccggaggcaacagttgaatgaaatgttaaaggattcaacacaatggctggaagctaaggaagaagctgagcaggtcttaggacaggccagagccaagcttgagtcatggaaggagggtccctatacagtagatgcaatccaaaagaaaatcacagaaaccaagcagttggccaaagacctccgccagtggcagacaaatgtagatgtggcaaatgacttggccctgaaacttctccgggattattctgcagatgataccagaaaagtccacatgataacagagaatatcaatgcctcttggagaagcattcataaaagggtgagtgagcgagaggctgctttggaagaaactcatagattactgcaacagttccccctggacctggaaaagtttcttgcctggcttacagaagctgaaacaactgccaatgtcctacaggatgctacccgtaaggaaaggctcctagaagactccaagggagtaaaagagctgatgaaacaatggcaagacctccaaggtgaaattgaagctcacacagatgtttatcacaacctggatgaaaacagccaaaaaatcctgagatccctggaaggttccgatgatgcagtcctgttacaaagacgtttggataacatgaacttcaagtggagtgaacttcggaaaaagtctctcaacattaggtcccatttggaagccagttctgaccagtggaagcgtctgcacctttctctgcaggaacttctggtgtggctacagctgaaagatgatgaattaagccggcaggcacctattggaggcgactttccagcagttcagaagcagaacgatgtacatagggccttcaagagggaattgaaaactaaagaacctgtaatcatgagtactcttgagactgtacgaatatttctgacagagcagcctttggaaggactagagaaactctaccaggagcccagagagctgcctcctgaggagagagcccagaatgtcactcggcttctacgaaagcaggctgaggaggtcaatactgagtgggaaaaattgaacctgcactccgctgactggcagagaaaaatagatgagacccttgaaagactccgggaacttcaagaggccacggatgagctggacctcaagctgcgccaagctgaggtgatcaagggatcctggcagcccgtgggcgatctcctcattgactctctccaagatcacctcgagaaagtcaaggcacttcgaggagaaattgcgcctctgaaagagaacgtgagccacgtcaatgaccttgctcgccagcttaccactttgggcattcagctctcaccgtataacctcagcactctggaagacctgaacaccagatggaagcttctgcaggtggccgtcgaggaccgagtcaggcagctgcatgaagcccacagggactttggtccagcatctcagcactttctttccacgtctgtccagggtccctgggagagagccatctcgccaaacaaagtgccctactatatcaaccacgagactcaaacaacttgctgggaccatcccaaaatgacagagctctaccagtctttagctgacctgaataatgtcagattctcagcttataggactgccatgaaactccgaagactgcagaaggccctttgcttggatctcttgagcctgtcagctgcatgtgatgccttggaccagcacaacctcaagcaaaatgaccagcccatggatatcctgcagattattaattgtttgaccactatttatgaccgcctggagcaagagcacaacaatttggtcaacgtccctctctgcgtggatatgtgtctgaactggctgctgaatgtttatgatacgggacgaacagggaggatccgtgtcctgtcttttaaaactggcatcatttccctgtgtaaagcacatttggaagacaagtacagataccttttcaagcaagtggcaagttcaacaggattttgtgaccagcgcaggctgggcctccttctgcatgattctatccaaattccaagacagttgggtgaagttgcatcctttgggggcagtaacattgagccaagtgtccggagctgcttccaatttgctaataataagccagagatcgaagcggccctcttcctagactggatgagactggaaccccagtccatggtgtggctgcccgtcctgcacagagtggctgctgcagaaactgccaagcatcaggccaaatgtaacatctgcaaagagtgtccaatcattggattcaggtacaggagtctaaagcactttaattatgacatctgccaaagctgctttttttctggtcgagttgcaaaaggccataaaatgcactatcccatggtggaatattgcactccgactacatcaggagaagatgttcgagactttgccaaggtactaaaaaacaaatttcgaaccaaaaggtattttgcgaagcatccccgaatgggctacctgccagtgcagactgtcttagagggggacaacatggaaactcccgttactctgatcaacttctggccagtagattctgcgcctgcctcgtcccctcagctttcacacgatgatactcattcacgcattgaacattatgctagcaggctagcagaaatggaaaacagcaatggatcttatctaaatgatagcatctctcctaatgagagcatagatgatgaacatttgttaatccagcattactgccaaagtttgaaccaggactcccccctgagccagcctcgtagtcctgcccagatcttgatttccttagagagtgaggaaagaggggagctagagagaatcctagcagatcttgaggaagaaaacaggaatctgcaagcagaatatgaccgtctaaagcagcagcacgaacataaaggcctgtccccactgccgtcccctcctgaaatgatgcccacctctccccagagtccccgggatgctgagctcattgctgaggccaagctactgcgtcaacacaaaggccgcctggaagccaggatgcaaatcctggaagaccacaataaacagctggagtcacagttacacaggctaaggcagctgctggagcaaccccaggcagaggccaaagtgaatggcacaacggtgtcctctccttctacctctctacagaggtccgacagcagtcagcctatgctgctccgagtggttggcagtcaaacttcggactccatgggtgaggaagatcttctcagtcctccccaggacacaagcacagggttagaggaggtgatggagcaactcaacaactccttccctagttcaagaggaagaaatacccctggaaagccaatgagagaggacacaatgtaggaagtcttttccacatggcagatgatttgggcagagcgatggagtccttagtatcagtcatgacagatgaagaaggagcagaataaatgttttacaactcctgattcccgcatggtttttataatattcatacaacaaagaggattagacagtaagagtttacaagaaataaatctatatttttgtgaagggtagtggtattatactgtagatttcagtagtttctaagtctgttattgttttgttaacaatggcaggttttacacgtctatgcaattgtacaaaaaagttataagaaaactacatgtaaaatcttgatagctaaataacttgccatttctttatatggaacgcattttgggttgtttaaaaatttataacagttataaagaaagattgtaaactaaagtgtgctttataaaaaaaagttgtttataaaaacccctaaaaacaaaacaaacacacacacacacacatacacacacacacacaaaactttgaggcagcgcattgttttgcatccttttggcgtgatatccatatgaaattcatggctttttctttttttgcatattaaagataagacttcctctaccaccacaccaaatgactactacacactgctcatttgagaactgtcagctgagtggggcaggcttgagttttcatttcatatatctatatgtctataagtatataaatactatagttatatagataaagagatacgaatttctatagactgactttttccattttttaaatgttcatgtcacatcctaatagaaagaaattacttctagtcagtcatccaggcttacctgcttggtctagaatggatttttcccggagccggaagccaggaggaaactacaccacactaaaacattgtctacagctccagatgtttctcattttaaacaactttccactgacaacgaaagtaaagtaaagtattggatttttttaaagggaacatgtgaatgaatacacaggacttattatatcagagtgagtaatcggttggttggttgattgattgattgattgatacattcagcttcctgctgctagcaatgccacgatttagatttaatgatgcttcagtggaaatcaatcagaaggtattctgaccttgtgaacatcagaaggtattttttaactcccaagcagtagcaggacgatgatagggctggagggctatggattcccagcccatccctgtgaaggagtaggccactctttaagtgaaggattggatgattgttcataatacataaagttctctgtaattacaactaaattattatgccctcttctcacagtcaaaaggaactgggtggtttggtttttgttgcttttttagatttattgtcccatgtgggatgagtttttaaatgccacaagacataatttaaaataaataaactttgggaaaaggtgtaaaacagtagccccatcacatttgtgatactgacaggtatcaacccagaagcccatgaactgtgtttccatcctttgcatttctctgcgagtagttccacacaggtttgtaagtaagtaagaaagaaggcaaattgattcaaatgttacaaaaaaacccttcttggtggattagacaggttaaatatataaacaaacaaacaaaaattgctcaaaaaagaggagaaaagctcaagaggaaaagctaaggactggtaggaaaaagctttactctttcatgccattttatttctttttgatttttaaatcattcattcaatagataccaccgtgtgacctataattttgcaaatctgttacctctgacatcaagtgtaattagcttttggagagtgggctgacatcaagtgtaattagcttttggagagtgggttttgtccattattaataattaattaattaacatcaaacacggcttctcatgctatttctacctcactttggttttggggtgttcctgataattgtgcacacctgagttcacagcttcaccacttgtccattgcgttattttctttttcctttataattctttctttttccttcataattttcaaaagaaaacccaaagctctaaggtaacaaattaccaaattacatgaagatttggtttttgtcttgcatttttttcctttatgtgacgctggaccttttctttacccaaggatttttaaaactcagatttaaaacaaggggttactttacatcctactaagaagtttaagtaagtaagtttcattctaaaatcagaggtaaatagagtgcataaataattttgttttaatctttttgtttttcttttagacacattagctctggagtgagtctgtcataatatttgaacaaaaattgagagctttattgctgcattttaagcataattaatttggacattatttcgtgttgtgttctttataaccaccaagtattaaactgtaaatcataatgtaactgaagcataaacatcacatggcatgttttgtcattgttttcaggtactgagttcttacttgagtatcataatatattgtgttttaacaccaacactgtaacatttacgaattatttttttaaacttcagttttactgcattttcacaacatatcagacttcaccaaatatatgccttactattgtattatagtactgctttactgtgtatctcaataaagcacgcagttatgttac

SEQ ID NO: 9147 - DNA, 4645 bp, Homo sapiens
  source 1..4645: mol_type = unassigned DNA
agtgctttcagctgtgagcttgggcggcggcggcggcggcgctccactttcggggagcccggcggctctgggaagctcactcctccactcgtacccacactcgaccgcggagcccttgcagccatgagggaacagctcaaaggccacgagactcaaacaacttgctgggaccatcccaaaatgacagagctctaccagtctttagctgacctgaataatgtcagattctcagcttataggactgccatgaaactccgaagactgcagaaggccctttgcttggatctcttgagcctgtcagctgcatgtgatgccttggaccagcacaacctcaagcaaaatgaccagcccatggatatcctgcagattattaattgtttgaccactatttatgaccgcctggagcaagagcacaacaatttggtcaacgtccctctctgcgtggatatgtgtctgaactggctgctgaatgtttatgatacgggacgaacagggaggatccgtgtcctgtcttttaaaactggcatcatttccctgtgtaaagcacatttggaagacaagtacagataccttttcaagcaagtggcaagttcaacaggattttgtgaccagcgcaggctgggcctccttctgcatgattctatccaaattccaagacagttgggtgaagttgcatcctttgggggcagtaacattgagccaagtgtccggagctgcttccaatttgctaataataagccagagatcgaagcggccctcttcctagactggatgagactggaaccccagtccatggtgtggctgcccgtcctgcacagagtggctgctgcagaaactgccaagcatcaggccaaatgtaacatctgcaaagagtgtccaatcattggattcaggtacaggagtctaaagcactttaattatgacatctgccaaagctgctttttttctggtcgagttgcaaaaggccataaaatgcactatcccatggtggaatattgcactccgactacatcaggagaagatgttcgagactttgccaaggtactaaaaaacaaatttcgaaccaaaaggtattttgcgaagcatccccgaatgggctacctgccagtgcagactgtcttagagggggacaacatggaaactcccgttactctgatcaacttctggccagtagattctgcgcctgcctcgtcccctcagctttcacacgatgatactcattcacgcattgaacattatgctagcaggctagcagaaatggaaaacagcaatggatcttatctaaatgatagcatctctcctaatgagagcatagatgatgaacatttgttaatccagcattactgccaaagtttgaaccaggactcccccctgagccagcctcgtagtcctgcccagatcttgatttccttagagagtgaggaaagaggggagctagagagaatcctagcagatcttgaggaagaaaacaggaatctgcaagcagaatatgaccgtctaaagcagcagcacgaacataaaggcctgtccccactgccgtcccctcctgaaatgatgcccacctctccccagagtccccgggatgctgagctcattgctgaggccaagctactgcgtcaacacaaaggccgcctggaagccaggatgcaaatcctggaagaccacaataaacagctggagtcacagttacacaggctaaggcagctgctggagcaaccccaggcagaggccaaagtgaatggcacaacggtgtcctctccttctacctctctacagaggtccgacagcagtcagcctatgctgctccgagtggttggcagtcaaacttcggactccatgggtgaggaagatcttctcagtcctccccaggacacaagcacagggttagaggaggtgatggagcaactcaacaactccttccctagttcaagaggacacaatgtaggaagtcttttccacatggcagatgatttgggcagagcgatggagtccttagtatcagtcatgacagatgaagaaggagcagaataaatgttttacaactcctgattcccgcatggtttttataatattcatacaacaaagaggattagacagtaagagtttacaagaaataaatctatatttttgtgaagggtagtggtattatactgtagatttcagtagtttctaagtctgttattgttttgttaacaatggcaggttttacacgtctatgcaattgtacaaaaaagttataagaaaactacatgtaaaatcttgatagctaaataacttgccatttctttatatggaacgcattttgggttgtttaaaaatttataacagttataaagaaagattgtaaactaaagtgtgctttataaaaaaaagttgtttataaaaacccctaaaaacaaaacaaacacacacacacacacatacacacacacacacaaaactttgaggcagcgcattgttttgcatccttttggcgtgatatccatatgaaattcatggctttttctttttttgcatattaaagataagacttcctctaccaccacaccaaatgactactacacactgctcatttgagaactgtcagctgagtggggcaggcttgagttttcatttcatatatctatatgtctataagtatataaatactatagttatatagataaagagatacgaatttctatagactgactttttccattttttaaatgttcatgtcacatcctaatagaaagaaattacttctagtcagtcatccaggcttacctgcttggtctagaatggatttttcccggagccggaagccaggaggaaactacaccacactaaaacattgtctacagctccagatgtttctcattttaaacaactttccactgacaacgaaagtaaagtaaagtattggatttttttaaagggaacatgtgaatgaatacacaggacttattatatcagagtgagtaatcggttggttggttgattgattgattgattgatacattcagcttcctgctgctagcaatgccacgatttagatttaatgatgcttcagtggaaatcaatcagaaggtattctgaccttgtgaacatcagaaggtattttttaactcccaagcagtagcaggacgatgatagggctggagggctatggattcccagcccatccctgtgaaggagtaggccactctttaagtgaaggattggatgattgttcataatacataaagttctctgtaattacaactaaattattatgccctcttctcacagtcaaaaggaactgggtggtttggtttttgttgcttttttagatttattgtcccatgtgggatgagtttttaaatgccacaagacataatttaaaataaataaactttgggaaaaggtgtaaaacagtagccccatcacatttgtgatactgacaggtatcaacccagaagcccatgaactgtgtttccatcctttgcatttctctgcgagtagttccacacaggtttgtaagtaagtaagaaagaaggcaaattgattcaaatgttacaaaaaaacccttcttggtggattagacaggttaaatatataaacaaacaaacaaaaattgctcaaaaaagaggagaaaagctcaagaggaaaagctaaggactggtaggaaaaagctttactctttcatgccattttatttctttttgatttttaaatcattcattcaatagataccaccgtgtgacctataattttgcaaatctgttacctctgacatcaagtgtaattagcttttggagagtgggctgacatcaagtgtaattagcttttggagagtgggttttgtccattattaataattaattaattaacatcaaacacggcttctcatgctatttctacctcactttggttttggggtgttcctgataattgtgcacacctgagttcacagcttcaccacttgtccattgcgttattttctttttcctttataattctttctttttccttcataattttcaaaagaaaacccaaagctctaaggtaacaaattaccaaattacatgaagatttggtttttgtcttgcatttttttcctttatgtgacgctggaccttttctttacccaaggatttttaaaactcagatttaaaacaaggggttactttacatcctactaagaagtttaagtaagtaagtttcattctaaaatcagaggtaaatagagtgcataaataattttgttttaatctttttgtttttcttttagacacattagctctggagtgagtctgtcataatatttgaacaaaaattgagagctttattgctgcattttaagcataattaatttggacattatttcgtgttgtgttctttataaccaccaagtattaaactgtaaatcataatgtaactgaagcataaacatcacatggcatgttttgtcattgttttcaggtactgagttcttacttgagtatcataatatattgtgttttaacaccaacactgtaacatttacgaattatttttttaaacttcagttttactgcattttcacaacatatcagacttcaccaaatatatgccttactattgtattatagtactgctttactgtgtatctcaataaagcacgcagttatgttacaaaaaagta

SEQ ID NO: 9148 - DNA, 5209 bp, Homo sapiens
  source 1..5209: mol_type = unassigned DNA
acactagcaatggcaaagctttgtgcggaggcattgctggctgctctgaactaaaagcatccgtggggaccgaaagaggtttttgcacaccttattaaggaactccaggatggcattgggcagcggcaaactgttgtcagaacattgaatgcaactggggaagaaataattcagcaatcctcaaaaacagatgccagtattctacaggaaaaattgggaagcctgaatctgcggtggcaggaggtctgcaaacagctgtcagacagaaaaaagaggctagaagaacaaaagaatatcttgtcagaatttcaaagagatttaaatgaatttgttttatggttggaggaagcagataacattgctagtatcccacttgaacctggaaaagagcagcaactaaaagaaaagcttgagcaagtcaagttactggtggaagagttgcccctgcgccagggaattctcaaacaattaaatgaaactggaggacccgtgcttgtaagtgctcccataagcccagaagagcaagataaacttgaaaataagctcaagcagacaaatctccagtggataaaggtttccagagctttacctgagaaacaaggagaaattgaagctcaaataaaagaccttgggcagcttgaaaaaaagcttgaagaccttgaagagcagttaaatcatctgctgctgtggttatctcctattaggaatcagttggaaatttataaccaaccaaaccaagaaggaccatttgacgttaaggaaactgaaatagcagttcaagctaaacaaccggatgtggaagagattttgtctaaagggcagcatttgtacaaggaaaaaccagccactcagccagtgaagaggaagttagaagatctgagctctgagtggaaggcggtaaaccgtttacttcaagagctgagggcaaagcagcctgacctagctcctggactgaccactattggagcctctcctactcagactgttactctggtgacacaacctgtggttactaaggaaactgccatctccaaactagaaatgccatcttccttgatgttggaggtacctgctctggcagatttcaaccgggcttggacagaacttaccgactggctttctctgcttgatcaagttataaaatcacagagggtgatggtgggtgaccttgaggatatcaacgagatgatcatcaagcagaaggcaacaatgcaggatttggaacagaggcgtccccagttggaagaactcattaccgctgcccaaaatttgaaaaacaagaccagcaatcaagaggctagaacaatcattacggatcgaattgaaagaattcagaatcagtgggatgaagtacaagaacaccttcagaaccggaggcaacagttgaatgaaatgttaaaggattcaacacaatggctggaagctaaggaagaagctgagcaggtcttaggacaggccagagccaagcttgagtcatggaaggagggtccctatacagtagatgcaatccaaaagaaaatcacagaaaccaagcagttggccaaagacctccgccagtggcagacaaatgtagatgtggcaaatgacttggccctgaaacttctccgggattattctgcagatgataccagaaaagtccacatgataacagagaatatcaatgcctcttggagaagcattcataaaagggtgagtgagcgagaggctgctttggaagaaactcatagattactgcaacagttccccctggacctggaaaagtttcttgcctggcttacagaagctgaaacaactgccaatgtcctacaggatgctacccgtaaggaaaggctcctagaagactccaagggagtaaaagagctgatgaaacaatggcaagacctccaaggtgaaattgaagctcacacagatgtttatcacaacctggatgaaaacagccaaaaaatcctgagatccctggaaggttccgatgatgcagtcctgttacaaagacgtttggataacatgaacttcaagtggagtgaacttcggaaaaagtctctcaacattaggtcccatttggaagccagttctgaccagtggaagcgtctgcacctttctctgcaggaacttctggtgtggctacagctgaaagatgatgaattaagccggcaggcacctattggaggcgactttccagcagttcagaagcagaacgatgtacatagggccttcaagagggaattgaaaactaaagaacctgtaatcatgagtactcttgagactgtacgaatatttctgacagagcagcctttggaaggactagagaaactctaccaggagcccagagagctgcctcctgaggagagagcccagaatgtcactcggcttctacgaaagcaggctgaggaggtcaatactgagtgggaaaaattgaacctgcactccgctgactggcagagaaaaatagatgagacccttgaaagactccgggaacttcaagaggccacggatgagctggacctcaagctgcgccaagctgaggtgatcaagggatcctggcagcccgtgggcgatctcctcattgactctctccaagatcacctcgagaaagtcaaggcacttcgaggagaaattgcgcctctgaaagagaacgtgagccacgtcaatgaccttgctcgccagcttaccactttgggcattcagctctcaccgtataacctcagcactctggaagacctgaacaccagatggaagcttctgcaggtggccgtcgaggaccgagtcaggcagctgcatgaagcccacagggactttggtccagcatctcagcactttctttccacgtctgtccagggtccctgggagagagccatctcgccaaacaaagtgccctactatatcaaccacgagactcaaacaacttgctgggaccatcccaaaatgacagagctctaccagtctttagctgacctgaataatgtcagattctcagcttataggactgccatgaaactccgaagactgcagaaggccctttgcttggatctcttgagcctgtcagctgcatgtgatgccttggaccagcacaacctcaagcaaaatgaccagcccatggatatcctgcagattattaattgtttgaccactatttatgaccgcctggagcaagagcacaacaatttggtcaacgtccctctctgcgtggatatgtgtctgaactggctgctgaatgtttatgatacgggacgaacagggaggatccgtgtcctgtcttttaaaactggcatcatttccctgtgtaaagcacatttggaagacaagtacagataccttttcaagcaagtggcaagttcaacaggattttgtgaccagcgcaggctgggcctccttctgcatgattctatccaaattccaagacagttgggtgaagttgcatcctttgggggcagtaacattgagccaagtgtccggagctgcttccaatttgctaataataagccagagatcgaagcggccctcttcctagactggatgagactggaaccccagtccatggtgtggctgcccgtcctgcacagagtggctgctgcagaaactgccaagcatcaggccaaatgtaacatctgcaaagagtgtccaatcattggattcaggtacaggagtctaaagcactttaattatgacatctgccaaagctgctttttttctggtcgagttgcaaaaggccataaaatgcactatcccatggtggaatattgcactccgactacatcaggagaagatgttcgagactttgccaaggtactaaaaaacaaatttcgaaccaaaaggtattttgcgaagcatccccgaatgggctacctgccagtgcagactgtcttagagggggacaacatggaaactcccgttactctgatcaacttctggccagtagattctgcgcctgcctcgtcccctcagctttcacacgatgatactcattcacgcattgaacattatgctagcaggctagcagaaatggaaaacagcaatggatcttatctaaatgatagcatctctcctaatgagagcatagatgatgaacatttgttaatccagcattactgccaaagtttgaaccaggactcccccctgagccagcctcgtagtcctgcccagatcttgatttccttagagagtgaggaaagaggggagctagagagaatcctagcagatcttgaggaagaaaacaggaatctgcaagcagaatatgaccgtctaaagcagcagcacgaacataaaggcctgtccccactgccgtcccctcctgaaatgatgcccacctctccccagagtccccgggatgctgagctcattgctgaggccaagctactgcgtcaacacaaaggccgcctggaagccaggatgcaaatcctggaagaccacaataaacagctggagtcacagttacacaggctaaggcagctgctggagcaaccccaggcagaggccaaagtgaatggcacaacggtgtcctctccttctacctctctacagaggtccgacagcagtcagcctatgctgctccgagtggttggcagtcaaacttcggactccatgggtgaggaagatcttctcagtcctccccaggacacaagcacagggttagaggaggtgatggagcaactcaacaactccttccctagttcaagaggacacaatgtaggaagtcttttccacatggcagatgatttgggcagagcgatggagtccttagtatcagtcatgacagatgaagaaggagcagaataaatgttttacaactcctgattcccgcatggtttttataatattcatacaacaaagaggattagacagtaagagtttacaagaaataaatctatatttttgtgaagggtagtggtattatactgtagatttcagtagtttctaagtctgttattgttttgttaacaatggcaggttttacacgtctatgcaattgtacaaaaaagttataagaaaactacatgtaaaatcttgatagctaaataacttgccatttctttatatggaacgcattttgggttgtttaaaaatttataacagttataaagaaagattgtaaactaaagtgtgctttataaaaaaaagttgtttataaaaacccctaaaaacaaaacaaacacacacacacacacatacacacacacacacaaaactttgaggcagcgcattgttttgcatc

SEQ ID NO: 9149 - DNA, 11031 bp, Homo sapiens
  source 1..11031: mol_type = unassigned DNA
attttagatgaaagagaagatgttcaaaagaaaacattcacaaaatgggtaaatgcacaattttctaagtttgggaagcagcatattgagaacctcttcagtgacctacaggatgggaggcgcctcctagacctcctcgaaggcctgacagggcaaaaactgccaaaagaaaaaggatccacaagagttcatgccctgaacaatgtcaacaaggcactgcgggttttgcagaacaataatgttgatttagtgaatattggaagtactgacatcgtagatggaaatcataaactgactcttggtttgatttggaatataatcctccactggcaggtcaaaaatgtaatgaaaaatatcatggctggattgcaacaaaccaacagtgaaaagattctcctgagctgggtccgacaatcaactcgtaattatccacaggttaatgtaatcaacttcaccaccagctggtctgatggcctggctttgaatgctctcatccatagtcataggccagacctatttgactggaatagtgtggtttgccagcagtcagccacacaacgactggaacatgcattcaacatcgccagatatcaattaggcatagagaaactactcgatcctgaagatgttgataccacctatccagataagaagtccatcttaatgtacatcacatcactcttccaagttttgcctcaacaagtgagcattgaagccatccaggaagtggaaatgttgccaaggccacctaaagtgactaaagaagaacattttcagttacatcatcaaatgcactattctcaacagatcacggtcagtctagcacagggatatgagagaacttcttcccctaagcctcgattcaagagctatgcctacacacaggctgcttatgtcaccacctctgaccctacacggagcccatttccttcacagcatttggaagctcctgaagacaagtcatttggcagttcattgatggagagtgaagtaaacctggaccgttatcaaacagctttagaagaagtattatcgtggcttctttctgctgaggacacattgcaagcacaaggagagatttctaatgatgtggaagtggtgaaagaccagtttcatactcatgaggggtacatgatggatttgacagcccatcagggccgggttggtaatattctacaattgggaagtaagctgattggaacaggaaaattatcagaagatgaagaaactgaagtacaagagcagatgaatctcctaaattcaagatgggaatgcctcagggtagctagcatggaaaaacaaagcaatttacatagagttttaatggatctccagaatcagaaactgaaagagttgaatgactggctaacaaaaacagaagaaagaacaaggaaaatggaggaagagcctcttggacctgatcttgaagacctaaaacgccaagtacaacaacataaggtgcttcaagaagatctagaacaagaacaagtcagggtcaattctctcactcacatggtggtggtagttgatgaatctagtggagatcacgcaactgctgctttggaagaacaacttaaggtattgggagatcgatgggcaaacatctgtagatggacagaagaccgctgggttcttttacaagacatccttctcaaatggcaacgtcttactgaagaacagtgcctttttagtgcatggctttcagaaaaagaagatgcagtgaacaagattcacacaactggctttaaagatcaaaatgaaatgttatcaagtcttcaaaaactggccgttttaaaagcggatctagaaaagaaaaagcaatccatgggcaaactgtattcactcaaacaagatcttctttcaacactgaagaataagtcagtgacccagaagacggaagcatggctggataactttgcccggtgttgggataatttagtccaaaaacttgaaaagagtacagcacagatttcacaggctgtcaccaccactcagccatcactaacacagacaactgtaatggaaacagtaactacggtgaccacaagggaacagatcctggtaaagcatgctcaagaggaacttccaccaccacctccccaaaagaagaggcagattactgtggattctgaaattaggaaaaggttggatgttgatataactgaacttcacagctggattactcgctcagaagctgtgttgcagagtcctgaatttgcaatctttcggaaggaaggcaacttctcagacttaaaagaaaaagtcaatgccatagagcgagaaaaagctgagaagttcagaaaactgcaagatgccagcagatcagctcaggccctggtggaacagatggtgaatgagggtgttaatgcagatagcatcaaacaagcctcagaacaactgaacagccggtggatcgaattctgccagttgctaagtgagagacttaactggctggagtatcagaacaacatcatcgctttctataatcagctacaacaattggagcagatgacaactactgctgaaaactggttgaaaatccaacccaccaccccatcagagccaacagcaattaaaagtcagttaaaaatttgtaaggatgaagtcaaccggctatcagatcttcaacctcaaattgaacgattaaaaattcaaagcatagccctgaaagagaaaggacaaggacccatgttcctggatgcagactttgtggcctttacaaatcattttaagcaagtcttttctgatgtgcaggccagagagaaagagctacagacaatttttgacactttgccaccaatgcgctatcaggagaccatgagtgccatcaggacatgggtccagcagtcagaaaccaaactctccatacctcaacttagtgtcaccgactatgaaatcatggagcagagactcggggaattgcaggctttacaaagttctctgcaagagcaacaaagtggcctatactatctcagcaccactgtgaaagagatgtcgaagaaagcgccctctgaaattagccggaaatatcaatcagaatttgaagaaattgagggacgctggaagaagctctcctcccagctggttgagcattgtcaaaagctagaggagcaaatgaataaactccgaaaaattcagaatcacatacaaaccctgaagaaatggatggctgaagttgatgtttttctgaaggaggaatggcctgcccttggggattcagaaattctaaaaaagcagctgaaacagtgcagacttttagtcagtgatattcagacaattcagcccagtctaaacagtgtcaatgaaggtgggcagaagataaagaatgaagcagagccagagtttgcttcgagacttgagacagaactcaaagaacttaacactcagtgggatcacatgtgccaacaggtctatgccagaaaggaggccttgaagggaggtttggagaaaactgtaagcctccagaaagatctatcagagatgcacgaatggatgacacaagctgaagaagagtatcttgagagagattttgaatataaaactccagatgaattacagaaagcagttgaagagatgaagagagctaaagaagaggcccaacaaaaagaagcgaaagtgaaactccttactgagtctgtaaatagtgtcatagctcaagctccacctgtagcacaagaggccttaaaaaaggaacttgaaactctaaccaccaactaccagtggctctgcactaggctgaatgggaaatgcaagactttggaagaagtttgggcatgttggcatgagttattgtcatacttggagaaagcaaacaagtggctaaatgaagtagaatttaaacttaaaaccactgaaaacattcctggcggagctgaggaaatctctgaggtgctagattcacttgaaaatttgatgcgacattcagaggataacccaaatcagattcgcatattggcacagaccctaacagatggcggagtcatggatgagctaatcaatgaggaacttgagacatttaattctcgttggagggaactacatgaagaggctgtaaggaggcaaaagttgcttgaacagagcatccagtctgcccaggagactgaaaaatccttacacttaatccaggagtccctcacattcattgacaagcagttggcagcttatattgcagacaaggtggacgcagctcaaatgcctcaggaagcccagaaaatccaatctgatttgacaagtcatgagatcagtttagaagaaatgaagaaacataatcaggggaaggaggctgcccaaagagtcctgtctcagattgatgttgcacagaaaaaattacaagatgtctccatgaagtttcgattattccagaaaccagccaattttgagcagcgtctacaagaaagtaagatgattttagatgaagtgaagatgcacttgcctgcattggaaacaaagagtgtggaacaggaagtagtacagtcacagctaaatcattgtgtgaacttgtataaaagtctgagtgaagtgaagtctgaagtggaaatggtgataaagactggacgtcagattgtacagaaaaagcagacggaaaatcccaaagaacttgatgaaagagtaacagctttgaaattgcattataatgagctgggagcaaaggtaacagaaagaaagcaacagttggagaaatgcttgaaattgtcccgtaagatgcgaaaggaaatgaatgtcttgacagaatggctggcagctacagatatggaattgacaaagagatcagcagttgaaggaatgcctagtaatttggattctgaagttgcctggggaaaggctactcaaaaagagattgagaaacagaaggtgcacctgaagagtatcacagaggtaggagaggccttgaaaacagttttgggcaagaaggagacgttggtggaagataaactcagtcttctgaatagtaactggatagctgtcacctcccgagcagaagagtggttaaatcttttgttggaataccagaaacacatggaaacttttgaccagaatgtggaccacatcacaaagtggatcattcaggctgacacacttttggatgaatcagagaaaaagaaaccccagcaaaaagaagacgtgcttaagcgtttaaaggcagaactgaatgacatacgcccaaaggtggactctacacgtgaccaagcagcaaacttgatggcaaaccgcggtgaccactgcaggaaattagtagagccccaaatctcagagctcaaccatcgatttgcagccatttcacacagaattaagactggaaaggcctccattcctttgaaggaattggagcagtttaactcagatatacaaaaattgcttgaaccactggaggctgaaattcagcagggggtgaatctgaaagaggaagacttcaataaagatatgaatgaagacaatgagggtactgtaaaagaattgttgcaaagaggagacaacttacaacaaagaatcacagatgagagaaagcgagaggaaataaagataaaacagcagctgttacagacaaaacataatgctctcaaggatttgaggtctcaaagaagaaaaaaggctctagaaatttctcatcagtggtatcagtacaagaggcaggctgatgatctcctgaaatgcttggatgacattgaaaaaaaattagccagcctacctgagcccagagatgaaaggaaaataaaggaaattgatcgggaattgcagaagaagaaagaggagctgaatgcagtgcgtaggcaagctgagggcttgtctgaggatggggccgcaatggcagtggagccaactcagatccagctcagcaagcgctggcgggaaattgagagcaaatttgctcagtttcgaagactcaactttgcacaaattcacactgtccgtgaagaaacgatgatggtgatgactgaagacatgcctttggaaatttcttatgtgccttctacttatttgactgaaatcactcatgtctcacaagccctattagaagtggaacaacttctcaatgctcctgacctctgtgctaaggactttgaagatctctttaagcaagaggagtctctgaagaatataaaagatagtctacaacaaagctcaggtcggattgacattattcatagcaagaagacagcagcattgcaaagtgcaacgcctgtggaaagggtgaagctacaggaagctctctcccagcttgatttccaatgggaaaaagttaacaaaatgtacaaggaccgacaagggcgatttgacagatctgttgagaaatggcggcgttttcattatgatataaagatatttaatcagtggctaacagaagctgaacagtttctcagaaagacacaaattcctgagaattgggaacatgctaaatacaaatggtatcttaaggaactccaggatggcattgggcagcggcaaactgttgtcagaacattgaatgcaactggggaagaaataattcagcaatcctcaaaaacagatgccagtattctacaggaaaaattgggaagcctgaatctgcggtggcaggaggtctgcaaacagctgtcagacagaaaaaagaggctagaagaacaaaagaatatcttgtcagaatttcaaagagatttaaatgaatttgttttatggttggaggaagcagataacattgctagtatcccacttgaacctggaaaagagcagcaactaaaagaaaagcttgagcaagtcaagttactggtggaagagttgcccctgcgccagggaattctcaaacaattaaatgaaactggaggacccgtgcttgtaagtgctcccataagcccagaagagcaagataaacttgaaaataagctcaagcagacaaatctccagtggataaaggtttccagagctttacctgagaaacaaggagaaattgaagctcaaataaaagaccttgggcagcttgaaaaaaagcttgaagaccttgaagagcagttaaatcatctgctgctgtggttatctcctattaggaatcagttggaaatttataaccaaccaaaccaagaaggaccatttgacgttaaggaaactgaaatagcagttcaagctaaacaaccggatgtggaagagattttgtctaaagggcagcatttgtacaaggaaaaaccagccactcagccagtgaagaggaagttagaagatctgagctctgagtggaaggcggtaaaccgtttacttcaagagctgagggcaaagcagcctgacctagctcctggactgaccactattggagcctctcctactcagactgttactctggtgacacaacctgtggttactaaggaaactgccatctccaaactagaaatgccatcttccttgatgttggaggtacctgctctggcagatttcaaccgggcttggacagaacttaccgactggctttctctgcttgatcaagttataaaatcacagagggtgatggtgggtgaccttgaggatatcaacgagatgatcatcaagcagaaggcaacaatgcaggatttggaacagaggcgtccccagttggaagaactcattaccgctgcccaaaatttgaaaaacaagaccagcaatcaagaggctagaacaatcattacggatcgaattgaaagaattcagaatcagtgggatgaagtacaagaacaccttcagaaccggaggcaacagttgaatgaaatgttaaaggattcaacacaatggctggaagctaaggaagaagctgagcaggtcttaggacaggccagagccaagcttgagtcatggaaggagggtccctatacagtagatgcaatccaaaagaaaatcacagaaaccaagcagttggccaaagacctccgccagtggcagacaaatgtagatgtggcaaatgacttggccctgaaacttctccgggattattctgcagatgataccagaaaagtccacatgataacagagaatatcaatgcctcttggagaagcattcataaaagggtgagtgagcgagaggctgctttggaagaaactcatagattactgcaacagttccccctggacctggaaaagtttcttgcctggcttacagaagctgaaacaactgccaatgtcctacaggatgctacccgtaaggaaaggctcctagaagactccaagggagtaaaagagctgatgaaacaatggcaagacctccaaggtgaaattgaagctcacacagatgtttatcacaacctggatgaaaacagccaaaaaatcctgagatccctggaaggttccgatgatgcagtcctgttacaaagacgtttggataacatgaacttcaagtggagtgaacttcggaaaaagtctctcaacattaggtcccatttggaagccagttctgaccagtggaagcgtctgcacctttctctgcaggaacttctggtgtggctacagctgaaagatgatgaattaagccggcaggcacctattggaggcgactttccagcagttcagaagcagaacgatgtacatagggccttcaagagggaattgaaaactaaagaacctgtaatcatgagtactcttgagactgtacgaatatttctgacagagcagcctttggaaggactagagaaactctaccaggagcccagagagctgcctcctgaggagagagcccagaatgtcactcggcttctacgaaagcaggctgaggaggtcaatactgagtgggaaaaattgaacctgcactccgctgactggcagagaaaaatagatgagacccttgaaagactccgggaacttcaagaggccacggatgagctggacctcaagctgcgccaagctgaggtgatcaagggatcctggcagcccgtgggcgatctcctcattgactctctccaagatcacctcgagaaagtcaaggcacttcgaggagaaattgcgcctctgaaagagaacgtgagccacgtcaatgaccttgctcgccagcttaccactttgggcattcagctctcaccgtataacctcagcactctggaagacctgaacaccagatggaagcttctgcaggtggccgtcgaggaccgagtcaggcagctgcatgaagcccacagggactttggtccagcatctcagcactttctttccacgtctgtccagggtccctgggagagagccatctcgccaaacaaagtgccctactatatcaaccacgagactcaaacaacttgctgggaccatcccaaaatgacagagctctaccagtctttagctgacctgaataatgtcagattctcagcttataggactgccatgaaactccgaagactgcagaaggccctttgcttggatctcttgagcctgtcagctgcatgtgatgccttggaccagcacaacctcaagcaaaatgaccagcccatggatatcctgcagattattaattgtttgaccactatttatgaccgcctggagcaagagcacaacaatttggtcaacgtccctctctgcgtggatatgtgtctgaactggctgctgaatgtttatgatacgggacgaacagggaggatccgtgtcctgtcttttaaaactggcatcatttccctgtgtaaagcacatttggaagacaagtacagataccttttcaagcaagtggcaagttcaacaggattttgtgaccagcgcaggctgggcctccttctgcatgattctatccaaattccaagacagttgggtgaagttgcatcctttgggggcagtaacattgagccaagtgtccggagctgcttccaatttgctaataataagccagagatcgaagcggccctcttcctagactggatgagactggaaccccagtccatggtgtggctgcccgtcctgcacagagtggctgctgcagaaactgccaagcatcaggccaaatgtaacatctgcaaagagtgtccaatcattggattcaggtacaggagtctaaagcactttaattatgacatctgccaaagctgctttttttctggtcgagttgcaaaaggccataaaatgcactatcccatggtggaatattgcactccgactacatcaggagaagatgttcgagactttgccaaggtactaaaaaacaaatttcgaaccaaaaggtattttgcgaagcatccccgaatgggctacctgccagtgcagactgtcttagagggggacaacatggaaactcccgttactctgatcaacttctggccagtagattctgcgcctgcctcgtcccctcagctttcacacgatgatactcattcacgcattgaacattatgctagcaggctagcagaaatggaaaacagcaatggatcttatctaaatgatagcatctctcctaatgagagcatagatgatgaacatttgttaatccagcattactgccaaagtttgaaccaggactcccccctgagccagcctcgtagtcctgcccagatcttgatttccttagagagtgaggaaagaggggagctagagagaatcctagcagatcttgaggaagaaaacaggaatctgcaagcagaatatgaccgtctaaagcagcagcacgaacataaaggcctgtccccactgccgtcccctcctgaaatgatgcccacctctccccagagtccccgggatgctgagctcattgctgaggccaagctactgcgtcaacacaaaggccgcctggaagccaggatgcaaatcctggaagaccacaataaacagctggagtcacagttacacaggctaaggcagctgctggagcaaccccaggcagaggccaaagtgaatggcacaacggtgtcctctccttctacctctctacagaggtccgacagcagtcagcctatgctgctccgagtggttggcagtcaaacttcggactccatgggtgaggaagatcttctcagtcctccccaggacacaagcacagggttagaggaggtgatggagcaactcaacaactccttccctagttcaagaggaagaaatacccctggaaagccaatgagagaggacaccccc

SEQ ID NO: 9150 - DNA, 14083 bp, Homo sapiens
  source 1..14083: mol_type = unassigned DNA
tgctgtctgtgaagctgaatctgtgagaacacctcactattcacggcaaccggagtggaagaaacaggtgcaaaaagattgtgtgtttgtctgcttttgtgaggctggtcagagattctgtgcctgctttatctgtgcttggctatgactctacctccaggtttaccataccccatagaatgtgtaagagaaaagtaccaacagggaaatcagcaaaaagctttcctatgaaggtgtgtagccagcctccgcagaatttgaaatgtctgaggtctcatctggtgagtaaaagctgcagataaatgcaacagccattcagaagaatgataaattccacaagcattcagaagcaggcttccctaaagatgaaagagaagatgttcaaaagaaaacattcacaaaatgggtaaatgcacaattttctaagtttgggaagcagcatattgagaacctcttcagtgacctacaggatgggaggcgcctcctagacctcctcgaaggcctgacagggcaaaaactgccaaaagaaaaaggatccacaagagttcatgccctgaacaatgtcaacaaggcactgcgggttttgcagaacaataatgttgatttagtgaatattggaagtactgacatcgtagatggaaatcataaactgactcttggtttgatttggaatataatcctccactggcaggtcaaaaatgtaatgaaaaatatcatggctggattgcaacaaaccaacagtgaaaagattctcctgagctgggtccgacaatcaactcgtaattatccacaggttaatgtaatcaacttcaccaccagctggtctgatggcctggctttgaatgctctcatccatagtcataggccagacctatttgactggaatagtgtggtttgccagcagtcagccacacaacgactggaacatgcattcaacatcgccagatatcaattaggcatagagaaactactcgatcctgaagatgttgataccacctatccagataagaagtccatcttaatgtacatcacatcactcttccaagttttgcctcaacaagtgagcattgaagccatccaggaagtggaaatgttgccaaggccacctaaagtgactaaagaagaacattttcagttacatcatcaaatgcactattctcaacagatcacggtcagtctagcacagggatatgagagaacttcttcccctaagcctcgattcaagagctatgcctacacacaggctgcttatgtcaccacctctgaccctacacggagcccatttccttcacagcatttggaagctcctgaagacaagtcatttggcagttcattgatggagagtgaagtaaacctggaccgttatcaaacagctttagaagaagtattatcgtggcttctttctgctgaggacacattgcaagcacaaggagagatttctaatgatgtggaagtggtgaaagaccagtttcatactcatgaggggtacatgatggatttgacagcccatcagggccgggttggtaatattctacaattgggaagtaagctgattggaacaggaaaattatcagaagatgaagaaactgaagtacaagagcagatgaatctcctaaattcaagatgggaatgcctcagggtagctagcatggaaaaacaaagcaatttacatagagttttaatggatctccagaatcagaaactgaaagagttgaatgactggctaacaaaaacagaagaaagaacaaggaaaatggaggaagagcctcttggacctgatcttgaagacctaaaacgccaagtacaacaacataaggtgcttcaagaagatctagaacaagaacaagtcagggtcaattctctcactcacatggtggtggtagttgatgaatctagtggagatcacgcaactgctgctttggaagaacaacttaaggtattgggagatcgatgggcaaacatctgtagatggacagaagaccgctgggttcttttacaagacatccttctcaaatggcaacgtcttactgaagaacagtgcctttttagtgcatggctttcagaaaaagaagatgcagtgaacaagattcacacaactggctttaaagatcaaaatgaaatgttatcaagtcttcaaaaactggccgttttaaaagcggatctagaaaagaaaaagcaatccatgggcaaactgtattcactcaaacaagatcttctttcaacactgaagaataagtcagtgacccagaagacggaagcatggctggataactttgcccggtgttgggataatttagtccaaaaacttgaaaagagtacagcacagatttcacaggctgtcaccaccactcagccatcactaacacagacaactgtaatggaaacagtaactacggtgaccacaagggaacagatcctggtaaagcatgctcaagaggaacttccaccaccacctccccaaaagaagaggcagattactgtggattctgaaattaggaaaaggttggatgttgatataactgaacttcacagctggattactcgctcagaagctgtgttgcagagtcctgaatttgcaatctttcggaaggaaggcaacttctcagacttaaaagaaaaagtcaatgccatagagcgagaaaaagctgagaagttcagaaaactgcaagatgccagcagatcagctcaggccctggtggaacagatggtgaatgagggtgttaatgcagatagcatcaaacaagcctcagaacaactgaacagccggtggatcgaattctgccagttgctaagtgagagacttaactggctggagtatcagaacaacatcatcgctttctataatcagctacaacaattggagcagatgacaactactgctgaaaactggttgaaaatccaacccaccaccccatcagagccaacagcaattaaaagtcagttaaaaatttgtaaggatgaagtcaaccggctatcagatcttcaacctcaaattgaacgattaaaaattcaaagcatagccctgaaagagaaaggacaaggacccatgttcctggatgcagactttgtggcctttacaaatcattttaagcaagtcttttctgatgtgcaggccagagagaaagagctacagacaatttttgacactttgccaccaatgcgctatcaggagaccatgagtgccatcaggacatgggtccagcagtcagaaaccaaactctccatacctcaacttagtgtcaccgactatgaaatcatggagcagagactcggggaattgcaggctttacaaagttctctgcaagagcaacaaagtggcctatactatctcagcaccactgtgaaagagatgtcgaagaaagcgccctctgaaattagccggaaatatcaatcagaatttgaagaaattgagggacgctggaagaagctctcctcccagctggttgagcattgtcaaaagctagaggagcaaatgaataaactccgaaaaattcagaatcacatacaaaccctgaagaaatggatggctgaagttgatgtttttctgaaggaggaatggcctgcccttggggattcagaaattctaaaaaagcagctgaaacagtgcagacttttagtcagtgatattcagacaattcagcccagtctaaacagtgtcaatgaaggtgggcagaagataaagaatgaagcagagccagagtttgcttcgagacttgagacagaactcaaagaacttaacactcagtgggatcacatgtgccaacaggtctatgccagaaaggaggccttgaagggaggtttggagaaaactgtaagcctccagaaagatctatcagagatgcacgaatggatgacacaagctgaagaagagtatcttgagagagattttgaatataaaactccagatgaattacagaaagcagttgaagagatgaagagagctaaagaagaggcccaacaaaaagaagcgaaagtgaaactccttactgagtctgtaaatagtgtcatagctcaagctccacctgtagcacaagaggccttaaaaaaggaacttgaaactctaaccaccaactaccagtggctctgcactaggctgaatgggaaatgcaagactttggaagaagtttgggcatgttggcatgagttattgtcatacttggagaaagcaaacaagtggctaaatgaagtagaatttaaacttaaaaccactgaaaacattcctggcggagctgaggaaatctctgaggtgctagattcacttgaaaatttgatgcgacattcagaggataacccaaatcagattcgcatattggcacagaccctaacagatggcggagtcatggatgagctaatcaatgaggaacttgagacatttaattctcgttggagggaactacatgaagaggctgtaaggaggcaaaagttgcttgaacagagcatccagtctgcccaggagactgaaaaatccttacacttaatccaggagtccctcacattcattgacaagcagttggcagcttatattgcagacaaggtggacgcagctcaaatgcctcaggaagcccagaaaatccaatctgatttgacaagtcatgagatcagtttagaagaaatgaagaaacataatcaggggaaggaggctgcccaaagagtcctgtctcagattgatgttgcacagaaaaaattacaagatgtctccatgaagtttcgattattccagaaaccagccaattttgagcagcgtctacaagaaagtaagatgattttagatgaagtgaagatgcacttgcctgcattggaaacaaagagtgtggaacaggaagtagtacagtcacagctaaatcattgtgtgaacttgtataaaagtctgagtgaagtgaagtctgaagtggaaatggtgataaagactggacgtcagattgtacagaaaaagcagacggaaaatcccaaagaacttgatgaaagagtaacagctttgaaattgcattataatgagctgggagcaaaggtaacagaaagaaagcaacagttggagaaatgcttgaaattgtcccgtaagatgcgaaaggaaatgaatgtcttgacagaatggctggcagctacagatatggaattgacaaagagatcagcagttgaaggaatgcctagtaatttggattctgaagttgcctggggaaaggctactcaaaaagagattgagaaacagaaggtgcacctgaagagtatcacagaggtaggagaggccttgaaaacagttttgggcaagaaggagacgttggtggaagataaactcagtcttctgaatagtaactggatagctgtcacctcccgagcagaagagtggttaaatcttttgttggaataccagaaacacatggaaacttttgaccagaatgtggaccacatcacaaagtggatcattcaggctgacacacttttggatgaatcagagaaaaagaaaccccagcaaaaagaagacgtgcttaagcgtttaaaggcagaactgaatgacatacgcccaaaggtggactctacacgtgaccaagcagcaaacttgatggcaaaccgcggtgaccactgcaggaaattagtagagccccaaatctcagagctcaaccatcgatttgcagccatttcacacagaattaagactggaaaggcctccattcctttgaaggaattggagcagtttaactcagatatacaaaaattgcttgaaccactggaggctgaaattcagcagggggtgaatctgaaagaggaagacttcaataaagatatgaatgaagacaatgagggtactgtaaaagaattgttgcaaagaggagacaacttacaacaaagaatcacagatgagagaaagcgagaggaaataaagataaaacagcagctgttacagacaaaacataatgctctcaaggatttgaggtctcaaagaagaaaaaaggctctagaaatttctcatcagtggtatcagtacaagaggcaggctgatgatctcctgaaatgcttggatgacattgaaaaaaaattagccagcctacctgagcccagagatgaaaggaaaataaaggaaattgatcgggaattgcagaagaagaaagaggagctgaatgcagtgcgtaggcaagctgagggcttgtctgaggatggggccgcaatggcagtggagccaactcagatccagctcagcaagcgctggcgggaaattgagagcaaatttgctcagtttcgaagactcaactttgcacaaattcacactgtccgtgaagaaacgatgatggtgatgactgaagacatgcctttggaaatttcttatgtgccttctacttatttgactgaaatcactcatgtctcacaagccctattagaagtggaacaacttctcaatgctcctgacctctgtgctaaggactttgaagatctctttaagcaagaggagtctctgaagaatataaaagatagtctacaacaaagctcaggtcggattgacattattcatagcaagaagacagcagcattgcaaagtgcaacgcctgtggaaagggtgaagctacaggaagctctctcccagcttgatttccaatgggaaaaagttaacaaaatgtacaaggaccgacaagggcgatttgacagatctgttgagaaatggcggcgttttcattatgatataaagatatttaatcagtggctaacagaagctgaacagtttctcagaaagacacaaattcctgagaattgggaacatgctaaatacaaatggtatcttatagctcttaaggatggcattgggcagcggcaaactgttgtcagaacattgaatgcaactggggaagaaataattcagcaatcctcaaaaacagatgccagtattctacaggaaaaattgggaagcctgaatctgcggtggcaggaggtctgcaaacagctgtcagacagaaaaaagaggctagaagaacaaaagaatatcttgtcagaatttcaaagagatttaaatgaatttgttttatggttggaggaagcagataacattgctagtatcccacttgaacctggaaaagagcagcaactaaaagaaaagcttgagcaagtcaagttactggtggaagagttgcccctgcgccagggaattctcaaacaattaaatgaaactggaggacccgtgcttgtaagtgctcccataagcccagaagagcaagataaacttgaaaataagctcaagcagacaaatctccagtggataaaggtttccagagctttacctgagaaacaaggagaaattgaagctcaaataaaagaccttgggcagcttgaaaaaaagcttgaagaccttgaagagcagttaaatcatctgctgctgtggttatctcctattaggaatcagttggaaatttataaccaaccaaaccaagaaggaccatttgacgttaaggaaactgaaatagcagttcaagctaaacaaccggatgtggaagagattttgtctaaagggcagcatttgtacaaggaaaaaccagccactcagccagtgaagaggaagttagaagatctgagctctgagtggaaggcggtaaaccgtttacttcaagagctgagggcaaagcagcctgacctagctcctggactgaccactattggagcctctcctactcagactgttactctggtgacacaacctgtggttactaaggaaactgccatctccaaactagaaatgccatcttccttgatgttggaggtacctgctctggcagatttcaaccgggcttggacagaacttaccgactggctttctctgcttgatcaagttataaaatcacagagggtgatggtgggtgaccttgaggatatcaacgagatgatcatcaagcagaaggcaacaatgcaggatttggaacagaggcgtccccagttggaagaactcattaccgctgcccaaaatttgaaaaacaagaccagcaatcaagaggctagaacaatcattacggatcgaattgaaagaattcagaatcagtgggatgaagtacaagaacaccttcagaaccggaggcaacagttgaatgaaatgttaaaggattcaacacaatggctggaagctaaggaagaagctgagcaggtcttaggacaggccagagccaagcttgagtcatggaaggagggtccctatacagtagatgcaatccaaaagaaaatcacagaaaccaagcagttggccaaagacctccgccagtggcagacaaatgtagatgtggcaaatgacttggccctgaaacttctccgggattattctgcagatgataccagaaaagtccacatgataacagagaatatcaatgcctcttggagaagcattcataaaagggtgagtgagcgagaggctgctttggaagaaactcatagattactgcaacagttccccctggacctggaaaagtttcttgcctggcttacagaagctgaaacaactgccaatgtcctacaggatgctacccgtaaggaaaggctcctagaagactccaagggagtaaaagagctgatgaaacaatggcaagacctccaaggtgaaattgaagctcacacagatgtttatcacaacctggatgaaaacagccaaaaaatcctgagatccctggaaggttccgatgatgcagtcctgttacaaagacgtttggataacatgaacttcaagtggagtgaacttcggaaaaagtctctcaacattaggtcccatttggaagccagttctgaccagtggaagcgtctgcacctttctctgcaggaacttctggtgtggctacagctgaaagatgatgaattaagccggcaggcacctattggaggcgactttccagcagttcagaagcagaacgatgtacatagggccttcaagagggaattgaaaactaaagaacctgtaatcatgagtactcttgagactgtacgaatatttctgacagagcagcctttggaaggactagagaaactctaccaggagcccagagagctgcctcctgaggagagagcccagaatgtcactcggcttctacgaaagcaggctgaggaggtcaatactgagtgggaaaaattgaacctgcactccgctgactggcagagaaaaatagatgagacccttgaaagactccgggaacttcaagaggccacggatgagctggacctcaagctgcgccaagctgaggtgatcaagggatcctggcagcccgtgggcgatctcctcattgactctctccaagatcacctcgagaaagtcaaggcacttcgaggagaaattgcgcctctgaaagagaacgtgagccacgtcaatgaccttgctcgccagcttaccactttgggcattcagctctcaccgtataacctcagcactctggaagacctgaacaccagatggaagcttctgcaggtggccgtcgaggaccgagtcaggcagctgcatgaagcccacagggactttggtccagcatctcagcactttctttccacgtctgtccagggtccctgggagagagccatctcgccaaacaaagtgccctactatatcaaccacgagactcaaacaacttgctgggaccatcccaaaatgacagagctctaccagtctttagctgacctgaataatgtcagattctcagcttataggactgccatgaaactccgaagactgcagaaggccctttgcttggatctcttgagcctgtcagctgcatgtgatgccttggaccagcacaacctcaagcaaaatgaccagcccatggatatcctgcagattattaattgtttgaccactatttatgaccgcctggagcaagagcacaacaatttggtcaacgtccctctctgcgtggatatgtgtctgaactggctgctgaatgtttatgatacgggacgaacagggaggatccgtgtcctgtcttttaaaactggcatcatttccctgtgtaaagcacatttggaagacaagtacagataccttttcaagcaagtggcaagttcaacaggattttgtgaccagcgcaggctgggcctccttctgcatgattctatccaaattccaagacagttgggtgaagttgcatcctttgggggcagtaacattgagccaagtgtccggagctgcttccaatttgctaataataagccagagatcgaagcggccctcttcctagactggatgagactggaaccccagtccatggtgtggctgcccgtcctgcacagagtggctgctgcagaaactgccaagcatcaggccaaatgtaacatctgcaaagagtgtccaatcattggattcaggtacaggagtctaaagcactttaattatgacatctgccaaagctgctttttttctggtcgagttgcaaaaggccataaaatgcactatcccatggtggaatattgcactccgactacatcaggagaagatgttcgagactttgccaaggtactaaaaaacaaatttcgaaccaaaaggtattttgcgaagcatccccgaatgggctacctgccagtgcagactgtcttagagggggacaacatggaaactcccgttactctgatcaacttctggccagtagattctgcgcctgcctcgtcccctcagctttcacacgatgatactcattcacgcattgaacattatgctagcaggctagcagaaatggaaaacagcaatggatcttatctaaatgatagcatctctcctaatgagagcatagatgatgaacatttgttaatccagcattactgccaaagtttgaaccaggactcccccctgagccagcctcgtagtcctgcccagatcttgatttccttagagagtgaggaaagaggggagctagagagaatcctagcagatcttgaggaagaaaacaggaatctgcaagcagaatatgaccgtctaaagcagcagcacgaacataaaggcctgtccccactgccgtcccctcctgaaatgatgcccacctctccccagagtccccgggatgctgagctcattgctgaggccaagctactgcgtcaacacaaaggccgcctggaagccaggatgcaaatcctggaagaccacaataaacagctggagtcacagttacacaggctaaggcagctgctggagcaaccccaggcagaggccaaagtgaatggcacaacggtgtcctctccttctacctctctacagaggtccgacagcagtcagcctatgctgctccgagtggttggcagtcaaacttcggactccatgggtgaggaagatcttctcagtcctccccaggacacaagcacagggttagaggaggtgatggagcaactcaacaactccttccctagttcaagaggaagaaatacccctggaaagccaatgagagaggacacaatgtaggaagtcttttccacatggcagatgatttgggcagagcgatggagtccttagtatcagtcatgacagatgaagaaggagcagaataaatgttttacaactcctgattcccgcatggtttttataatattcatacaacaaagaggattagacagtaagagtttacaagaaataaatctatatttttgtgaagggtagtggtattatactgtagatttcagtagtttctaagtctgttattgttttgttaacaatggcaggttttacacgtctatgcaattgtacaaaaaagttataagaaaactacatgtaaaatcttgatagctaaataacttgccatttctttatatggaacgcattttgggttgtttaaaaatttataacagttataaagaaagattgtaaactaaagtgtgctttataaaaaaaagttgtttataaaaacccctaaaaacaaaacaaacacacacacacacacatacacacacacacacaaaactttgaggcagcgcattgttttgcatccttttggcgtgatatccatatgaaattcatggctttttctttttttgcatattaaagataagacttcctctaccaccacaccaaatgactactacacactgctcatttgagaactgtcagctgagtggggcaggcttgagttttcatttcatatatctatatgtctataagtatataaatactatagttatatagataaagagatacgaatttctatagactgactttttccattttttaaatgttcatgtcacatcctaatagaaagaaattacttctagtcagtcatccaggcttacctgcttggtctagaatggatttttcccggagccggaagccaggaggaaactacaccacactaaaacattgtctacagctccagatgtttctcattttaaacaactttccactgacaacgaaagtaaagtaaagtattggatttttttaaagggaacatgtgaatgaatacacaggacttattatatcagagtgagtaatcggttggttggttgattgattgattgattgatacattcagcttcctgctgctagcaatgccacgatttagatttaatgatgcttcagtggaaatcaatcagaaggtattctgaccttgtgaacatcagaaggtattttttaactcccaagcagtagcaggacgatgatagggctggagggctatggattcccagcccatccctgtgaaggagtaggccactctttaagtgaaggattggatgattgttcataatacataaagttctctgtaattacaactaaattattatgccctcttctcacagtcaaaaggaactgggtggtttggtttttgttgcttttttagatttattgtcccatgtgggatgagtttttaaatgccacaagacataatttaaaataaataaactttgggaaaaggtgtaaaacagtagccccatcacatttgtgatactgacaggtatcaacccagaagcccatgaactgtgtttccatcctttgcatttctctgcgagtagttccacacaggtttgtaagtaagtaagaaagaaggcaaattgattcaaatgttacaaaaaaacccttcttggtggattagacaggttaaatatataaacaaacaaacaaaaattgctcaaaaaagaggagaaaagctcaagaggaaaagctaaggactggtaggaaaaagctttactctttcatgccattttatttctttttgatttttaaatcattcattcaatagataccaccgtgtgacctataattttgcaaatctgttacctctgacatcaagtgtaattagcttttggagagtgggctgacatcaagtgtaattagcttttggagagtgggttttgtccattattaataattaattaattaacatcaaacacggcttctcatgctatttctacctcactttggttttggggtgttcctgataattgtgcacacctgagttcacagcttcaccacttgtccattgcgttattttctttttcctttataattctttctttttccttcataattttcaaaagaaaacccaaagctctaaggtaacaaattaccaaattacatgaagatttggtttttgtcttgcatttttttcctttatgtgacgctggaccttttctttacccaaggatttttaaaactcagatttaaaacaaggggttactttacatcctactaagaagtttaagtaagtaagtttcattctaaaatcagaggtaaatagagtgcataaataattttgttttaatctttttgtttttcttttagacacattagctctggagtgagtctgtcataatatttgaacaaaaattgagagctttattgctgcattttaagcataattaatttggacattatttcgtgttgtgttctttataaccaccaagtattaaactgtaaatcataatgtaactgaagcataaacatcacatggcatgttttgtcattgttttcaggtactgagttcttacttgagtatcataatatattgtgttttaacaccaacactgtaacatttacgaattatttttttaaacttcagttttactgcattttcacaacatatcagacttcaccaaatatatgccttactattgtattatagtactgctttactgtgtatctcaataaagcacgcagttatgttac

SEQ ID NO: 9151 - DNA, 7080 bp, Homo sapiens
  source 1..7080: mol_type = unassigned DNA
acactagcaatggcaaagctttgtgcggaggcattgctggctgctctgaactaaaagcatccgtggggaccgaaagaggtttttgcacaccttattaaggaactccaggatggcattgggcagcggcaaactgttgtcagaacattgaatgcaactggggaagaaataattcagcaatcctcaaaaacagatgccagtattctacaggaaaaattgggaagcctgaatctgcggtggcaggaggtctgcaaacagctgtcagacagaaaaaagaggctagaagaacaaaagaatatcttgtcagaatttcaaagagatttaaatgaatttgttttatggttggaggaagcagataacattgctagtatcccacttgaacctggaaaagagcagcaactaaaagaaaagcttgagcaagtcaagttactggtggaagagttgcccctgcgccagggaattctcaaacaattaaatgaaactggaggacccgtgcttgtaagtgctcccataagcccagaagagcaagataaacttgaaaataagctcaagcagacaaatctccagtggataaaggtttccagagctttacctgagaaacaaggagaaattgaagctcaaataaaagaccttgggcagcttgaaaaaaagcttgaagaccttgaagagcagttaaatcatctgctgctgtggttatctcctattaggaatcagttggaaatttataaccaaccaaaccaagaaggaccatttgacgttaaggaaactgaaatagcagttcaagctaaacaaccggatgtggaagagattttgtctaaagggcagcatttgtacaaggaaaaaccagccactcagccagtgaagaggaagttagaagatctgagctctgagtggaaggcggtaaaccgtttacttcaagagctgagggcaaagcagcctgacctagctcctggactgaccactattggagcctctcctactcagactgttactctggtgacacaacctgtggttactaaggaaactgccatctccaaactagaaatgccatcttccttgatgttggaggtacctgctctggcagatttcaaccgggcttggacagaacttaccgactggctttctctgcttgatcaagttataaaatcacagagggtgatggtgggtgaccttgaggatatcaacgagatgatcatcaagcagaaggcaacaatgcaggatttggaacagaggcgtccccagttggaagaactcattaccgctgcccaaaatttgaaaaacaagaccagcaatcaagaggctagaacaatcattacggatcgaattgaaagaattcagaatcagtgggatgaagtacaagaacaccttcagaaccggaggcaacagttgaatgaaatgttaaaggattcaacacaatggctggaagctaaggaagaagctgagcaggtcttaggacaggccagagccaagcttgagtcatggaaggagggtccctatacagtagatgcaatccaaaagaaaatcacagaaaccaagcagttggccaaagacctccgccagtggcagacaaatgtagatgtggcaaatgacttggccctgaaacttctccgggattattctgcagatgataccagaaaagtccacatgataacagagaatatcaatgcctcttggagaagcattcataaaagggtgagtgagcgagaggctgctttggaagaaactcatagattactgcaacagttccccctggacctggaaaagtttcttgcctggcttacagaagctgaaacaactgccaatgtcctacaggatgctacccgtaaggaaaggctcctagaagactccaagggagtaaaagagctgatgaaacaatggcaagacctccaaggtgaaattgaagctcacacagatgtttatcacaacctggatgaaaacagccaaaaaatcctgagatccctggaaggttccgatgatgcagtcctgttacaaagacgtttggataacatgaacttcaagtggagtgaacttcggaaaaagtctctcaacattaggtcccatttggaagccagttctgaccagtggaagcgtctgcacctttctctgcaggaacttctggtgtggctacagctgaaagatgatgaattaagccggcaggcacctattggaggcgactttccagcagttcagaagcagaacgatgtacatagggccttcaagagggaattgaaaactaaagaacctgtaatcatgagtactcttgagactgtacgaatatttctgacagagcagcctttggaaggactagagaaactctaccaggagcccagagagctgcctcctgaggagagagcccagaatgtcactcggcttctacgaaagcaggctgaggaggtcaatactgagtgggaaaaattgaacctgcactccgctgactggcagagaaaaatagatgagacccttgaaagactccgggaacttcaagaggccacggatgagctggacctcaagctgcgccaagctgaggtgatcaagggatcctggcagcccgtgggcgatctcctcattgactctctccaagatcacctcgagaaagtcaaggcacttcgaggagaaattgcgcctctgaaagagaacgtgagccacgtcaatgaccttgctcgccagcttaccactttgggcattcagctctcaccgtataacctcagcactctggaagacctgaacaccagatggaagcttctgcaggtggccgtcgaggaccgagtcaggcagctgcatgaagcccacagggactttggtccagcatctcagcactttctttccacgtctgtccagggtccctgggagagagccatctcgccaaacaaagtgccctactatatcaaccacgagactcaaacaacttgctgggaccatcccaaaatgacagagctctaccagtctttagctgacctgaataatgtcagattctcagcttataggactgccatgaaactccgaagactgcagaaggccctttgcttggatctcttgagcctgtcagctgcatgtgatgccttggaccagcacaacctcaagcaaaatgaccagcccatggatatcctgcagattattaattgtttgaccactatttatgaccgcctggagcaagagcacaacaatttggtcaacgtccctctctgcgtggatatgtgtctgaactggctgctgaatgtttatgatacgggacgaacagggaggatccgtgtcctgtcttttaaaactggcatcatttccctgtgtaaagcacatttggaagacaagtacagataccttttcaagcaagtggcaagttcaacaggattttgtgaccagcgcaggctgggcctccttctgcatgattctatccaaattccaagacagttgggtgaagttgcatcctttgggggcagtaacattgagccaagtgtccggagctgcttccaatttgctaataataagccagagatcgaagcggccctcttcctagactggatgagactggaaccccagtccatggtgtggctgcccgtcctgcacagagtggctgctgcagaaactgccaagcatcaggccaaatgtaacatctgcaaagagtgtccaatcattggattcaggtacaggagtctaaagcactttaattatgacatctgccaaagctgctttttttctggtcgagttgcaaaaggccataaaatgcactatcccatggtggaatattgcactccgactacatcaggagaagatgttcgagactttgccaaggtactaaaaaacaaatttcgaaccaaaaggtattttgcgaagcatccccgaatgggctacctgccagtgcagactgtcttagagggggacaacatggaaacgaatctgcaagcagaatatgaccgtctaaagcagcagcacgaacataaaggcctgtccccactgccgtcccctcctgaaatgatgcccacctctccccagagtccccgggatgctgagctcattgctgaggccaagctactgcgtcaacacaaaggccgcctggaagccaggatgcaaatcctggaagaccacaataaacagctggagtcacagttacacaggctaaggcagctgctggagcaaccccaggcagaggccaaagtgaatggcacaacggtgtcctctccttctacctctctacagaggtccgacagcagtcagcctatgctgctccgagtggttggcagtcaaacttcggactccatgggtgaggaagatcttctcagtcctccccaggacacaagcacagggttagaggaggtgatggagcaactcaacaactccttccctagttcaagaggaagaaatacccctggaaagccaatgagagaggacacaatgtaggaagtcttttccacatggcagatgatttgggcagagcgatggagtccttagtatcagtcatgacagatgaagaaggagcagaataaatgttttacaactcctgattcccgcatggtttttataatattcatacaacaaagaggattagacagtaagagtttacaagaaataaatctatatttttgtgaagggtagtggtattatactgtagatttcagtagtttctaagtctgttattgttttgttaacaatggcaggttttacacgtctatgcaattgtacaaaaaagttataagaaaactacatgtaaaatcttgatagctaaataacttgccatttctttatatggaacgcattttgggttgtttaaaaatttataacagttataaagaaagattgtaaactaaagtgtgctttataaaaaaaagttgtttataaaaacccctaaaaacaaaacaaacacacacacacacacatacacacacacacacaaaactttgaggcagcgcattgttttgcatccttttggcgtgatatccatatgaaattcatggctttttctttttttgcatattaaagataagacttcctctaccaccacaccaaatgactactacacactgctcatttgagaactgtcagctgagtggggcaggcttgagttttcatttcatatatctatatgtctataagtatataaatactatagttatatagataaagagatacgaatttctatagactgactttttccattttttaaatgttcatgtcacatcctaatagaaagaaattacttctagtcagtcatccaggcttacctgcttggtctagaatggatttttcccggagccggaagccaggaggaaactacaccacactaaaacattgtctacagctccagatgtttctcattttaaacaactttccactgacaacgaaagtaaagtaaagtattggatttttttaaagggaacatgtgaatgaatacacaggacttattatatcagagtgagtaatcggttggttggttgattgattgattgattgatacattcagcttcctgctgctagcaatgccacgatttagatttaatgatgcttcagtggaaatcaatcagaaggtattctgaccttgtgaacatcagaaggtattttttaactcccaagcagtagcaggacgatgatagggctggagggctatggattcccagcccatccctgtgaaggagtaggccactctttaagtgaaggattggatgattgttcataatacataaagttctctgtaattacaactaaattattatgccctcttctcacagtcaaaaggaactgggtggtttggtttttgttgcttttttagatttattgtcccatgtgggatgagtttttaaatgccacaagacataatttaaaataaataaactttgggaaaaggtgtaaaacagtagccccatcacatttgtgatactgacaggtatcaacccagaagcccatgaactgtgtttccatcctttgcatttctctgcgagtagttccacacaggtttgtaagtaagtaagaaagaaggcaaattgattcaaatgttacaaaaaaacccttcttggtggattagacaggttaaatatataaacaaacaaacaaaaattgctcaaaaaagaggagaaaagctcaagaggaaaagctaaggactggtaggaaaaagctttactctttcatgccattttatttctttttgatttttaaatcattcattcaatagataccaccgtgtgacctataattttgcaaatctgttacctctgacatcaagtgtaattagcttttggagagtgggctgacatcaagtgtaattagcttttggagagtgggttttgtccattattaataattaattaattaacatcaaacacggcttctcatgctatttctacctcactttggttttggggtgttcctgataattgtgcacacctgagttcacagcttcaccacttgtccattgcgttattttctttttcctttataattctttctttttccttcataattttcaaaagaaaacccaaagctctaaggtaacaaattaccaaattacatgaagatttggtttttgtcttgcatttttttcctttatgtgacgctggaccttttctttacccaaggatttttaaaactcagatttaaaacaaggggttactttacatcctactaagaagtttaagtaagtaagtttcattctaaaatcagaggtaaatagagtgcataaataattttgttttaatctttttgtttttcttttagacacattagctctggagtgagtctgtcataatatttgaacaaaaattgagagctttattgctgcattttaagcataattaatttggacattatttcgtgttgtgttctttataaccaccaagtattaaactgtaaatcataatgtaactgaagcataaacatcacatggcatgttttgtcattgttttcaggtactgagttcttacttgagtatcataatatattgtgttttaacaccaacactgtaacatttacgaattatttttttaaacttcagttttactgcattttcacaacatatcagacttcaccaaatatatgccttactattgtattatagtactgctttactgtgtatctcaataaagcacgcagttatgttac

SEQ ID NO: 9152 - DNA, 13993 bp, Homo sapiens
  source 1..13993: mol_type = unassigned DNA
tcctggcatcagttactgtgttgactcactcagtgttgggatcactcactttccccctacaggactcagatctgggaggcaattaccttcggagaaaaacgaataggaaaaactgaagtgttactttttttaaagctgctgaagtttgttggtttctcattgtttttaagcctactggagcaataaagtttgaagaacttttaccaggttttttttatcgctgccttgatatacacttttcaaaatgctttggtgggaagaagtagaggactgttatgaaagagaagatgttcaaaagaaaacattcacaaaatgggtaaatgcacaattttctaagtttgggaagcagcatattgagaacctcttcagtgacctacaggatgggaggcgcctcctagacctcctcgaaggcctgacagggcaaaaactgccaaaagaaaaaggatccacaagagttcatgccctgaacaatgtcaacaaggcactgcgggttttgcagaacaataatgttgatttagtgaatattggaagtactgacatcgtagatggaaatcataaactgactcttggtttgatttggaatataatcctccactggcaggtcaaaaatgtaatgaaaaatatcatggctggattgcaacaaaccaacagtgaaaagattctcctgagctgggtccgacaatcaactcgtaattatccacaggttaatgtaatcaacttcaccaccagctggtctgatggcctggctttgaatgctctcatccatagtcataggccagacctatttgactggaatagtgtggtttgccagcagtcagccacacaacgactggaacatgcattcaacatcgccagatatcaattaggcatagagaaactactcgatcctgaagatgttgataccacctatccagataagaagtccatcttaatgtacatcacatcactcttccaagttttgcctcaacaagtgagcattgaagccatccaggaagtggaaatgttgccaaggccacctaaagtgactaaagaagaacattttcagttacatcatcaaatgcactattctcaacagatcacggtcagtctagcacagggatatgagagaacttcttcccctaagcctcgattcaagagctatgcctacacacaggctgcttatgtcaccacctctgaccctacacggagcccatttccttcacagcatttggaagctcctgaagacaagtcatttggcagttcattgatggagagtgaagtaaacctggaccgttatcaaacagctttagaagaagtattatcgtggcttctttctgctgaggacacattgcaagcacaaggagagatttctaatgatgtggaagtggtgaaagaccagtttcatactcatgaggggtacatgatggatttgacagcccatcagggccgggttggtaatattctacaattgggaagtaagctgattggaacaggaaaattatcagaagatgaagaaactgaagtacaagagcagatgaatctcctaaattcaagatgggaatgcctcagggtagctagcatggaaaaacaaagcaatttacatagagttttaatggatctccagaatcagaaactgaaagagttgaatgactggctaacaaaaacagaagaaagaacaaggaaaatggaggaagagcctcttggacctgatcttgaagacctaaaacgccaagtacaacaacataaggtgcttcaagaagatctagaacaagaacaagtcagggtcaattctctcactcacatggtggtggtagttgatgaatctagtggagatcacgcaactgctgctttggaagaacaacttaaggtattgggagatcgatgggcaaacatctgtagatggacagaagaccgctgggttcttttacaagacatccttctcaaatggcaacgtcttactgaagaacagtgcctttttagtgcatggctttcagaaaaagaagatgcagtgaacaagattcacacaactggctttaaagatcaaaatgaaatgttatcaagtcttcaaaaactggccgttttaaaagcggatctagaaaagaaaaagcaatccatgggcaaactgtattcactcaaacaagatcttctttcaacactgaagaataagtcagtgacccagaagacggaagcatggctggataactttgcccggtgttgggataatttagtccaaaaacttgaaaagagtacagcacagatttcacaggctgtcaccaccactcagccatcactaacacagacaactgtaatggaaacagtaactacggtgaccacaagggaacagatcctggtaaagcatgctcaagaggaacttccaccaccacctccccaaaagaagaggcagattactgtggattctgaaattaggaaaaggttggatgttgatataactgaacttcacagctggattactcgctcagaagctgtgttgcagagtcctgaatttgcaatctttcggaaggaaggcaacttctcagacttaaaagaaaaagtcaatgccatagagcgagaaaaagctgagaagttcagaaaactgcaagatgccagcagatcagctcaggccctggtggaacagatggtgaatgagggtgttaatgcagatagcatcaaacaagcctcagaacaactgaacagccggtggatcgaattctgccagttgctaagtgagagacttaactggctggagtatcagaacaacatcatcgctttctataatcagctacaacaattggagcagatgacaactactgctgaaaactggttgaaaatccaacccaccaccccatcagagccaacagcaattaaaagtcagttaaaaatttgtaaggatgaagtcaaccggctatcagatcttcaacctcaaattgaacgattaaaaattcaaagcatagccctgaaagagaaaggacaaggacccatgttcctggatgcagactttgtggcctttacaaatcattttaagcaagtcttttctgatgtgcaggccagagagaaagagctacagacaatttttgacactttgccaccaatgcgctatcaggagaccatgagtgccatcaggacatgggtccagcagtcagaaaccaaactctccatacctcaacttagtgtcaccgactatgaaatcatggagcagagactcggggaattgcaggctttacaaagttctctgcaagagcaacaaagtggcctatactatctcagcaccactgtgaaagagatgtcgaagaaagcgccctctgaaattagccggaaatatcaatcagaatttgaagaaattgagggacgctggaagaagctctcctcccagctggttgagcattgtcaaaagctagaggagcaaatgaataaactccgaaaaattcagaatcacatacaaaccctgaagaaatggatggctgaagttgatgtttttctgaaggaggaatggcctgcccttggggattcagaaattctaaaaaagcagctgaaacagtgcagacttttagtcagtgatattcagacaattcagcccagtctaaacagtgtcaatgaaggtgggcagaagataaagaatgaagcagagccagagtttgcttcgagacttgagacagaactcaaagaacttaacactcagtgggatcacatgtgccaacaggtctatgccagaaaggaggccttgaagggaggtttggagaaaactgtaagcctccagaaagatctatcagagatgcacgaatggatgacacaagctgaagaagagtatcttgagagagattttgaatataaaactccagatgaattacagaaagcagttgaagagatgaagagagctaaagaagaggcccaacaaaaagaagcgaaagtgaaactccttactgagtctgtaaatagtgtcatagctcaagctccacctgtagcacaagaggccttaaaaaaggaacttgaaactctaaccaccaactaccagtggctctgcactaggctgaatgggaaatgcaagactttggaagaagtttgggcatgttggcatgagttattgtcatacttggagaaagcaaacaagtggctaaatgaagtagaatttaaacttaaaaccactgaaaacattcctggcggagctgaggaaatctctgaggtgctagattcacttgaaaatttgatgcgacattcagaggataacccaaatcagattcgcatattggcacagaccctaacagatggcggagtcatggatgagctaatcaatgaggaacttgagacatttaattctcgttggagggaactacatgaagaggctgtaaggaggcaaaagttgcttgaacagagcatccagtctgcccaggagactgaaaaatccttacacttaatccaggagtccctcacattcattgacaagcagttggcagcttatattgcagacaaggtggacgcagctcaaatgcctcaggaagcccagaaaatccaatctgatttgacaagtcatgagatcagtttagaagaaatgaagaaacataatcaggggaaggaggctgcccaaagagtcctgtctcagattgatgttgcacagaaaaaattacaagatgtctccatgaagtttcgattattccagaaaccagccaattttgagcagcgtctacaagaaagtaagatgattttagatgaagtgaagatgcacttgcctgcattggaaacaaagagtgtggaacaggaagtagtacagtcacagctaaatcattgtgtgaacttgtataaaagtctgagtgaagtgaagtctgaagtggaaatggtgataaagactggacgtcagattgtacagaaaaagcagacggaaaatcccaaagaacttgatgaaagagtaacagctttgaaattgcattataatgagctgggagcaaaggtaacagaaagaaagcaacagttggagaaatgcttgaaattgtcccgtaagatgcgaaaggaaatgaatgtcttgacagaatggctggcagctacagatatggaattgacaaagagatcagcagttgaaggaatgcctagtaatttggattctgaagttgcctggggaaaggctactcaaaaagagattgagaaacagaaggtgcacctgaagagtatcacagaggtaggagaggccttgaaaacagttttgggcaagaaggagacgttggtggaagataaactcagtcttctgaatagtaactggatagctgtcacctcccgagcagaagagtggttaaatcttttgttggaataccagaaacacatggaaacttttgaccagaatgtggaccacatcacaaagtggatcattcaggctgacacacttttggatgaatcagagaaaaagaaaccccagcaaaaagaagacgtgcttaagcgtttaaaggcagaactgaatgacatacgcccaaaggtggactctacacgtgaccaagcagcaaacttgatggcaaaccgcggtgaccactgcaggaaattagtagagccccaaatctcagagctcaaccatcgatttgcagccatttcacacagaattaagactggaaaggcctccattcctttgaaggaattggagcagtttaactcagatatacaaaaattgcttgaaccactggaggctgaaattcagcagggggtgaatctgaaagaggaagacttcaataaagatatgaatgaagacaatgagggtactgtaaaagaattgttgcaaagaggagacaacttacaacaaagaatcacagatgagagaaagcgagaggaaataaagataaaacagcagctgttacagacaaaacataatgctctcaaggatttgaggtctcaaagaagaaaaaaggctctagaaatttctcatcagtggtatcagtacaagaggcaggctgatgatctcctgaaatgcttggatgacattgaaaaaaaattagccagcctacctgagcccagagatgaaaggaaaataaaggaaattgatcgggaattgcagaagaagaaagaggagctgaatgcagtgcgtaggcaagctgagggcttgtctgaggatggggccgcaatggcagtggagccaactcagatccagctcagcaagcgctggcgggaaattgagagcaaatttgctcagtttcgaagactcaactttgcacaaattcacactgtccgtgaagaaacgatgatggtgatgactgaagacatgcctttggaaatttcttatgtgccttctacttatttgactgaaatcactcatgtctcacaagccctattagaagtggaacaacttctcaatgctcctgacctctgtgctaaggactttgaagatctctttaagcaagaggagtctctgaagaatataaaagatagtctacaacaaagctcaggtcggattgacattattcatagcaagaagacagcagcattgcaaagtgcaacgcctgtggaaagggtgaagctacaggaagctctctcccagcttgatttccaatgggaaaaagttaacaaaatgtacaaggaccgacaagggcgatttgacagatctgttgagaaatggcggcgttttcattatgatataaagatatttaatcagtggctaacagaagctgaacagtttctcagaaagacacaaattcctgagaattgggaacatgctaaatacaaatggtatcttatagctcttaaggatggcattgggcagcggcaaactgttgtcagaacattgaatgcaactggggaagaaataattcagcaatcctcaaaaacagatgccagtattctacaggaaaaattgggaagcctgaatctgcggtggcaggaggtctgcaaacagctgtcagacagaaaaaagaggctagaagaacaaaagaatatcttgtcagaatttcaaagagatttaaatgaatttgttttatggttggaggaagcagataacattgctagtatcccacttgaacctggaaaagagcagcaactaaaagaaaagcttgagcaagtcaagttactggtggaagagttgcccctgcgccagggaattctcaaacaattaaatgaaactggaggacccgtgcttgtaagtgctcccataagcccagaagagcaagataaacttgaaaataagctcaagcagacaaatctccagtggataaaggtttccagagctttacctgagaaacaaggagaaattgaagctcaaataaaagaccttgggcagcttgaaaaaaagcttgaagaccttgaagagcagttaaatcatctgctgctgtggttatctcctattaggaatcagttggaaatttataaccaaccaaaccaagaaggaccatttgacgttaaggaaactgaaatagcagttcaagctaaacaaccggatgtggaagagattttgtctaaagggcagcatttgtacaaggaaaaaccagccactcagccagtgaagaggaagttagaagatctgagctctgagtggaaggcggtaaaccgtttacttcaagagctgagggcaaagcagcctgacctagctcctggactgaccactattggagcctctcctactcagactgttactctggtgacacaacctgtggttactaaggaaactgccatctccaaactagaaatgccatcttccttgatgttggaggtacctgctctggcagatttcaaccgggcttggacagaacttaccgactggctttctctgcttgatcaagttataaaatcacagagggtgatggtgggtgaccttgaggatatcaacgagatgatcatcaagcagaaggcaacaatgcaggatttggaacagaggcgtccccagttggaagaactcattaccgctgcccaaaatttgaaaaacaagaccagcaatcaagaggctagaacaatcattacggatcgaattgaaagaattcagaatcagtgggatgaagtacaagaacaccttcagaaccggaggcaacagttgaatgaaatgttaaaggattcaacacaatggctggaagctaaggaagaagctgagcaggtcttaggacaggccagagccaagcttgagtcatggaaggagggtccctatacagtagatgcaatccaaaagaaaatcacagaaaccaagcagttggccaaagacctccgccagtggcagacaaatgtagatgtggcaaatgacttggccctgaaacttctccgggattattctgcagatgataccagaaaagtccacatgataacagagaatatcaatgcctcttggagaagcattcataaaagggtgagtgagcgagaggctgctttggaagaaactcatagattactgcaacagttccccctggacctggaaaagtttcttgcctggcttacagaagctgaaacaactgccaatgtcctacaggatgctacccgtaaggaaaggctcctagaagactccaagggagtaaaagagctgatgaaacaatggcaagacctccaaggtgaaattgaagctcacacagatgtttatcacaacctggatgaaaacagccaaaaaatcctgagatccctggaaggttccgatgatgcagtcctgttacaaagacgtttggataacatgaacttcaagtggagtgaacttcggaaaaagtctctcaacattaggtcccatttggaagccagttctgaccagtggaagcgtctgcacctttctctgcaggaacttctggtgtggctacagctgaaagatgatgaattaagccggcaggcacctattggaggcgactttccagcagttcagaagcagaacgatgtacatagggccttcaagagggaattgaaaactaaagaacctgtaatcatgagtactcttgagactgtacgaatatttctgacagagcagcctttggaaggactagagaaactctaccaggagcccagagagctgcctcctgaggagagagcccagaatgtcactcggcttctacgaaagcaggctgaggaggtcaatactgagtgggaaaaattgaacctgcactccgctgactggcagagaaaaatagatgagacccttgaaagactccgggaacttcaagaggccacggatgagctggacctcaagctgcgccaagctgaggtgatcaagggatcctggcagcccgtgggcgatctcctcattgactctctccaagatcacctcgagaaagtcaaggcacttcgaggagaaattgcgcctctgaaagagaacgtgagccacgtcaatgaccttgctcgccagcttaccactttgggcattcagctctcaccgtataacctcagcactctggaagacctgaacaccagatggaagcttctgcaggtggccgtcgaggaccgagtcaggcagctgcatgaagcccacagggactttggtccagcatctcagcactttctttccacgtctgtccagggtccctgggagagagccatctcgccaaacaaagtgccctactatatcaaccacgagactcaaacaacttgctgggaccatcccaaaatgacagagctctaccagtctttagctgacctgaataatgtcagattctcagcttataggactgccatgaaactccgaagactgcagaaggccctttgcttggatctcttgagcctgtcagctgcatgtgatgccttggaccagcacaacctcaagcaaaatgaccagcccatggatatcctgcagattattaattgtttgaccactatttatgaccgcctggagcaagagcacaacaatttggtcaacgtccctctctgcgtggatatgtgtctgaactggctgctgaatgtttatgatacgggacgaacagggaggatccgtgtcctgtcttttaaaactggcatcatttccctgtgtaaagcacatttggaagacaagtacagataccttttcaagcaagtggcaagttcaacaggattttgtgaccagcgcaggctgggcctccttctgcatgattctatccaaattccaagacagttgggtgaagttgcatcctttgggggcagtaacattgagccaagtgtccggagctgcttccaatttgctaataataagccagagatcgaagcggccctcttcctagactggatgagactggaaccccagtccatggtgtggctgcccgtcctgcacagagtggctgctgcagaaactgccaagcatcaggccaaatgtaacatctgcaaagagtgtccaatcattggattcaggtacaggagtctaaagcactttaattatgacatctgccaaagctgctttttttctggtcgagttgcaaaaggccataaaatgcactatcccatggtggaatattgcactccgactacatcaggagaagatgttcgagactttgccaaggtactaaaaaacaaatttcgaaccaaaaggtattttgcgaagcatccccgaatgggctacctgccagtgcagactgtcttagagggggacaacatggaaactcccgttactctgatcaacttctggccagtagattctgcgcctgcctcgtcccctcagctttcacacgatgatactcattcacgcattgaacattatgctagcaggctagcagaaatggaaaacagcaatggatcttatctaaatgatagcatctctcctaatgagagcatagatgatgaacatttgttaatccagcattactgccaaagtttgaaccaggactcccccctgagccagcctcgtagtcctgcccagatcttgatttccttagagagtgaggaaagaggggagctagagagaatcctagcagatcttgaggaagaaaacaggaatctgcaagcagaatatgaccgtctaaagcagcagcacgaacataaaggcctgtccccactgccgtcccctcctgaaatgatgcccacctctccccagagtccccgggatgctgagctcattgctgaggccaagctactgcgtcaacacaaaggccgcctggaagccaggatgcaaatcctggaagaccacaataaacagctggagtcacagttacacaggctaaggcagctgctggagcaaccccaggcagaggccaaagtgaatggcacaacggtgtcctctccttctacctctctacagaggtccgacagcagtcagcctatgctgctccgagtggttggcagtcaaacttcggactccatgggtgaggaagatcttctcagtcctccccaggacacaagcacagggttagaggaggtgatggagcaactcaacaactccttccctagttcaagaggaagaaatacccctggaaagccaatgagagaggacacaatgtaggaagtcttttccacatggcagatgatttgggcagagcgatggagtccttagtatcagtcatgacagatgaagaaggagcagaataaatgttttacaactcctgattcccgcatggtttttataatattcatacaacaaagaggattagacagtaagagtttacaagaaataaatctatatttttgtgaagggtagtggtattatactgtagatttcagtagtttctaagtctgttattgttttgttaacaatggcaggttttacacgtctatgcaattgtacaaaaaagttataagaaaactacatgtaaaatcttgatagctaaataacttgccatttctttatatggaacgcattttgggttgtttaaaaatttataacagttataaagaaagattgtaaactaaagtgtgctttataaaaaaaagttgtttataaaaacccctaaaaacaaaacaaacacacacacacacacatacacacacacacacaaaactttgaggcagcgcattgttttgcatccttttggcgtgatatccatatgaaattcatggctttttctttttttgcatattaaagataagacttcctctaccaccacaccaaatgactactacacactgctcatttgagaactgtcagctgagtggggcaggcttgagttttcatttcatatatctatatgtctataagtatataaatactatagttatatagataaagagatacgaatttctatagactgactttttccattttttaaatgttcatgtcacatcctaatagaaagaaattacttctagtcagtcatccaggcttacctgcttggtctagaatggatttttcccggagccggaagccaggaggaaactacaccacactaaaacattgtctacagctccagatgtttctcattttaaacaactttccactgacaacgaaagtaaagtaaagtattggatttttttaaagggaacatgtgaatgaatacacaggacttattatatcagagtgagtaatcggttggttggttgattgattgattgattgatacattcagcttcctgctgctagcaatgccacgatttagatttaatgatgcttcagtggaaatcaatcagaaggtattctgaccttgtgaacatcagaaggtattttttaactcccaagcagtagcaggacgatgatagggctggagggctatggattcccagcccatccctgtgaaggagtaggccactctttaagtgaaggattggatgattgttcataatacataaagttctctgtaattacaactaaattattatgccctcttctcacagtcaaaaggaactgggtggtttggtttttgttgcttttttagatttattgtcccatgtgggatgagtttttaaatgccacaagacataatttaaaataaataaactttgggaaaaggtgtaaaacagtagccccatcacatttgtgatactgacaggtatcaacccagaagcccatgaactgtgtttccatcctttgcatttctctgcgagtagttccacacaggtttgtaagtaagtaagaaagaaggcaaattgattcaaatgttacaaaaaaacccttcttggtggattagacaggttaaatatataaacaaacaaacaaaaattgctcaaaaaagaggagaaaagctcaagaggaaaagctaaggactggtaggaaaaagctttactctttcatgccattttatttctttttgatttttaaatcattcattcaatagataccaccgtgtgacctataattttgcaaatctgttacctctgacatcaagtgtaattagcttttggagagtgggctgacatcaagtgtaattagcttttggagagtgggttttgtccattattaataattaattaattaacatcaaacacggcttctcatgctatttctacctcactttggttttggggtgttcctgataattgtgcacacctgagttcacagcttcaccacttgtccattgcgttattttctttttcctttataattctttctttttccttcataattttcaaaagaaaacccaaagctctaaggtaacaaattaccaaattacatgaagatttggtttttgtcttgcatttttttcctttatgtgacgctggaccttttctttacccaaggatttttaaaactcagatttaaaacaaggggttactttacatcctactaagaagtttaagtaagtaagtttcattctaaaatcagaggtaaatagagtgcataaataattttgttttaatctttttgtttttcttttagacacattagctctggagtgagtctgtcataatatttgaacaaaaattgagagctttattgctgcattttaagcataattaatttggacattatttcgtgttgtgttctttataaccaccaagtattaaactgtaaatcataatgtaactgaagcataaacatcacatggcatgttttgtcattgttttcaggtactgagttcttacttgagtatcataatatattgtgttttaacaccaacactgtaacatttacgaattatttttttaaacttcagttttactgcattttcacaacatatcagacttcaccaaatatatgccttactattgtattatagtactgctttactgtgtatctcaataaagcacgcagttatgttac

SEQ ID NO: 9153 - DNA, 7277 bp, Homo sapiens
  source 1..7277: mol_type = unassigned DNA
cgctttcctcctctgcttctaatgaattgacatctccaagagccgccacatctctggtagttttacaaaactgtccttgctcttcctgcgtttgcccagtcaagggtatttttgcctgaggtcggaatgatgctgttagtcctggtgatatgattgcatagcaacacagagcagctctgagaggggaggaggaggagaagaaggaagacagggaagtgggagagacagagggagagtgtgcatacagcagctgtcggcatccctgtctcagggacttctttgctgattcacagaggcagcccagccccggcctcccagcttacagctgccgcctgcttctcagacctgacggaatcagaagctacataatattcgccgtgtgagtggctatcgtaatagataacatttgaatatctactaaatgccagaaactatgaattaactcctctcaacaaagctaagaggtgcttaatgatcaatagttggtgcactgcctatcctcatcccccccatgagccttggtttttatgcaacctatggtcatgcagggatgcccttacaccctcccacgatgtcatgactggcaggcagctgaccagttccatcatagcagcagcctccgaagcacctgcccccaccctcaggttagagctgctgtcaccagccctgcacctcctcaagatggtgctggggttccctgcctaagcctaaagctgttgaacgggtctgttggtgcctctggacccctggaaccaccagccatgaatctgtgttggaatgaaataaaaaagaagtctcacaacctccgcgctcgcctagaggccttctcagaccacagtggaaagcttcagctccctcttcaagagattattgactggctcagccaaaaggatgaggagttgtcagctcagctgcccctacagggggatgtggccctggtgcaacaggagaaggagacacatgcggcctttatggaagaagtcaagtctcggggcccctacatctattctgtgctggagtcagctcaggccttcctgtcccagcacccatttgaggagttagaggagcctcattctgagagcaaagatacctccccgaaacagcggatccagaatctcagccgctttgtatggaagcaggcgacggtggccagtgaactgtgggagaagttgacagcccgctgtgtggaccagcaccgtcacattgagcggactctggagcagctcttggagattcaaggggcaatggaggaactaagcactactctgagccaagctgagggagtccgagccacttgggagcccattggggatctcttcattgattcactcccagagcacatccaggctattaagctgttcaaagaagaattctcccccatgaaagatggagtaaagttggtgaatgatctggcccaccaacttgccatttctgatgtgcacttgtcaatggagaattcccaggccctggaacagatcaacgtccgatggaaacaactacaggcgtcagttagtgagaggcttaagcagctccaggatgcccaccgggactttgggcctgggtcacagcactttctctcctcctctgtccaggttccctgggaaagagcaatttcacccaataaagttccctactacatcaaccaccaggctcagaccacatgctgggaccatcccaagatgacagagttataccaaaccctagctgatctgaacaacattaagttctcagcttatcgcactgccatgaaactccgcagagtccagaaagccctgcgcttggacctggtaactttaaccacagccctggaaatcttcaatgagcatgatctgcaggccagtgagcacgtgatggatgtggtagaggtcattcactgcctgactgccttatatgaacgtttggaggaggaaagaggcatcctggtcaacgtgccactctgtgtggacatgagcctcaattggctcctcaatgtttttgatagtggtcgcagcggaaagatgcgggcattgtcttttaagactggcattgcatgcttgtgtggcacggaagtgaaggaaaaacttcagtacctcttcagccaagtggccaactcaggcagccagtgtgaccagcgccaccttggtgtcctgcttcatgaggccattcaggtgccccgtcagctgggtgaagtggcagcctttgggggcagcaatgtggagcccagtgtccgtagttgcttccgttttagcaccgggaagccagtcattgaagcatcccagttcctggagtgggtcaacctggagccccagtccatggtgtggctggctgttctgcatcgggtcaccattgctgagcaagtgaagcatcagaccaagtgctctatctgtaggcagtgccccatcaaggggttcaggtaccggagtctgaagcaattcaacgttgacatctgccagacctgcttcttgacaggcagggccagcaaaggcaataagctgcactaccccatcatggagtattacacaccgaccacatccagtgagaacatgagggactttgccacaaccttaaagaacaaattccgctccaagcattatttcagcaaacaccctcagcgaggttatctgcctgtgcaatcagtgctggaggctgactacagtgagacgccggcttcttccccgatgtggccacacgccgacacacactcccgaattgagcattttgccagcaggcttgctgagatggaaagtcaaaattgctccttctttaatgacagcttgtccccagatgacagcatagacgaggaccagtacctgctgcggcactccagccccatcacagaccgggagccagcctttggacagcaggctccatgcagtgtggccacagaaagcaaaggggagctacagaagatcctggcccacttggaagatgagaaccggattctccagggagagctgaggcgcctgaagtggcagcatgaggaggcagctgaggcacccagtctggctgacggctccactgaggcagcaacagaccaccgcaatgaggagcttctggccgaggcccgtatccttcggcaacataagagccgcctggagacgcgcatgcagatcctcgaagatcacaacaagcagctagagtcccagctgcagcgtctgagggagcttctcctgcagccacccaccgaatcagatggcagtggctctgcaggctcgtccctagcttcctctccacagcagtcagaaggcagtcacccccgggagaagggacagactactccagataccgaggctgcagatgatgtggggtcaaagagccaggatgtcagcctgtgcttggaggacatcatggagaaactccgtcatgccttccccagtgtgcgaagttctgatgtgactgccaacaccctgctggcctcttgatggagccagatccccatcctatagttcatagtcctctcctggttccggtcaaagcctttcctcagccttcacccaacctttccagtttccactggccccacattcctcaactagtattatttgggctctgggcagcagcagggatctggtggtatgtgaggtgcatgcgggcagtgatgggagaaggggaggcatgattcttctgaccctagaaatgttccctttaatcttcaagttcgagatcagccctttaagtacctttctgttgcagcccaggcaaatatcacttggccattcagatggggagcagagaagctgccttgcagagctaagcggtacatgttggcccctcttccttctccgtggaattatggaaagagagaagcctaattaccccaaggttccatccagcattatgaatccacagggtttacccctactctctggcgcaactcagggaggcaaaagggtatccccgagacaccttccccaccccaagtgcccctgaaaaagtctgggcagtgtgtgttctattacttcagctccaggacagattgctagccatcctaatgctacctaggtattggtttctcctcaaatatcttcattttctttagcctcagtccctgacagaccttccttaaggggagaacagttcattctggttcttctacgttatatttggaagcattaaatccatacttatgggtttagattttttttttgccccacatcttcctatttcttaaagtcctcagcattttgagagacccactgagttgcgagttgctctggaaacctggctgaagccaccctttgctcctctgagtctgtcctcacagacctgaggacacagtggcagcttgctgagcaagggagtgttgctttccttgggtaaggaagaggaagcccacctcaagtctggagtagtatgactgccatccaacacccttccaggctgtgacccttctagctctcaggctgaatcaggtgaggtggctgattgtccccagctaatcataaggcatttgcaactggctaccgtgtgtagtggcccctccataggagccacaggccacaaatcaggaagctggccactttccacccagacaacaacagcaaggccttcctgtgcctaaaattgttatttctaactctggaaggtgaatccaatcctcaaactgaactagctcttcctaggcgacatataccatgatctctttatccagaaactgttcagaatagatagtaggggtgggggagtgggcttgggaatgttgaatagattcagagcccacttaggcagctttctcccaagaggagctttataacctagagccctgcagttgacttcatttgcctaagtttatatacatacatatctattctacatatctactgtacatcagtgctctcctggcctcactcacacattaaattctaatacctcttgaagtattaatgttctgccttgctctttgttagccccagcctctggttggaaagatagatgtatcctggctgttcccctaggatatctctctccattgatgtttggggtgggctgtcctcaagaccaaagcaacagaaacctgtggtcacagagaatctaacaggaagagtcactgttctcttcactcattccaaatcttgttcccttgagacctgggccttgggtgaattttcctgggctcccctaaatggttcaggtgccaaaatagagcaaacccaagctctgcccaccccatgcagaaaaggacaaacaggcctttattagcctttgccagctaagacacagagaacattctctggtcccttccagctcttatggtctcactcagggctaaagaaagcaacagttgccaccacaatcaggagggagtgacggttggggtgttgtattataatccagcagtgggccagtgggtagaactgctaggaacctagtttgatctgctgcaggggaggcagggcagtggcttgggtccagaagcttagggttgcctcctccaccactaagtcacaggtccagggtgtcagacttcacagcataacatctgccttagtgttcatgaggtctctgggcaggagaactgggtatctggatagatggttgagcaggtggtaggcgggcatcaatcatagaacctgggcatcagtcagagtgggagcatatttgtagaagcctagattgtgggcgggaatgtgggacggagggctcaaggactttggaggcatatgcctgcctaagccttaggcgggtacatgttatggagcaattttttaccaggaaagtcctggaaaatcttttctgttatccccaccccacctgagagctcttgggctgctgagggcctgtggcaactgcagtgggccaggcatggtagaaaagatgtagatcttgttatgtaggatttgcgttgtaggtggactgaagcagcaggtcaagagttgaattctcactaaggggtcactgacattttgtggtcctgtgtttaccttaatgcctaaggtgagtgtattgttcaagggtccagggacagtcactgcagtatgtgtggggaattttcccacagtaaggtaaatggatccttgggtactatgaatccaacttggggttggatttaccaaaatgtgttgtatgttgttagacatcttgttgtgtattagtcttctaaggatattgtgcatggcactgtgtagtttatagccctacactggaaggatggtgaagggagttgctagattgatagcctaaagaaaaccttctgactgtgggattagcatcaatgataaggaatgtgagcatttgctggggttgttgtcaaatagtatcagagaacagttaggactgagaggtgatttcttcttgacagaatttgatagaggccaaaaagccattacgaggatacctctgcttccagtgacagcagagtggattcacattgattgggcattgtcacggaaggctgactagctggaggacatcaggctgtgctatgcttccctagggaggacatgtgcccttccctccagattagaaaggctagaatcaagagtttcaagtgctcattttcttcaaggtccaaggttgggaactatttccctacagagaaatctgtttgagtttctggtgctccaggaaatgggttggcaggacacagaaatgagaaaccctgaggccaggaagaggccaatcctaggagatgttttccctccagattcattttaaggaatatctgtgcttcctgatgtgtgtgcttgagatttgggctctatatccagcatttgaactcacattctcagtggcagagtcatggtctgtggcaccatttcaaggccaaaaatcccatccaatttcccttcacatagatgacagaaaagcaagaaagtagctgccttaactcgaacagttctgggaaaaaaactgggggccttgtcctgaggctgtggagacttaattcttcagctgggtggttcccgtaggaacaaggaacactttagctacttcttactcttttaacaccaatggctgtgggagaaggaaaggctcaaggccagggctcagctcgcagagtccatcttctcccacagttgccacatttgagagggggcctgctgaatgcccttgctgtcccctatggcagtattgaggcctgaccgaagtctggtatgctgcttgctggctacaagaactggtcacaggatgaaaattggggaaaggatttgggggaggtgacaagggtggcatggaagtctaggggacaaagggacagggttgggaacaaattggttaactttgattgccactcactgtggtgctttccccctttcccttgaattctgctttgaaaagaataaatttgtacttgttta

SEQ ID NO: 9154 - DNA, 7018 bp, Homo sapiens
  source 1..7018: mol_type = unassigned DNA
tgcttctcaggctcttccgctttcctcctctgcttctaatgaattgacatctccaagagccgccacatctctggtagttttacaaaactgtccttgctcttcctgcgtttgcccagtcaagggtatttttgcctgagaggcagcccagccccggcctcccagcttacagctgccgcctgcttctcagacctgacggaatcagaaggtgcttaatgatcaatagttggtgcactgcctatcctcatcccccccatgagccttggtttttatgcaacctatggtcatgcagggatgcccttacaccctcccacgatgtcatgactggcaggcagctgaccagttccatcatagcagcagcctccgaagcacctgcccccaccctcaggttagagctgctgtcaccagccctgcacctcctcaagatggtgctggggttccctgcctaagcctaaagctgttgaacgggtctgttggtgcctctggacccctggaaccaccagccatgaatctgtgttggaatgaaataaaaaagaagtctcacaacctccgcgctcgcctagaggccttctcagaccacagtggaaagcttcagctccctcttcaagagattattgactggctcagccaaaaggatgaggagttgtcagctcagctgcccctacagggggatgtggccctggtgcaacaggagaaggagacacatgcggcctttatggaagaagtcaagtctcggggcccctacatctattctgtgctggagtcagctcaggccttcctgtcccagcacccatttgaggagttagaggagcctcattctgagagcaaagatacctccccgaaacagcggatccagaatctcagccgctttgtatggaagcaggcgacggtggccagtgaactgtgggagaagttgacagcccgctgtgtggaccagcaccgtcacattgagcggactctggagcagctcttggagattcaaggggcaatggaggaactaagcactactctgagccaagctgagggagtccgagccacttgggagcccattggggatctcttcattgattcactcccagagcacatccaggctattaagctgttcaaagaagaattctcccccatgaaagatggagtaaagttggtgaatgatctggcccaccaacttgccatttctgatgtgcacttgtcaatggagaattcccaggccctggaacagatcaacgtccgatggaaacaactacaggcgtcagttagtgagaggcttaagcagctccaggatgcccaccgggactttgggcctgggtcacagcactttctctcctcctctgtccaggttccctgggaaagagcaatttcacccaataaagttccctactacatcaaccaccaggctcagaccacatgctgggaccatcccaagatgacagagttataccaaaccctagctgatctgaacaacattaagttctcagcttatcgcactgccatgaaactccgcagagtccagaaagccctgcgcttggacctggtaactttaaccacagccctggaaatcttcaatgagcatgatctgcaggccagtgagcacgtgatggatgtggtagaggtcattcactgcctgactgccttatatgaacgtttggaggaggaaagaggcatcctggtcaacgtgccactctgtgtggacatgagcctcaattggctcctcaatgtttttgatagtggtcgcagcggaaagatgcgggcattgtcttttaagactggcattgcatgcttgtgtggcacggaagtgaaggaaaaacttcagtacctcttcagccaagtggccaactcaggcagccagtgtgaccagcgccaccttggtgtcctgcttcatgaggccattcaggtgccccgtcagctgggtgaagtggcagcctttgggggcagcaatgtggagcccagtgtccgtagttgcttccgttttagcaccgggaagccagtcattgaagcatcccagttcctggagtgggtcaacctggagccccagtccatggtgtggctggctgttctgcatcgggtcaccattgctgagcaagtgaagcatcagaccaagtgctctatctgtaggcagtgccccatcaaggggttcaggtaccggagtctgaagcaattcaacgttgacatctgccagacctgcttcttgacaggcagggccagcaaaggcaataagctgcactaccccatcatggagtattacacaccgaccacatccagtgagaacatgagggactttgccacaaccttaaagaacaaattccgctccaagcattatttcagcaaacaccctcagcgaggttatctgcctgtgcaatcagtgctggaggctgactacagtgagacgccggcttcttccccgatgtggccacacgccgacacacactcccgaattgagcattttgccagcaggcttgctgagatggaaagtcaaaattgctccttctttaatgacagcttgtccccagatgacagcatagacgaggaccagtacctgctgcggcactccagccccatcacagaccgggagccagcctttggacagcaggctccatgcagtgtggccacagaaagcaaaggggagctacagaagatcctggcccacttggaagatgagaaccggattctccagggagagctgaggcgcctgaagtggcagcatgaggaggcagctgaggcacccagtctggctgacggctccactgaggcagcaacagaccaccgcaatgaggagcttctggccgaggcccgtatccttcggcaacataagagccgcctggagacgcgcatgcagatcctcgaagatcacaacaagcagctagagtcccagctgcagcgtctgagggagcttctcctgcagccacccaccgaatcagatggcagtggctctgcaggctcgtccctagcttcctctccacagcagtcagaaggcagtcacccccgggagaagggacagactactccagataccgaggctgcagatgatgtggggtcaaagagccaggatgtcagcctgtgcttggaggacatcatggagaaactccgtcatgccttccccagtgtgcgaagttctgatgtgactgccaacaccctgctggcctcttgatggagccagatccccatcctatagttcatagtcctctcctggttccggtcaaagcctttcctcagccttcacccaacctttccagtttccactggccccacattcctcaactagtattatttgggctctgggcagcagcagggatctggtggtatgtgaggtgcatgcgggcagtgatgggagaaggggaggcatgattcttctgaccctagaaatgttccctttaatcttcaagttcgagatcagccctttaagtacctttctgttgcagcccaggcaaatatcacttggccattcagatggggagcagagaagctgccttgcagagctaagcggtacatgttggcccctcttccttctccgtggaattatggaaagagagaagcctaattaccccaaggttccatccagcattatgaatccacagggtttacccctactctctggcgcaactcagggaggcaaaagggtatccccgagacaccttccccaccccaagtgcccctgaaaaagtctgggcagtgtgtgttctattacttcagctccaggacagattgctagccatcctaatgctacctaggtattggtttctcctcaaatatcttcattttctttagcctcagtccctgacagaccttccttaaggggagaacagttcattctggttcttctacgttatatttggaagcattaaatccatacttatgggtttagattttttttttgccccacatcttcctatttcttaaagtcctcagcattttgagagacccactgagttgcgagttgctctggaaacctggctgaagccaccctttgctcctctgagtctgtcctcacagacctgaggacacagtggcagcttgctgagcaagggagtgttgctttccttgggtaaggaagaggaagcccacctcaagtctggagtagtatgactgccatccaacacccttccaggctgtgacccttctagctctcaggctgaatcaggtgaggtggctgattgtccccagctaatcataaggcatttgcaactggctaccgtgtgtagtggcccctccataggagccacaggccacaaatcaggaagctggccactttccacccagacaacaacagcaaggccttcctgtgcctaaaattgttatttctaactctggaaggtgaatccaatcctcaaactgaactagctcttcctaggcgacatataccatgatctctttatccagaaactgttcagaatagatagtaggggtgggggagtgggcttgggaatgttgaatagattcagagcccacttaggcagctttctcccaagaggagctttataacctagagccctgcagttgacttcatttgcctaagtttatatacatacatatctattctacatatctactgtacatcagtgctctcctggcctcactcacacattaaattctaatacctcttgaagtattaatgttctgccttgctctttgttagccccagcctctggttggaaagatagatgtatcctggctgttcccctaggatatctctctccattgatgtttggggtgggctgtcctcaagaccaaagcaacagaaacctgtggtcacagagaatctaacaggaagagtcactgttctcttcactcattccaaatcttgttcccttgagacctgggccttgggtgaattttcctgggctcccctaaatggttcaggtgccaaaatagagcaaacccaagctctgcccaccccatgcagaaaaggacaaacaggcctttattagcctttgccagctaagacacagagaacattctctggtcccttccagctcttatggtctcactcagggctaaagaaagcaacagttgccaccacaatcaggagggagtgacggttggggtgttgtattataatccagcagtgggccagtgggtagaactgctaggaacctagtttgatctgctgcaggggaggcagggcagtggcttgggtccagaagcttagggttgcctcctccaccactaagtcacaggtccagggtgtcagacttcacagcataacatctgccttagtgttcatgaggtctctgggcaggagaactgggtatctggatagatggttgagcaggtggtaggcgggcatcaatcatagaacctgggcatcagtcagagtgggagcatatttgtagaagcctagattgtgggcgggaatgtgggacggagggctcaaggactttggaggcatatgcctgcctaagccttaggcgggtacatgttatggagcaattttttaccaggaaagtcctggaaaatcttttctgttatccccaccccacctgagagctcttgggctgctgagggcctgtggcaactgcagtgggccaggcatggtagaaaagatgtagatcttgttatgtaggatttgcgttgtaggtggactgaagcagcaggtcaagagttgaattctcactaaggggtcactgacattttgtggtcctgtgtttaccttaatgcctaaggtgagtgtattgttcaagggtccagggacagtcactgcagtatgtgtggggaattttcccacagtaaggtaaatggatccttgggtactatgaatccaacttggggttggatttaccaaaatgtgttgtatgttgttagacatcttgttgtgtattagtcttctaaggatattgtgcatggcactgtgtagtttatagccctacactggaaggatggtgaagggagttgctagattgatagcctaaagaaaaccttctgactgtgggattagcatcaatgataaggaatgtgagcatttgctggggttgttgtcaaatagtatcagagaacagttaggactgagaggtgatttcttcttgacagaatttgatagaggccaaaaagccattacgaggatacctctgcttccagtgacagcagagtggattcacattgattgggcattgtcacggaaggctgactagctggaggacatcaggctgtgctatgcttccctagggaggacatgtgcccttccctccagattagaaaggctagaatcaagagtttcaagtgctcattttcttcaaggtccaaggttgggaactatttccctacagagaaatctgtttgagtttctggtgctccaggaaatgggttggcaggacacagaaatgagaaaccctgaggccaggaagaggccaatcctaggagatgttttccctccagattcattttaaggaatatctgtgcttcctgatgtgtgtgcttgagatttgggctctatatccagcatttgaactcacattctcagtggcagagtcatggtctgtggcaccatttcaaggccaaaaatcccatccaatttcccttcacatagatgacagaaaagcaagaaagtagctgccttaactcgaacagttctgggaaaaaaactgggggccttgtcctgaggctgtggagacttaattcttcagctgggtggttcccgtaggaacaaggaacactttagctacttcttactcttttaacaccaatggctgtgggagaaggaaaggctcaaggccagggctcagctcgcagagtccatcttctcccacagttgccacatttgagagggggcctgctgaatgcccttgctgtcccctatggcagtattgaggcctgaccgaagtctggtatgctgcttgctggctacaagaactggtcacaggatgaaaattggggaaaggatttgggggaggtgacaagggtggcatggaagtctaggggacaaagggacagggttgggaacaaattggttaactttgattgccactcactgtggtgctttccccctttcccttgaattctgctttgaaaagaataaatttgtacttgttta

SEQ ID NO: 9155 - DNA, 6852 bp, Homo sapiens
  source 1..6852: mol_type = unassigned DNA
ctaggtcttgactcgaaatctctctgtattgcttttccaggtgcttaatgatcaatagttggtgcactgcctatcctcatcccccccatgagccttggtttttatgcaacctatggtcatgcagggatgcccttacaccctcccacgatgtcatgactggcaggcagctgaccagttccatcatagcagcagcctccgaagcacctgcccccaccctcaggttagagctgctgtcaccagccctgcacctcctcaagatggtgctggggttccctgcctaagcctaaagctgttgaacgggtctgttggtgcctctggacccctggaaccaccagccatgaatctgtgttggaatgaaataaaaaagaagtctcacaacctccgcgctcgcctagaggccttctcagaccacagtggaaagcttcagctccctcttcaagagattattgactggctcagccaaaaggatgaggagttgtcagctcagctgcccctacagggggatgtggccctggtgcaacaggagaaggagacacatgcggcctttatggaagaagtcaagtctcggggcccctacatctattctgtgctggagtcagctcaggccttcctgtcccagcacccatttgaggagttagaggagcctcattctgagagcaaagatacctccccgaaacagcggatccagaatctcagccgctttgtatggaagcaggcgacggtggccagtgaactgtgggagaagttgacagcccgctgtgtggaccagcaccgtcacattgagcggactctggagcagctcttggagattcaaggggcaatggaggaactaagcactactctgagccaagctgagggagtccgagccacttgggagcccattggggatctcttcattgattcactcccagagcacatccaggctattaagctgttcaaagaagaattctcccccatgaaagatggagtaaagttggtgaatgatctggcccaccaacttgccatttctgatgtgcacttgtcaatggagaattcccaggccctggaacagatcaacgtccgatggaaacaactacaggcgtcagttagtgagaggcttaagcagctccaggatgcccaccgggactttgggcctgggtcacagcactttctctcctcctctgtccaggttccctgggaaagagcaatttcacccaataaagttccctactacatcaaccaccaggctcagaccacatgctgggaccatcccaagatgacagagttataccaaaccctagctgatctgaacaacattaagttctcagcttatcgcactgccatgaaactccgcagagtccagaaagccctgcgcttggacctggtaactttaaccacagccctggaaatcttcaatgagcatgatctgcaggccagtgagcacgtgatggatgtggtagaggtcattcactgcctgactgccttatatgaacgtttggaggaggaaagaggcatcctggtcaacgtgccactctgtgtggacatgagcctcaattggctcctcaatgtttttgatagtggtcgcagcggaaagatgcgggcattgtcttttaagactggcattgcatgcttgtgtggcacggaagtgaaggaaaaacttcagtacctcttcagccaagtggccaactcaggcagccagtgtgaccagcgccaccttggtgtcctgcttcatgaggccattcaggtgccccgtcagctgggtgaagtggcagcctttgggggcagcaatgtggagcccagtgtccgtagttgcttccgttttagcaccgggaagccagtcattgaagcatcccagttcctggagtgggtcaacctggagccccagtccatggtgtggctggctgttctgcatcgggtcaccattgctgagcaagtgaagcatcagaccaagtgctctatctgtaggcagtgccccatcaaggggttcaggtaccggagtctgaagcaattcaacgttgacatctgccagacctgcttcttgacaggcagggccagcaaaggcaataagctgcactaccccatcatggagtattacacaccgaccacatccagtgagaacatgagggactttgccacaaccttaaagaacaaattccgctccaagcattatttcagcaaacaccctcagcgaggttatctgcctgtgcaatcagtgctggaggctgactacagtgagacgccggcttcttccccgatgtggccacacgccgacacacactcccgaattgagcattttgccagcaggcttgctgagatggaaagtcaaaattgctccttctttaatgacagcttgtccccagatgacagcatagacgaggaccagtacctgctgcggcactccagccccatcacagaccgggagccagcctttggacagcaggctccatgcagtgtggccacagaaagcaaaggggagctacagaagatcctggcccacttggaagatgagaaccggattctccagggagagctgaggcgcctgaagtggcagcatgaggaggcagctgaggcacccagtctggctgacggctccactgaggcagcaacagaccaccgcaatgaggagcttctggccgaggcccgtatccttcggcaacataagagccgcctggagacgcgcatgcagatcctcgaagatcacaacaagcagctagagtcccagctgcagcgtctgagggagcttctcctgcagccacccaccgaatcagatggcagtggctctgcaggctcgtccctagcttcctctccacagcagtcagaaggcagtcacccccgggagaagggacagactactccagataccgaggctgcagatgatgtggggtcaaagagccaggatgtcagcctgtgcttggaggacatcatggagaaactccgtcatgccttccccagtgtgcgaagttctgatgtgactgccaacaccctgctggcctcttgatggagccagatccccatcctatagttcatagtcctctcctggttccggtcaaagcctttcctcagccttcacccaacctttccagtttccactggccccacattcctcaactagtattatttgggctctgggcagcagcagggatctggtggtatgtgaggtgcatgcgggcagtgatgggagaaggggaggcatgattcttctgaccctagaaatgttccctttaatcttcaagttcgagatcagccctttaagtacctttctgttgcagcccaggcaaatatcacttggccattcagatggggagcagagaagctgccttgcagagctaagcggtacatgttggcccctcttccttctccgtggaattatggaaagagagaagcctaattaccccaaggttccatccagcattatgaatccacagggtttacccctactctctggcgcaactcagggaggcaaaagggtatccccgagacaccttccccaccccaagtgcccctgaaaaagtctgggcagtgtgtgttctattacttcagctccaggacagattgctagccatcctaatgctacctaggtattggtttctcctcaaatatcttcattttctttagcctcagtccctgacagaccttccttaaggggagaacagttcattctggttcttctacgttatatttggaagcattaaatccatacttatgggtttagattttttttttgccccacatcttcctatttcttaaagtcctcagcattttgagagacccactgagttgcgagttgctctggaaacctggctgaagccaccctttgctcctctgagtctgtcctcacagacctgaggacacagtggcagcttgctgagcaagggagtgttgctttccttgggtaaggaagaggaagcccacctcaagtctggagtagtatgactgccatccaacacccttccaggctgtgacccttctagctctcaggctgaatcaggtgaggtggctgattgtccccagctaatcataaggcatttgcaactggctaccgtgtgtagtggcccctccataggagccacaggccacaaatcaggaagctggccactttccacccagacaacaacagcaaggccttcctgtgcctaaaattgttatttctaactctggaaggtgaatccaatcctcaaactgaactagctcttcctaggcgacatataccatgatctctttatccagaaactgttcagaatagatagtaggggtgggggagtgggcttgggaatgttgaatagattcagagcccacttaggcagctttctcccaagaggagctttataacctagagccctgcagttgacttcatttgcctaagtttatatacatacatatctattctacatatctactgtacatcagtgctctcctggcctcactcacacattaaattctaatacctcttgaagtattaatgttctgccttgctctttgttagccccagcctctggttggaaagatagatgtatcctggctgttcccctaggatatctctctccattgatgtttggggtgggctgtcctcaagaccaaagcaacagaaacctgtggtcacagagaatctaacaggaagagtcactgttctcttcactcattccaaatcttgttcccttgagacctgggccttgggtgaattttcctgggctcccctaaatggttcaggtgccaaaatagagcaaacccaagctctgcccaccccatgcagaaaaggacaaacaggcctttattagcctttgccagctaagacacagagaacattctctggtcccttccagctcttatggtctcactcagggctaaagaaagcaacagttgccaccacaatcaggagggagtgacggttggggtgttgtattataatccagcagtgggccagtgggtagaactgctaggaacctagtttgatctgctgcaggggaggcagggcagtggcttgggtccagaagcttagggttgcctcctccaccactaagtcacaggtccagggtgtcagacttcacagcataacatctgccttagtgttcatgaggtctctgggcaggagaactgggtatctggatagatggttgagcaggtggtaggcgggcatcaatcatagaacctgggcatcagtcagagtgggagcatatttgtagaagcctagattgtgggcgggaatgtgggacggagggctcaaggactttggaggcatatgcctgcctaagccttaggcgggtacatgttatggagcaattttttaccaggaaagtcctggaaaatcttttctgttatccccaccccacctgagagctcttgggctgctgagggcctgtggcaactgcagtgggccaggcatggtagaaaagatgtagatcttgttatgtaggatttgcgttgtaggtggactgaagcagcaggtcaagagttgaattctcactaaggggtcactgacattttgtggtcctgtgtttaccttaatgcctaaggtgagtgtattgttcaagggtccagggacagtcactgcagtatgtgtggggaattttcccacagtaaggtaaatggatccttgggtactatgaatccaacttggggttggatttaccaaaatgtgttgtatgttgttagacatcttgttgtgtattagtcttctaaggatattgtgcatggcactgtgtagtttatagccctacactggaaggatggtgaagggagttgctagattgatagcctaaagaaaaccttctgactgtgggattagcatcaatgataaggaatgtgagcatttgctggggttgttgtcaaatagtatcagagaacagttaggactgagaggtgatttcttcttgacagaatttgatagaggccaaaaagccattacgaggatacctctgcttccagtgacagcagagtggattcacattgattgggcattgtcacggaaggctgactagctggaggacatcaggctgtgctatgcttccctagggaggacatgtgcccttccctccagattagaaaggctagaatcaagagtttcaagtgctcattttcttcaaggtccaaggttgggaactatttccctacagagaaatctgtttgagtttctggtgctccaggaaatgggttggcaggacacagaaatgagaaaccctgaggccaggaagaggccaatcctaggagatgttttccctccagattcattttaaggaatatctgtgcttcctgatgtgtgtgcttgagatttgggctctatatccagcatttgaactcacattctcagtggcagagtcatggtctgtggcaccatttcaaggccaaaaatcccatccaatttcccttcacatagatgacagaaaagcaagaaagtagctgccttaactcgaacagttctgggaaaaaaactgggggccttgtcctgaggctgtggagacttaattcttcagctgggtggttcccgtaggaacaaggaacactttagctacttcttactcttttaacaccaatggctgtgggagaaggaaaggctcaaggccagggctcagctcgcagagtccatcttctcccacagttgccacatttgagagggggcctgctgaatgcccttgctgtcccctatggcagtattgaggcctgaccgaagtctggtatgctgcttgctggctacaagaactggtcacaggatgaaaattggggaaaggatttgggggaggtgacaagggtggcatggaagtctaggggacaaagggacagggttgggaacaaattggttaactttgattgccactcactgtggtgctttccccctttcccttgaattctgctttgaaaagaataaatttgtacttgttt

SEQ ID NO: 9156 - DNA, 6835 bp, Homo sapiens
  source 1..6835: mol_type = unassigned DNA
tagcaacacagagcagctctgagaggggaggaggaggagaagaaggaagacagggaagtgggagagacagagggagagtgtgcatacagcagctgtcggcatccctgtctcagggacttctttgctgattcacagaggcagcccagccccggcctcccagcttacagctgccgcctgcttctcagacctgacggaatcagaaggttagagctgctgtcaccagccctgcacctcctcaagatggtgctggggttccctgcctaagcctaaagctgttgaacgggtctgttggtgcctctggacccctggaaccaccagccatgaatctgtgttggaatgaaataaaaaagaagtctcacaacctccgcgctcgcctagaggccttctcagaccacagtggaaagcttcagctccctcttcaagagattattgactggctcagccaaaaggatgaggagttgtcagctcagctgcccctacagggggatgtggccctggtgcaacaggagaaggagacacatgcggcctttatggaagaagtcaagtctcggggcccctacatctattctgtgctggagtcagctcaggccttcctgtcccagcacccatttgaggagttagaggagcctcattctgagagcaaagatacctccccgaaacagcggatccagaatctcagccgctttgtatggaagcaggcgacggtggccagtgaactgtgggagaagttgacagcccgctgtgtggaccagcaccgtcacattgagcggactctggagcagctcttggagattcaaggggcaatggaggaactaagcactactctgagccaagctgagggagtccgagccacttgggagcccattggggatctcttcattgattcactcccagagcacatccaggctattaagctgttcaaagaagaattctcccccatgaaagatggagtaaagttggtgaatgatctggcccaccaacttgccatttctgatgtgcacttgtcaatggagaattcccaggccctggaacagatcaacgtccgatggaaacaactacaggcgtcagttagtgagaggcttaagcagctccaggatgcccaccgggactttgggcctgggtcacagcactttctctcctcctctgtccaggttccctgggaaagagcaatttcacccaataaagttccctactacatcaaccaccaggctcagaccacatgctgggaccatcccaagatgacagagttataccaaaccctagctgatctgaacaacattaagttctcagcttatcgcactgccatgaaactccgcagagtccagaaagccctgcgcttggacctggtaactttaaccacagccctggaaatcttcaatgagcatgatctgcaggccagtgagcacgtgatggatgtggtagaggtcattcactgcctgactgccttatatgaacgtttggaggaggaaagaggcatcctggtcaacgtgccactctgtgtggacatgagcctcaattggctcctcaatgtttttgatagtggtcgcagcggaaagatgcgggcattgtcttttaagactggcattgcatgcttgtgtggcacggaagtgaaggaaaaacttcagtacctcttcagccaagtggccaactcaggcagccagtgtgaccagcgccaccttggtgtcctgcttcatgaggccattcaggtgccccgtcagctgggtgaagtggcagcctttgggggcagcaatgtggagcccagtgtccgtagttgcttccgttttagcaccgggaagccagtcattgaagcatcccagttcctggagtgggtcaacctggagccccagtccatggtgtggctggctgttctgcatcgggtcaccattgctgagcaagtgaagcatcagaccaagtgctctatctgtaggcagtgccccatcaaggggttcaggtaccggagtctgaagcaattcaacgttgacatctgccagacctgcttcttgacaggcagggccagcaaaggcaataagctgcactaccccatcatggagtattacacaccgaccacatccagtgagaacatgagggactttgccacaaccttaaagaacaaattccgctccaagcattatttcagcaaacaccctcagcgaggttatctgcctgtgcaatcagtgctggaggctgactacagtgagacgccggcttcttccccgatgtggccacacgccgacacacactcccgaattgagcattttgccagcaggcttgctgagatggaaagtcaaaattgctccttctttaatgacagcttgtccccagatgacagcatagacgaggaccagtacctgctgcggcactccagccccatcacagaccgggagccagcctttggacagcaggctccatgcagtgtggccacagaaagcaaaggggagctacagaagatcctggcccacttggaagatgagaaccggattctccagggagagctgaggcgcctgaagtggcagcatgaggaggcagctgaggcacccagtctggctgacggctccactgaggcagcaacagaccaccgcaatgaggagcttctggccgaggcccgtatccttcggcaacataagagccgcctggagacgcgcatgcagatcctcgaagatcacaacaagcagctagagtcccagctgcagcgtctgagggagcttctcctgcagccacccaccgaatcagatggcagtggctctgcaggctcgtccctagcttcctctccacagcagtcagaaggcagtcacccccgggagaagggacagactactccagataccgaggctgcagatgatgtggggtcaaagagccaggatgtcagcctgtgcttggaggacatcatggagaaactccgtcatgccttccccagtgtgcgaagttctgatgtgactgccaacaccctgctggcctcttgatggagccagatccccatcctatagttcatagtcctctcctggttccggtcaaagcctttcctcagccttcacccaacctttccagtttccactggccccacattcctcaactagtattatttgggctctgggcagcagcagggatctggtggtatgtgaggtgcatgcgggcagtgatgggagaaggggaggcatgattcttctgaccctagaaatgttccctttaatcttcaagttcgagatcagccctttaagtacctttctgttgcagcccaggcaaatatcacttggccattcagatggggagcagagaagctgccttgcagagctaagcggtacatgttggcccctcttccttctccgtggaattatggaaagagagaagcctaattaccccaaggttccatccagcattatgaatccacagggtttacccctactctctggcgcaactcagggaggcaaaagggtatccccgagacaccttccccaccccaagtgcccctgaaaaagtctgggcagtgtgtgttctattacttcagctccaggacagattgctagccatcctaatgctacctaggtattggtttctcctcaaatatcttcattttctttagcctcagtccctgacagaccttccttaaggggagaacagttcattctggttcttctacgttatatttggaagcattaaatccatacttatgggtttagattttttttttgccccacatcttcctatttcttaaagtcctcagcattttgagagacccactgagttgcgagttgctctggaaacctggctgaagccaccctttgctcctctgagtctgtcctcacagacctgaggacacagtggcagcttgctgagcaagggagtgttgctttccttgggtaaggaagaggaagcccacctcaagtctggagtagtatgactgccatccaacacccttccaggctgtgacccttctagctctcaggctgaatcaggtgaggtggctgattgtccccagctaatcataaggcatttgcaactggctaccgtgtgtagtggcccctccataggagccacaggccacaaatcaggaagctggccactttccacccagacaacaacagcaaggccttcctgtgcctaaaattgttatttctaactctggaaggtgaatccaatcctcaaactgaactagctcttcctaggcgacatataccatgatctctttatccagaaactgttcagaatagatagtaggggtgggggagtgggcttgggaatgttgaatagattcagagcccacttaggcagctttctcccaagaggagctttataacctagagccctgcagttgacttcatttgcctaagtttatatacatacatatctattctacatatctactgtacatcagtgctctcctggcctcactcacacattaaattctaatacctcttgaagtattaatgttctgccttgctctttgttagccccagcctctggttggaaagatagatgtatcctggctgttcccctaggatatctctctccattgatgtttggggtgggctgtcctcaagaccaaagcaacagaaacctgtggtcacagagaatctaacaggaagagtcactgttctcttcactcattccaaatcttgttcccttgagacctgggccttgggtgaattttcctgggctcccctaaatggttcaggtgccaaaatagagcaaacccaagctctgcccaccccatgcagaaaaggacaaacaggcctttattagcctttgccagctaagacacagagaacattctctggtcccttccagctcttatggtctcactcagggctaaagaaagcaacagttgccaccacaatcaggagggagtgacggttggggtgttgtattataatccagcagtgggccagtgggtagaactgctaggaacctagtttgatctgctgcaggggaggcagggcagtggcttgggtccagaagcttagggttgcctcctccaccactaagtcacaggtccagggtgtcagacttcacagcataacatctgccttagtgttcatgaggtctctgggcaggagaactgggtatctggatagatggttgagcaggtggtaggcgggcatcaatcatagaacctgggcatcagtcagagtgggagcatatttgtagaagcctagattgtgggcgggaatgtgggacggagggctcaaggactttggaggcatatgcctgcctaagccttaggcgggtacatgttatggagcaattttttaccaggaaagtcctggaaaatcttttctgttatccccaccccacctgagagctcttgggctgctgagggcctgtggcaactgcagtgggccaggcatggtagaaaagatgtagatcttgttatgtaggatttgcgttgtaggtggactgaagcagcaggtcaagagttgaattctcactaaggggtcactgacattttgtggtcctgtgtttaccttaatgcctaaggtgagtgtattgttcaagggtccagggacagtcactgcagtatgtgtggggaattttcccacagtaaggtaaatggatccttgggtactatgaatccaacttggggttggatttaccaaaatgtgttgtatgttgttagacatcttgttgtgtattagtcttctaaggatattgtgcatggcactgtgtagtttatagccctacactggaaggatggtgaagggagttgctagattgatagcctaaagaaaaccttctgactgtgggattagcatcaatgataaggaatgtgagcatttgctggggttgttgtcaaatagtatcagagaacagttaggactgagaggtgatttcttcttgacagaatttgatagaggccaaaaagccattacgaggatacctctgcttccagtgacagcagagtggattcacattgattgggcattgtcacggaaggctgactagctggaggacatcaggctgtgctatgcttccctagggaggacatgtgcccttccctccagattagaaaggctagaatcaagagtttcaagtgctcattttcttcaaggtccaaggttgggaactatttccctacagagaaatctgtttgagtttctggtgctccaggaaatgggttggcaggacacagaaatgagaaaccctgaggccaggaagaggccaatcctaggagatgttttccctccagattcattttaaggaatatctgtgcttcctgatgtgtgtgcttgagatttgggctctatatccagcatttgaactcacattctcagtggcagagtcatggtctgtggcaccatttcaaggccaaaaatcccatccaatttcccttcacatagatgacagaaaagcaagaaagtagctgccttaactcgaacagttctgggaaaaaaactgggggccttgtcctgaggctgtggagacttaattcttcagctgggtggttcccgtaggaacaaggaacactttagctacttcttactcttttaacaccaatggctgtgggagaaggaaaggctcaaggccagggctcagctcgcagagtccatcttctcccacagttgccacatttgagagggggcctgctgaatgcccttgctgtcccctatggcagtattgaggcctgaccgaagtctggtatgctgcttgctggctacaagaactggtcacaggatgaaaattggggaaaggatttgggggaggtgacaagggtggcatggaagtctaggggacaaagggacagggttgggaacaaattggttaactttgattgccactcactgtggtgctttccccctttcccttgaattctgctttgaaaagaataaatttgtacttgttt

SEQ ID NO: 9157 - DNA, 12025 bp, Homo sapiens
  source 1..12025: mol_type = unassigned DNA
cactgagcggctgcggcgcggcttccatcctcccgccctcctgacgcggccggagcgcagccctgaggcccagggagaacgacacattggatacagaagggaggtgatcatgcaccatggcactggcccccagaacgtccagcatcagctgcagaggtccagggcctgccctggcagcgagggtgaggagcagccggcccaccccaacccacccccgtcccccgcagctcccttcgctccctcagcaagcccgtcggcaccccagtctcccagttatcaaatacagcagctgatgaataggagccctgcaaccgggcagaacgtgaacatcaccctgcagagcgtgggccctgtcgtcgggggaaaccagcagatcacactggccccactgccgctccccagccccacctctccaggcttccagttcagcgctcagcctcggcggtttgagcatgggtctccatcatacattcaggtcacgtcccccttgtcccagcaggtccagacccagagtcccacgcagcccagtccggggccggggcaggccttgcagaatgtgcgtgcaggtgcccctggccctgggctgggcctctgcagcagcagccctacagggggcttcgtggatgccagcgtgctggtgaggcagatcagcttgagcccctccagtggtggacactttgtgtttcaggatgggtcagggctcacccagatcgcccagggagcccaggttcagctccagcacccgggtacgcccatcacagtccgagagcggagaccctcccagccccacacacagtcagggggcaccatccaccacctgggaccccagagccctgcagccgcgggtggggccggcctgcagcccctggccagcccaagccacatcaccacggctaacttgccaccgcagatcagcagcatcatccagggccagctggttcagcagcagcaggtgctgcaggggccgccgctgccccggcccctgggcttcgagaggacacccggcgtgctgctccccggggctgggggcgcagcggggtttgggatgacgtccccacccccgcccaccagcccttccaggactgccgtgcccccaggcctttccagcctcccactcacgtctgtggggaacacgggaatgaagaaggttcccaagaagttagaggagattcccccagcctctccggagatggcacagatgaggaagcagtgcctggactatcattaccaggagatgcaggctctgaaggaggtcttcaaggagtatttgattgaactgtttttcttgcaacactttcaagggaacatgatggatttcttagctttcaagaagaaacattatgccccattacaagcatatcttaggcagaatgatttggacattgaagaagaggaggaggaggaggaagaggaggaagaaaaatctgaggttatcaatgacgagcagcaagccctcgcagggagcctggtagcaggggccggaagcacagtagagacggacctgtttaagaggcagcaggcgatgccctccacaggtatggcagagcagtctaagaggcctcgccttgaagtgggtcaccaaggggtagttttccagcacccaggggcggacgcaggcgttcctctccagcaactaatgccgaccgcacaaggaggaatgccccccacgccgcaggccgcgcagctcgctggacagaggcagagtcagcagcagtatgacccctccacggggcctcccgtgcagaacgctgccagcttgcacaccccactgccgcagctgcccgggaggctgcccccagccggtgttcccactgcagccctctcctctgcgctgcagtttgcacagcagccgcaagtggtagaggcccagacacagctccaaatcccggtgaagactcagcagcccaatgttcccatccctgcaccgcccagcagccaactccccatccctccctcgcagcctgcacagctggccctccacgttcccacacctggaaaggtgcaggtgcaggcctctcagctttcctccctgccacagatggtagcatcgacaaggctccctgtggaccctgccccgccctgcccacggcctctgcccacctcttctacctcgtccctcgcgcctgtgagtggctccggcccaggaccctcccctgctcgatcctctccagtaaatagaccttcctcagccaccaataaggcactatctccagtcacttcccggaccccaggggtggtggcatctgcccccaccaaaccacagagtcctgctcagaatgccacctcgtcccaagacagttctcaggatacgctgacagaacaaataactctggagaaccaggtgcatcagcgcattgcggagctgaggaaagcaggtctgtggtcccagaggcgtctgccaaagctgcaggaggccccacgccccaagtcccactgggactatctgctggaggagatgcagtggatggccacagactttgcccaggagaggaggtggaaggtggctgctgcgaagaagctcgttagaactgtggtgcgccatcacgaggagaagcagctccgtgaagaaagggggaagaaggaagagcagagcagactgaggcggatagccgcctccacggcccgggagatagagtgcttttggtcgaatattgaacaggttgtggaaataaaactacgagtagaattagaagaaaaaaggaagaaggccttaaatttacagaaagtttccaggagagggaaagaattgagacctaaaggatttgacgcattacaggaaagttctctggattcaggaatgtctggaagaaaaagaaaagctagcatatctttgactgatgacgaagtggacgatgaagaggaaacaattgaagaggaggaagcaaatgaaggcgttgtggaccaccaaacagaactttctaatttagccaaggaagctgagctgcccctcctggacctgatgaagctgtacgaaggcgccttcctgccgagttctcagtggccccggccgaagcctgatggggaggacacaagcggagaggaagatgcagatgactgtccaggcgacagggagagtcgcaaggacttggttctcatcgactcgcttttcatcatggatcagttcaaagctgccgagaggatgaatatcgggaagccaaacgccaaggacattgcggacgtcactgcggtggctgaagccatcctgccgaagggcagtgctcgggtcacaacctcggtcaagtttaatgctccatctttgttgtatggggctctcagagattatcagaagattggcctggactggctggccaaactttacaggaagaatctcaatggcatattggcagatgaagctgggctgggtaaaacagtgcagatcattgctttttttgcccacctagcttgtaacgaaggtaattggggcccccatcttgttgttgtgagaagttgtaacatactcaagtgggagcttgaattgaaacgttggtgtcccggactcaaaatcctctcatatattggcagccacagagaactcaaagcaaagagacaggagtgggccgaacccaacagcttccacgtctgcatcacgtcctacactcagttcttccggggcctcaccgccttcacacgagtgcgctggaagtgcctggtcattgatgagatgcagcgcgtgaagggcatgaccgagaggcactgggaagcggttttcaccctgcagagccaacaacgtctgcttctgatcgactcgccgctgcacaataccttcctggagctctggaccatggtgcacttcctggtcccagggatctccaggccctacctgagctcccctctgagggcccccagtgaagagagccaggattactaccataaagtggtcataaggttacacagggtgacacagccatttattttgaggagaactaagagagatgtggaaaagcaactaacaaagaaatatgagcatgttttgaagtgtcgcctttctaaccgacaaaaagccttatacgaggacgttatcctgcaacctggcactcaggaggccttgaagagcgggcactttgtcaacgtcctgagcatccttgtgcggctgcagcgcatctgcaaccaccctgggctcgtcgagccccggcacccaggctcttcctacgtggcggggccactggagtatccgtccgcatctctaatcctgaaggcactggagagagatttctggaaggaagcagatctttctatgtttgatctcatcggcttagaaaataaaatcactcgtcacgaggcagagttgctgtctaagaaaaagataccgcggaaactcatggaggaaatctccacttcagcagccccagcagcccgaccagcagcagcaaagctgaaggccagcaggttgtttcagcctgtgcagtatggccagaagcccgagggtcgcaccgtggctttccccagcactcacccgccccggacggcagcccccaccacggcctctgctgctccacagggcccgcttcgaggacggccgcccatcgccacgttctctgccaatccggaggcaaaaggtggagaggtagtgaaaatagctcagctggcatccatcacaggaccacagagccgcgtggctcagccagagacgccggtgacactgcagttccagggcagcaagttcaccctgtcacacagccagctccggcagctcacagcgggccagccgctgcagctgcaaggcagcgtcctccagatcgtgtccgcccccgggcagccctaccttcgagcccctggccctgtggtgatgcagaccgtgtctcaggcgggcgctgtgcacggcgccctgggaagcaagcccccggccggcggtcccagccctgcacccttgaccccacaagttggcgttccgggccgcgtggcggtgaatgccttggctgtaggagaacccggaacggcctccaaaccagcttctcccattggagggccgacccaggaggaaaagaccagactcttgaaagagcgcctggatcagatttatttagtcaacgagcggcgctgttctcaagctccagtctatggcagagacttgctaaggatttgtgccctgcctagccatggaagggtacagtggcgtgggtccctggatggccgtcgtgggaaggaggccgggccagcgcacagttacacttcatcctcagaaagtccaagtgagctgatgttgacgctttgtcggtgtggagagtctctgcaggatgttattgacagggtggcctttgtgattcctccggtggtggcagcacccccgtccctacgggtgccgcggccgccacccctgtacagccacagaatgaggatcttgaggcagggcctgagagagcacgctgcgccgtacttccagcagctgcggcagaccacggctccacgcctgctgcagttccctgagctgaggctggtgcagttcgactcagggaagttggaagctttagctatcttgcttcagaaattgaaatctgaaggacgtcgggtgctgattttatcacagatgattcttatgttggacattttagagatgttcttgaacttccattacctcacctatgtaagaatcgatgaaaatgccagcagtgagcaacggcaggaactgatgaggagtttcaacagagacaggcggattttttgtgccattctctccactcacagccgtaccacaggtataaaccttgtagaggcggacaccgtcgtgttttatgacaatgacctgaatccagtgatggatgccaaagctcaggagtggtgcgataggatcgggagatgcaaagacatccacatatacaggcttgtgagtggcaattccattgaagagaaattgttgaaaaatggaactaaagatctgatccgagaagtggctgctcagggaaatgactactccatggctttcttaactcagcgaaccatccaggagctgtttgaagtttattctcccatggatgatgctggcttcccggtcaaagctgaggagtttgtggtgctttctcaggaaccttctgtcacggaaaccattgcacccaaaattgcaagacctttcatagaggccctcaagagtattgagtatctggaggaggatgcccagaagtccgcacaggagggggtgctgggaccacacactgatgctctgtcatcagactctgagaacatgccgtgtgatgaagaaccatcccaattagaggagctagctgacttcatggagcagcttacaccaattgaaaaatatgctttaaattacctggaattattccatacttctattgagcaagaaaaggagagaaacagtgaggacgcagtgatgactgcagtgagggcatgggagttctggaacctgaagaccctgcaggagagggaggcccggctgcggctggagcaggaggaggcggagctcctgacctacacgcgagaggatgcctacagcatggagtatgtctacgaagatgtcgatgggcagacagaagtcatgccgctctggaccccacccaccccgccgcaggacgacagcgacatctacctcgactcggtcatgtgtctcatgtatgaagccactcccatcccagaggctaagctgccccctgtgtacgtgaggaaggagcggaagcgacacaaaacagacccctcagctgcaggcaggaagaagaagcagcgtcacggggaggcggtcgtccctcctcggtccctgtttgaccgcgcaacaccaggacttctgaaaattcgcagagagggcaaggagcagaagaagaatattctgctgaagcagcaggtgccattcgccaagcccctgccaacttttgccaaacccacagctgagcctggtcaagacaaccccgagtggctcatcagtgaggactgggcgctgctgcaggctgtaaagcagttactggagctgcctttgaacctcacaatcgtgtcacctgctcacacacctaattgggatcttgtcagtgacgttgttaactcctgtagccgaatctaccgctcttccaaacagtgccggaatcgctacgagaatgtcatcattccacgagaggaggggaagagtaaaaacaaccgtcctctccgtacgagccagatctatgcccaggatgagaatgccacacacacccagctgtacacgagccactttgacttaatgaaaatgactgctggcaagaggagtcccccaatcaaacctctgcttggcatgaatccctttcagaagaaccccaagcacgcgtctgtgttggcagaaagtggaatcaactatgacaagccgctgcctcccatccaggtggcatctctccgtgcagagcgaatcgcaaaagagaaaaaggctctggctgatcagcagaaggcacagcagccggccgtggcccagccacccccgccccagccgcagcccccaccacccccgcagcagccaccgccaccgctgccacaaccacaggcagcgggcagccagccgccagcagggccaccagctgtccagccccaaccccagccacagccccagacccagccacagcctgtgcaggccccagcgaaggcgcagcccgcaatcacgacggggggcagtgcagccgtactggcaggaaccattaaaacatcagttactgggacgagcatgcccactggtgccgtgagtggaaatgtgatcgtgaacaccatcgcaggggtcccagctgccaccttccagtccatcaacaagcgcctggcgtcgccagtggctcctggggccttgactacgccgggaggctctgctcccgcccaggtggtgcacacccagcccccgccacgggcagtcggctccccagccacggcgacccctgacctggtgtccatggcaacgactcagggtgttcgagcggtcacttctgtgacagcctcggccgtggtcactaccaacctgaccccagtgcagaccccggcacggtctttggtgccccaagtgtcccaagccacaggagttcagctccctggaaaaaccatcacacctgcacatttccagcttctcaggcagcagcagcagcagcagcaacaacagcagcagcagcagcagcagcagcagcagcagcagcagcagcaacagcagcagcagcaacagacgacgacgacctctcaggtgcaagttccacagatccagggccaggcccagtccccagcacagatcaaagctgtgggcaagctgacgccggaacacctcatcaaaatgcagaagcagaaactgcagatgcccccgcagcccccaccgccacaggcccagtctgcgcccccgcagccaacagcccaagtgcaagtgcagacctcgcagccgccgcagcagcagagcccccagctcacgacggtcacggccccaaggcctggtgccctgctgacgggcaccaccgtggccaacctccaggtggcccggctcacccgggttcccacttctcagctgcaggcgcaagggcagatgcagacccaggcaccccagccagcccaggtggccttggcgaagcctccggtggtgtccgtcccggcagctgtggtctcctcaccgggagtcaccaccctgcccatgaacgtcgcggggatcagcgtggcgatcggtcagccacagaaggcagcaggacagaccgtggtggcccagcccgtgcacatgcagcagctgctgaagctgaagcagcaggccgtccagcagcagaaggccatccagccccaggctgcacagggcccggcagccgtccagcagaagatcaccgcacagcagatcaccacccctggcgcgcagcagaaggttgcctacgccgcgcagccggcccttaagacccagtttcttaccacacccatctcccaggcccagaaactggccggggcccagcaagtgcagacccagatccaggttgcaaaacttcctcaagttgttcaacagcaaacacccgtggccagcatccagcaagttgcctctgcttcccagcaggcttctccacagactgtggcgctcacgcaggcgacggcggccgggcagcaggtgcagatgatccctgcagtgaccgcgactgcccaggtggttcagcagaaactcattcagcagcaggtggtgaccacggcgtcggccccgctccagactccaggcgctcccaacccagcccaggtgcccgccagctccgacagcccaagccagcagcccaagttacagatgagggtccctgctgtcaggctaaagacacctactaagcctccgtgccagtagtcagggcagcagggctgcctctcatctaaagcaaaactaccttcctcacagaaaacgctttattagtgaaccttgggaccatgtcacgcaagagattcagcactgggaaagatataattgaaacaaaatagtgtaatcattttattaaaatgcatcccacactgcaggacaaatggtccttatggagtgccgcgttctctgtactacgtggctcatggaaaaagtgacaacatggcttcctctaaatcatttcacctttcagtccccacccgcacccgtcccctagagccatagtactgtgttctgaaagccatttagaatttctttgtgagcatgtagtgctttgcacgccacagaagccgtctgccgtgtgtgaggagcatacaatggactttctaaagataaggcgtgggcttccacagtgtctgccagagtttagttctttataccttactgaaaaatgcctcgtggtcttcgcagaggggaaggcctgtctaaagtcaatcatccgagatgggttttccattccaaagaaaggcaatatggttccttccttccctcctaaaatatgacttaacttttaagagaaatgttctgacacccacctaaacacacaaggcacgttcctggcctgtgttcaagggaaatgatcagtcattgcattgttattccaaagagcagccaacagtggcctcccccaggccctaccctgcaatgggattcgctttcatttaatggaaacttctgggactgatgcccaactcagtgcactcaagacgcatctccagttttcgggggaagctggtatttgacatagtgtgttaaacagctcctgagaacctttgggacactctgccatggctggcgtgaggcccagaggaccacgcagaggcaatggtagtacagatgtcacagctgagggtacgatgaggcctgggctcagtgagccaggacgaatgtgacagacaccccttgctgccacagtcagccctttgacgaaggtgggctggtgattctggaagtattggctatagcggtgggcccagtcaactcttccttgtggacttacgacagcagattttctctaggataagcttgtgtggttctgccagtgaagcagagaaccacctgtgctgttgtggaaggcgtgccgttgagggggaaaacgaagcccagtatttgctactgtttttcctttttttactatgacaggaaaataaatgcaattttagtggaattgattgacagtgtctccttactttgaagttttcaccaaagcaaaaaggtccatatccaatagtatcctttgtgctgtggcttgattttggcctattttacattatttggtccaggaaattaggttatattaggttttttgtatactaaaaatcagttatggcacaataaagattttctgtttttaaattgtatttcatctgcttcctccccattctctcactttaagtgacattgaggaaggtattctgtcccacaggtttctgtggacagcgatacagcaggagtcagtgaaatcaactggggagctcacttgagctcttgataagaaatgtggagaaaagtaaaaaccaagctttgaagaaacagaagaaattaatcttttagttagttgaacataccaaagcagaggactggaatctgtttgttctaaccaacccgttctccctggcttggcacgtgccgtgagagcgcagcttgccggagggagggccgctgtgtgcgcctcacatctggctcccagtggaaacttttactcctcctcatccgcagatgtgatagaactgaagtatctaggaattctgcctttgtcatttgttttaatttgtgtgccctgttcattttttttgtctttcccaaatcttggtagtctccttatagttgaagataaaatgttgagtgcacttattttagaatatcctagacataactgtctaagtaaaagcgctctattaatctaaaacactacaagagaatttaacaccatctctcaaatgcttttttggagagcttaatgggattctgaatatttgcaatgtggagtttccgccccgatctcacgtcagtgagggtctcctgtctctcaagtgtgtttcctttggctgttccctaatacaaaacacggacatatttttactcgtagcactcaatttagtaacttctagatgctaccgttgacctgagttaaattcatttagtcgtgtacgtaaaaactctccttttagtgtgttattttcttggccttcccttttaaaggttaaagtttctaacctaagaattaagtacgcgttcaggaagctgttgtctaggccttccccttgtgaatctgggttcattccaatacggcaagtaagagttggaaactttgagaacacagactataaaggcagcagcccgaacactgtcagactctaattggcgaccctgggaaacagttgccctgctattctttaaagaaagacgtttattctgatgataaaaacagttagccagactgtttttaaagcacctggcgggaagcagaaggttggatccaagcccttgttcagatttggtgcctgataagacaggggtttctctttttgtgacctttattattattattttgttaactgttgtaaccagttagctgttgtgttttaagatagaaaggaacaagactaaaattgtaaatactttgtaaacatcagcatttgtacttgaatagtaggattttaaagggcattgatagcataccaaacaaaaggcaaaataaagtgacctttttatata

SEQ ID NO: 9158 - DNA, 12157 bp, Homo sapiens
  source 1..12157: mol_type = unassigned DNA
cactgagcggctgcggcgcggcttccatcctcccgccctcctgacgcggccggagcgcagccctgaggcccagggagaacgacacattggatacagaagggaggtgatcatgcaccatggcactggcccccagaacgtccagcatcagctgcagaggtccagggcctgccctggcagcgagggtgaggagcagccggcccaccccaacccacccccgtcccccgcagctcccttcgctccctcagcaagcccgtcggcaccccagtctcccagttatcaaatacagcagctgatgaataggagccctgcaaccgggcagaacgtgaacatcaccctgcagagcgtgggccctgtcgtcgggggaaaccagcagatcacactggccccactgccgctccccagccccacctctccaggcttccagttcagcgctcagcctcggcggtttgagcatgggtctccatcatacattcaggtcacgtcccccttgtcccagcaggtccagacccagagtcccacgcagcccagtccggggccggggcaggccttgcagaatgtgcgtgcaggtgcccctggccctgggctgggcctctgcagcagcagccctacagggggcttcgtggatgccagcgtgctggtgaggcagatcagcttgagcccctccagtggtggacactttgtgtttcaggatgggtcagggctcacccagatcgcccagggagcccaggttcagctccagcacccgggtacgcccatcacagtccgagagcggagaccctcccagccccacacacagtcagggggcaccatccaccacctgggaccccagagccctgcagccgcgggtggggccggcctgcagcccctggccagcccaagccacatcaccacggctaacttgccaccgcagatcagcagcatcatccagggccagctggttcagcagcagcaggtgctgcaggggccgccgctgccccggcccctgggcttcgagaggacacccggcgtgctgctccccggggctgggggcgcagcggggtttgggatgacgtccccacccccgcccaccagcccttccaggactgccgtgcccccaggcctttccagcctcccactcacgtctgtggggaacacgggaatgaagaaggttcccaagaagttagaggagattcccccagcctctccggagatggcacagatgaggaagcagtgcctggactatcattaccaggagatgcaggctctgaaggaggtcttcaaggagtatttgattgaactgtttttcttgcaacactttcaagggaacatgatggatttcttagctttcaagaagaaacattatgccccattacaagcatatcttaggcagaatgatttggacattgaagaagaggaggaggaggaggaagaggaggaagaaaaatctgaggttatcaatgacgagcaagccctcgcagggagcctggtagcaggggccggaagcacagtagagacggacctgtttaagaggcagcaggcgatgccctccacaggtatggcaggaggaatgccccccacgccgcaggccgcgcagctcgctggacagaggcagagtcagcagcagtatgacccctccacggggcctcccgtgcagaacgctgccagcttgcacaccccactgccgcagctgcccgggaggctgcccccagccggtgttcccactgcagccctctcctctgcgctgcagtttgcacagcagccgcaagtggtagaggcccagacacagctccaaatcccggtgaagactcagcagcccaatgttcccatccctgcaccgcccagcagccaactccccatccctccctcgcagcctgcacagctggccctccacgttcccacacctggaaaggtgcaggtgcaggcctctcagctttcctccctgccacagatggtagcatcgacaaggctccctgtggaccctgccccgccctgcccacggcctctgcccacctcttctacctcgtccctcgcgcctgtgagtggctccggcccaggaccctcccctgctcgatcctctccagtaaatagaccttcctcagccaccaataaggcactatctccagtcacttcccggaccccaggggtggtggcatctgcccccaccaaaccacagagtcctgctcagaatgccacctcgtcccaagacagttctcaggatacgctgacagaacaaataactctggagaaccaggtgcatcagcgcattgcggagctgaggaaagcaggtctgtggtcccagaggcgtctgccaaagctgcaggaggccccacgccccaagtcccactgggactatctgctggaggagatgcagtggatggccacagactttgcccaggagaggaggtggaaggtggctgctgcgaagaagctcgttagaactgtggtgcgccatcacgaggagaagcagctccgtgaagaaagggggaagaaggaagagcagagcagactgaggcggatagccgcctccacggcccgggagatagagtgcttttggtcgaatattgaacaggttgtggaaataaaactacgagtagaattagaagaaaaaaggaagaaggccttaaatttacagaaagtttccaggagagggaaagaattgagacctaaaggatttgacgcattacaggaaagttctctggattcaggaatgtctggaagaaaaagaaaagctagcatatctttgactgatgacgaagtggacgatgaagaggaaacaattgaagaggaggaagcaaatgaaggcgttgtggaccaccaaacagaactttctaatttagccaaggaagctgagctgcccctcctggacctgatgaagctgtacgaaggcgccttcctgccgagttctcagtggccccggccgaagcctgatggggaggacacaagcggagaggaagatgcagatgactgtccaggcgacagggagagtcgcaaggacttggttctcatcgactcgcttttcatcatggatcagttcaaagctgccgagaggatgaatatcgggaagccaaacgccaaggacattgcggacgtcactgcggtggctgaagccatcctgccgaagggcagtgctcgggtcacaacctcggtcaagtttaatgctccatctttgttgtatggggctctcagagattatcagaagattggcctggactggctggccaaactttacaggaagaatctcaatggcatattggcagatgaagctgggctgggtaaaacagtgcagatcattgctttttttgcccacctagcttgtaacgaaggtaattggggcccccatcttgttgttgtgagaagttgtaacatactcaagtgggagcttgaattgaaacgttggtgtcccggactcaaaatcctctcatatattggcagccacagagaactcaaagcaaagagacaggagtgggccgaacccaacagcttccacgtctgcatcacgtcctacactcagttcttccggggcctcaccgccttcacacgagtgcgctggaagtgcctggtcattgatgagatgcagcgcgtgaagggcatgaccgagaggcactgggaagcggttttcaccctgcagagccaacaacgtctgcttctgatcgactcgccgctgcacaataccttcctggagctctggaccatggtgcacttcctggtcccagggatctccaggccctacctgagctcccctctgagggcccccagtgaagagagccaggattactaccataaagtggtcataaggttacacagggtgacacagccatttattttgaggagaactaagagagatgtggaaaagcaactaacaaagaaatatgagcatgttttgaagtgtcgcctttctaaccgacaaaaagccttatacgaggacgttatcctgcaacctggcactcaggaggccttgaagagcgggcactttgtcaacgtcctgagcatccttgtgcggctgcagcgcatctgcaaccaccctgggctcgtcgagccccggcacccaggctcttcctacgtggcggggccactggagtatccgtccgcatctctaatcctgaaggcactggagagagatttctggaaggaagcagatctttctatgtttgatctcatcggcttagaaaataaaatcactcgtcacgaggcagagttgctgtctaagaaaaagataccgcggaaactcatggaggaaatctccacttcagcagccccagcagcccgaccagcagcagcaaagctgaaggccagcaggttgtttcagcctgtgcagtatggccagaagcccgagggtcgcaccgtggctttccccagcactcacccgccccggacggcagcccccaccacggcctctgctgctccacagggcccgcttcgaggacggccgcccatcgccacgttctctgccaatccggaggcaaaagcagcagcagccccgtttcagacctctcaggcttccgccagtgctccacgacaccagcccgcctcggcctccagcacagccgctagcccggcccatcctgcgaaactgcgggcccagaccacagcacaggcctccaccccaggccagcccccgccccagccccaggccccctcgcacgcggccgggcagagcgcgctgcctcagaggctggtgctcccctcgcaggcccaggcccgcttgcccagtggagaggtagtgaaaatagctcagctggcatccatcacaggaccacagagccgcgtggctcagccagagacgccggtgacactgcagttccagggcagcaagttcaccctgtcacacagccagctccggcagctcacagcgggccagccgctgcagctgcaaggcagcgtcctccagatcgtgtccgcccccgggcagccctaccttcgagcccctggccctgtggtgatgcagaccgtgtctcaggcgggcgctgtgcacggcgccctgggaagcaagcccccggccggcggtcccagccctgcacccttgaccccacaagttggcgttccgggccgcgtggcggtgaatgccttggctgtaggagaacccggaacggcctccaaaccagcttctcccattggagggccgacccaggaggaaaagaccagactcttgaaagagcgcctggatcagatttatttagtcaacgagcggcgctgttctcaagctccagtctatggcagagacttgctaaggatttgtgccctgcctagccatggaagggtacagtggcgtgggtccctggatggccgtcgtgggaaggaggccgggccagcgcacagttacacttcatcctcagaaagtccaagtgagctgatgttgacgctttgtcggtgtggagagtctctgcaggatgttattgacagggtggcctttgtgattcctccggtggtggcagcacccccgtccctacgggtgccgcggccgccacccctgtacagccacagaatgaggatcttgaggcagggcctgagagagcacgctgcgccgtacttccagcagctgcggcagaccacggctccacgcctgctgcagttccctgagctgaggctggtgcagttcgactcagggaagttggaagctttagctatcttgcttcagaaattgaaatctgaaggacgtcgggtgctgattttatcacagatgattcttatgttggacattttagagatgttcttgaacttccattacctcacctatgtaagaatcgatgaaaatgccagcagtgagcaacggcaggaactgatgaggagtttcaacagagacaggcggattttttgtgccattctctccactcacagccgtaccacaggtataaaccttgtagaggcggacaccgtcgtgttttatgacaatgacctgaatccagtgatggatgccaaagctcaggagtggtgcgataggatcgggagatgcaaagacatccacatatacaggcttgtgagtggcaattccattgaagagaaattgttgaaaaatggaactaaagatctgatccgagaagtggctgctcagggaaatgactactccatggctttcttaactcagcgaaccatccaggagctgtttgaagtttattctcccatggatgatgctggcttcccggtcaaagctgaggagtttgtggtgctttctcaggaaccttctgtcacggaaaccattgcacccaaaattgcaagacctttcatagaggccctcaagagtattgagtatctggaggaggatgcccagaagtccgcacaggagggggtgctgggaccacacactgatgctctgtcatcagactctgagaacatgccgtgtgatgaagaaccatcccaattagaggagctagctgacttcatggagcagcttacaccaattgaaaaatatgctttaaattacctggaattattccatacttctattgagcaagaaaaggagagaaacagtgaggacgcagtgatgactgcagtgagggcatgggagttctggaacctgaagaccctgcaggagagggaggcccggctgcggctggagcaggaggaggcggagctcctgacctacacgcgagaggatgcctacagcatggagtatgtctacgaagatgtcgatgggcagacagaagtcatgccgctctggaccccacccaccccgccgcaggacgacagcgacatctacctcgactcggtcatgtgtctcatgtatgaagccactcccatcccagaggctaagctgccccctgtgtacgtgaggaaggagcggaagcgacacaaaacagacccctcagctgcaggcaggaagaagaagcagcgtcacggggaggcggtcgtccctcctcggtccctgtttgaccgcgcaacaccaggacttctgaaaattcgcagagagggcaaggagcagaagaagaatattctgctgaagcagcaggtgccattcgccaagcccctgccaacttttgccaaacccacagctgagcctggtcaagacaaccccgagtggctcatcagtgaggactgggcgctgctgcaggctgtaaagcagttactggagctgcctttgaacctcacaatcgtgtcacctgctcacacacctaattgggatcttgtcagtgacgttgttaactcctgtagccgaatctaccgctcttccaaacagtgccggaatcgctacgagaatgtcatcattccacgagaggaggggaagagtaaaaacaaccgtcctctccgtacgagccagatctatgcccaggatgagaatgccacacacacccagctgtacacgagccactttgacttaatgaaaatgactgctggcaagaggagtcccccaatcaaacctctgcttggcatgaatccctttcagaagaaccccaagcacgcgtctgtgttggcagaaagtggaatcaactatgacaagccgctgcctcccatccaggtggcatctctccgtgcagagcgaatcgcaaaagagaaaaaggctctggctgatcagcagaaggcacagcagccggccgtggcccagccacccccgccccagccgcagcccccaccacccccgcagcagccaccgccaccgctgccacaaccacaggcagcgggcagccagccgccagcagggccaccagctgtccagccccaaccccagccacagccccagacccagccacagcctgtgcaggccccagcgaaggcgcagcccgcaatcacgacggggggcagtgcagccgtactggcaggaaccattaaaacatcagttactgggacgagcatgcccactggtgccgtgagtggaaatgtgatcgtgaacaccatcgcaggggtcccagctgccaccttccagtccatcaacaagcgcctggcgtcgccagtggctcctggggccttgactacgccgggaggctctgctcccgcccaggtggtgcacacccagcccccgccacgggcagtcggctccccagccacggcgacccctgacctggtgtccatggcaacgactcagggtgttcgagcggtcacttctgtgacagcctcggccgtggtcactaccaacctgaccccagtgcagaccccggcacggtctttggtgccccaagtgtcccaagccacaggagttcagctccctggaaaaaccatcacacctgcacatttccagcttctcaggcagcagcagcagcagcagcaacaacagcagcagcagcagcagcagcagcagcagcagcagcagcagcaacagcagcagcagcaacagacgacgacgacctctcaggtgcaagttccacagatccagggccaggcccagtccccagcacagatcaaagctgtgggcaagctgacgccggaacacctcatcaaaatgcagaagcagaaactgcagatgcccccgcagcccccaccgccacaggcccagtctgcgcccccgcagccaacagcccaagtgcaagtgcagacctcgcagccgccgcagcagcagagcccccagctcacgacggtcacggccccaaggcctggtgccctgctgacgggcaccaccgtggccaacctccaggtggcccggctcacccgggttcccacttctcagctgcaggcgcaagggcagatgcagacccaggcaccccagccagcccaggtggccttggcgaagcctccggtggtgtccgtcccggcagctgtggtctcctcaccgggagtcaccaccctgcccatgaacgtcgcggggatcagcgtggcgatcggtcagccacagaaggcagcaggacagaccgtggtggcccagcccgtgcacatgcagcagctgctgaagctgaagcagcaggccgtccagcagcagaaggccatccagccccaggctgcacagggcccggcagccgtccagcagaagatcaccgcacagcagatcaccacccctggcgcgcagcagaaggttgcctacgccgcgcagccggcccttaagacccagtttcttaccacacccatctcccaggcccagaaactggccggggcccagcaagtgcagacccagatccaggttgcaaaacttcctcaagttgttcaacagcaaacacccgtggccagcatccagcaagttgcctctgcttcccagcaggcttctccacagactgtggcgctcacgcaggcgacggcggccgggcagcaggtgcagatgatccctgcagtgaccgcgactgcccaggtggttcagcagaaactcattcagcagcaggtggtgaccacggcgtcggccccgctccagactccaggcgctcccaacccagcccaggtgcccgccagctccgacagcccaagccagcagcccaagttacagatgagggtccctgctgtcaggctaaagacacctactaagcctccgtgccagtagtcagggcagcagggctgcctctcatctaaagcaaaactaccttcctcacagaaaacgctttattagtgaaccttgggaccatgtcacgcaagagattcagcactgggaaagatataattgaaacaaaatagtgtaatcattttattaaaatgcatcccacactgcaggacaaatggtccttatggagtgccgcgttctctgtactacgtggctcatggaaaaagtgacaacatggcttcctctaaatcatttcacctttcagtccccacccgcacccgtcccctagagccatagtactgtgttctgaaagccatttagaatttctttgtgagcatgtagtgctttgcacgccacagaagccgtctgccgtgtgtgaggagcatacaatggactttctaaagataaggcgtgggcttccacagtgtctgccagagtttagttctttataccttactgaaaaatgcctcgtggtcttcgcagaggggaaggcctgtctaaagtcaatcatccgagatgggttttccattccaaagaaaggcaatatggttccttccttccctcctaaaatatgacttaacttttaagagaaatgttctgacacccacctaaacacacaaggcacgttcctggcctgtgttcaagggaaatgatcagtcattgcattgttattccaaagagcagccaacagtggcctcccccaggccctaccctgcaatgggattcgctttcatttaatggaaacttctgggactgatgcccaactcagtgcactcaagacgcatctccagttttcgggggaagctggtatttgacatagtgtgttaaacagctcctgagaacctttgggacactctgccatggctggcgtgaggcccagaggaccacgcagaggcaatggtagtacagatgtcacagctgagggtacgatgaggcctgggctcagtgagccaggacgaatgtgacagacaccccttgctgccacagtcagccctttgacgaaggtgggctggtgattctggaagtattggctatagcggtgggcccagtcaactcttccttgtggacttacgacagcagattttctctaggataagcttgtgtggttctgccagtgaagcagagaaccacctgtgctgttgtggaaggcgtgccgttgagggggaaaacgaagcccagtatttgctactgtttttcctttttttactatgacaggaaaataaatgcaattttagtggaattgattgacagtgtctccttactttgaagttttcaccaaagcaaaaaggtccatatccaatagtatcctttgtgctgtggcttgattttggcctattttacattatttggtccaggaaattaggttatattaggttttttgtatactaaaaatcagttatggcacaataaagattttctgtttttaaattgtatttcatctgcttcctccccattctctcactttaagtgacattgaggaaggtattctgtcccacaggtttctgtggacagcgatacagcaggagtcagtgaaatcaactggggagctcacttgagctcttgataagaaatgtggagaaaagtaaaaaccaagctttgaagaaacagaagaaattaatcttttagttagttgaacataccaaagcagaggactggaatctgtttgttctaaccaacccgttctccctggcttggcacgtgccgtgagagcgcagcttgccggagggagggccgctgtgtgcgcctcacatctggctcccagtggaaacttttactcctcctcatccgcagatgtgatagaactgaagtatctaggaattctgcctttgtcatttgttttaatttgtgtgccctgttcattttttttgtctttcccaaatcttggtagtctccttatagttgaagataaaatgttgagtgcacttattttagaatatcctagacataactgtctaagtaaaagcgctctattaatctaaaacactacaagagaatttaacaccatctctcaaatgcttttttggagagcttaatgggattctgaatatttgcaatgtggagtttccgccccgatctcacgtcagtgagggtctcctgtctctcaagtgtgtttcctttggctgttccctaatacaaaacacggacatatttttactcgtagcactcaatttagtaacttctagatgctaccgttgacctgagttaaattcatttagtcgtgtacgtaaaaactctccttttagtgtgttattttcttggccttcccttttaaaggttaaagtttctaacctaagaattaagtacgcgttcaggaagctgttgtctaggccttccccttgtgaatctgggttcattccaatacggcaagtaagagttggaaactttgagaacacagactataaaggcagcagcccgaacactgtcagactctaattggcgaccctgggaaacagttgccctgctattctttaaagaaagacgtttattctgatgataaaaacagttagccagactgtttttaaagcacctggcgggaagcagaaggttggatccaagcccttgttcagatttggtgcctgataagacaggggtttctctttttgtgacctttattattattattttgttaactgttgtaaccagttagctgttgtgttttaagatagaaaggaacaagactaaaattgtaaatactttgtaaacatcagcatttgtacttgaatagtaggattttaaagggcattgatagcataccaaacaaaaggcaaaataaagtgacctttttatata

SEQ ID NO: 9159 - DNA, 12376 bp, Homo sapiens
  source 1..12376: mol_type = unassigned DNA
cactgagcggctgcggcgcggcttccatcctcccgccctcctgacgcggccggagcgcagccctgaggcccagggagaacgacacattggatacagaagggaggtgatcatgcaccatggcactggcccccagaacgtccagcatcagctgcagaggtccagggcctgccctggcagcgagggtgaggagcagccggcccaccccaacccacccccgtcccccgcagctcccttcgctccctcagcaagcccgtcggcaccccagtctcccagttatcaaatacagcagctgatgaataggagccctgcaaccgggcagaacgtgaacatcaccctgcagagcgtgggccctgtcgtcgggggaaaccagcagatcacactggccccactgccgctccccagccccacctctccaggcttccagttcagcgctcagcctcggcggtttgagcatgggtctccatcatacattcaggtcacgtcccccttgtcccagcaggtccagacccagagtcccacgcagcccagtccggggccggggcaggccttgcagaatgtgcgtgcaggtgcccctggccctgggctgggcctctgcagcagcagccctacagggggcttcgtggatgccagcgtgctggtgaggcagatcagcttgagcccctccagtggtggacactttgtgtttcaggatgggtcagggctcacccagatcgcccagggagcccaggttcagctccagcacccgggtacgcccatcacagtccgagagcggagaccctcccagccccacacacagtcagggggcaccatccaccacctgggaccccagagccctgcagccgcgggtggggccggcctgcagcccctggccagcccaagccacatcaccacggctaacttgccaccgcagatcagcagcatcatccagggccagctggttcagcagcagcaggtgctgcaggggccgccgctgccccggcccctgggcttcgagaggacacccggcgtgctgctccccggggctgggggcgcagcggggtttgggatgacgtccccacccccgcccaccagcccttccaggactgccgtgcccccaggcctttccagcctcccactcacgtctgtggggaacacgggaatgaagaaggttcccaagaagttagaggagattcccccagcctctccggagatggcacagatgaggaagcagtgcctggactatcattaccaggagatgcaggctctgaaggaggtcttcaaggagtatttgattgaactgtttttcttgcaacactttcaagggaacatgatggatttcttagctttcaagaagaaacattatgccccattacaagcatatcttaggcagaatgatttggacattgaagaagaggaggaggaggaggaagaggaggaagaaaaatctgaggttatcaatgacgaggtaaaggttgtgacaggaaaggatgggcagactgggactcccgttgctatagcaacccagcttccgccaaaggtttctgctgctttttcatcccagcagcaaccatttcagcaagccctcgcagggagcctggtagcaggggccggaagcacagtagagacggacctgtttaagaggcagcaggcgatgccctccacaggtatggcagagcagtctaagaggcctcgccttgaagtgggtcaccaaggggtagttttccagcacccaggggcggacgcaggcgttcctctccagcaactaatgccgaccgcacaaggaggaatgccccccacgccgcaggccgcgcagctcgctggacagaggcagagtcagcagcagtatgacccctccacggggcctcccgtgcagaacgctgccagcttgcacaccccactgccgcagctgcccgggaggctgcccccagccggtgttcccactgcagccctctcctctgcgctgcagtttgcacagcagccgcaagtggtagaggcccagacacagctccaaatcccggtgaagactcagcagcccaatgttcccatccctgcaccgcccagcagccaactccccatccctccctcgcagcctgcacagctggccctccacgttcccacacctggaaaggtgcaggtgcaggcctctcagctttcctccctgccacagatggtagcatcgacaaggctccctgtggaccctgccccgccctgcccacggcctctgcccacctcttctacctcgtccctcgcgcctgtgagtggctccggcccaggaccctcccctgctcgatcctctccagtaaatagaccttcctcagccaccaataaggcactatctccagtcacttcccggaccccaggggtggtggcatctgcccccaccaaaccacagagtcctgctcagaatgccacctcgtcccaagacagttctcaggatacgctgacagaacaaataactctggagaaccaggtgcatcagcgcattgcggagctgaggaaagcaggtctgtggtcccagaggcgtctgccaaagctgcaggaggccccacgccccaagtcccactgggactatctgctggaggagatgcagtggatggccacagactttgcccaggagaggaggtggaaggtggctgctgcgaagaagctcgttagaactgtggtgcgccatcacgaggagaagcagctccgtgaagaaagggggaagaaggaagagcagagcagactgaggcggatagccgcctccacggcccgggagatagagtgcttttggtcgaatattgaacaggttgtggaaataaaactacgagtagaattagaagaaaaaaggaagaaggccttaaatttacagaaagtttccaggagagggaaagaattgagacctaaaggatttgacgcattacaggaaagttctctggattcaggaatgtctggaagaaaaagaaaagctagcatatctttgactgatgacgaagtggacgatgaagaggaaacaattgaagaggaggaagcaaatgaaggcgttgtggaccaccaaacagaactttctaatttagccaaggaagctgagctgcccctcctggacctgatgaagctgtacgaaggcgccttcctgccgagttctcagtggccccggccgaagcctgatggggaggacacaagcggagaggaagatgcagatgactgtccaggcgacagggagagtcgcaaggacttggttctcatcgactcgcttttcatcatggatcagttcaaagctgccgagaggatgaatatcgggaagccaaacgccaaggacattgcggacgtcactgcggtggctgaagccatcctgccgaagggcagtgctcgggtcacaacctcggtcaagtttaatgctccatctttgttgtatggggctctcagagattatcagaagattggcctggactggctggccaaactttacaggaagaatctcaatggcatattggcagatgaagctgggctgggtaaaacagtgcagatcattgctttttttgcccacctagcttgtaacgaaggtaattggggcccccatcttgttgttgtgagaagttgtaacatactcaagtgggagcttgaattgaaacgttggtgtcccggactcaaaatcctctcatatattggcagccacagagaactcaaagcaaagagacaggagtgggccgaacccaacagcttccacgtctgcatcacgtcctacactcagttcttccggggcctcaccgccttcacacgagtgcgctggaagtgcctggtcattgatgagatgcagcgcgtgaagggcatgaccgagaggcactgggaagcggttttcaccctgcagagccaacaacgtctgcttctgatcgactcgccgctgcacaataccttcctggagctctggaccatggtgcacttcctggtcccagggatctccaggccctacctgagctcccctctgagggcccccagtgaagagagccaggattactaccataaagtggtcataaggttacacagggtgacacagccatttattttgaggagaactaagagagatgtggaaaagcaactaacaaagaaatatgagcatgttttgaagtgtcgcctttctaaccgacaaaaagccttatacgaggacgttatcctgcaacctggcactcaggaggccttgaagagcgggcactttgtcaacgtcctgagcatccttgtgcggctgcagcgcatctgcaaccaccctgggctcgtcgagccccggcacccaggctcttcctacgtggcggggccactggagtatccgtccgcatctctaatcctgaaggcactggagagagatttctggaaggaagcagatctttctatgtttgatctcatcggcttagaaaataaaatcactcgtcacgaggcagagttgctgtctaagaaaaagataccgcggaaactcatggaggaaatctccacttcagcagccccagcagcccgaccagcagcagcaaagctgaaggccagcaggttgtttcagcctgtgcagtatggccagaagcccgagggtcgcaccgtggctttccccagcactcacccgccccggacggcagcccccaccacggcctctgctgctccacagggcccgcttcgaggacggccgcccatcgccacgttctctgccaatccggaggcaaaagcagcagcagccccgtttcagacctctcaggcttccgccagtgctccacgacaccagcccgcctcggcctccagcacagccgctagcccggcccatcctgcgaaactgcgggcccagaccacagcacaggcctccaccccaggccagcccccgccccagccccaggccccctcgcacgcggccgggcagagcgcgctgcctcagaggctggtgctcccctcgcaggcccaggcccgcttgcccagtggagaggtagtgaaaatagctcagctggcatccatcacaggaccacagagccgcgtggctcagccagagacgccggtgacactgcagttccagggcagcaagttcaccctgtcacacagccagctccggcagctcacagcgggccagccgctgcagctgcaaggcagcgtcctccagatcgtgtccgcccccgggcagccctaccttcgagcccctggccctgtggtgatgcagaccgtgtctcaggcgggcgctgtgcacggcgccctgggaagcaagcccccggccggcggtcccagccctgcacccttgaccccacaagttggcgttccgggccgcgtggcggtgaatgccttggctgtaggagaacccggaacggcctccaaaccagcttctcccattggagggccgacccaggaggaaaagaccagactcttgaaagagcgcctggatcagatttatttagtcaacgagcggcgctgttctcaagctccagtctatggcagagacttgctaaggatttgtgccctgcctagccatggaagggtacagtggcgtgggtccctggatggccgtcgtgggaaggaggccgggccagcgcacagttacacttcatcctcagaaagtccaagtgagctgatgttgacgctttgtcggtgtggagagtctctgcaggatgttattgacagggtggcctttgtgattcctccggtggtggcagcacccccgtccctacgggtgccgcggccgccacccctgtacagccacagaatgaggatcttgaggcagggcctgagagagcacgctgcgccgtacttccagcagctgcggcagaccacggctccacgcctgctgcagttccctgagctgaggctggtgcagttcgactcagggaagttggaagctttagctatcttgcttcagaaattgaaatctgaaggacgtcgggtgctgattttatcacagatgattcttatgttggacattttagagatgttcttgaacttccattacctcacctatgtaagaatcgatgaaaatgccagcagtgagcaacggcaggaactgatgaggagtttcaacagagacaggcggattttttgtgccattctctccactcacagccgtaccacaggtataaaccttgtagaggcggacaccgtcgtgttttatgacaatgacctgaatccagtgatggatgccaaagctcaggagtggtgcgataggatcgggagatgcaaagacatccacatatacaggcttgtgagtggcaattccattgaagagaaattgttgaaaaatggaactaaagatctgatccgagaagtggctgctcagggaaatgactactccatggctttcttaactcagcgaaccatccaggagctgtttgaagtttattctcccatggatgatgctggcttcccggtcaaagctgaggagtttgtggtgctttctcaggaaccttctgtcacggaaaccattgcacccaaaattgcaagacctttcatagaggccctcaagagtattgagtatctggaggaggatgcccagaagtccgcacaggagggggtgctgggaccacacactgatgctctgtcatcagactctgagaacatgccgtgtgatgaagaaccatcccaattagaggagctagctgacttcatggagcagcttacaccaattgaaaaatatgctttaaattacctggaattattccatacttctattgagcaagaaaaggagagaaacagtgaggacgcagtgatgactgcagtgagggcatgggagttctggaacctgaagaccctgcaggagagggaggcccggctgcggctggagcaggaggaggcggagctcctgacctacacgcgagaggatgcctacagcatggagtatgtctacgaagatgtcgatgggcagacagaagtcatgccgctctggaccccacccaccccgccgcaggacgacagcgacatctacctcgactcggtcatgtgtctcatgtatgaagccactcccatcccagaggctaagctgccccctgtgtacgtgaggaaggagcggaagcgacacaaaacagacccctcagctgcaggcaggaagaagaagcagcgtcacggggaggcggtcgtccctcctcggtccctgtttgaccgcgcaacaccaggacttctgaaaattcgcagagagggcaaggagcagaagaagaatattctgctgaagcagcaggtgccattcgccaagcccctgccaacttttgccaaacccacagctgagcctggtcaagacaaccccgagtggctcatcagtgaggactgggcgctgctgcaggctgtaaagcagttactggagctgcctttgaacctcacaatcgtgtcacctgctcacacacctaattgggatcttgtcagtgacgttgttaactcctgtagccgaatctaccgctcttccaaacagtgccggaatcgctacgagaatgtcatcattccacgagaggaggggaagagtaaaaacaaccgtcctctccgtacgagccagatctatgcccaggatgagaatgccacacacacccagctgtacacgagccactttgacttaatgaaaatgactgctggcaagaggagtcccccaatcaaacctctgcttggcatgaatccctttcagaagaaccccaagcacgcgtctgtgttggcagaaagtggaatcaactatgacaagccgctgcctcccatccaggtggcatctctccgtgcagagcgaatcgcaaaagagaaaaaggctctggctgatcagcagaaggcacagcagccggccgtggcccagccacccccgccccagccgcagcccccaccacccccgcagcagccaccgccaccgctgccacaaccacaggcagcgggcagccagccgccagcagggccaccagctgtccagccccaaccccagccacagccccagacccagccacagcctgtgcaggccccagcgaaggcgcagcccgcaatcacgacggggggcagtgcagccgtactggcaggaaccattaaaacatcagttactgggacgagcatgcccactggtgccgtgagtggaaatgtgatcgtgaacaccatcgcaggggtcccagctgccaccttccagtccatcaacaagcgcctggcgtcgccagtggctcctggggccttgactacgccgggaggctctgctcccgcccaggtggtgcacacccagcccccgccacgggcagtcggctccccagccacggcgacccctgacctggtgtccatggcaacgactcagggtgttcgagcggtcacttctgtgacagcctcggccgtggtcactaccaacctgaccccagtgcagaccccggcacggtctttggtgccccaagtgtcccaagccacaggagttcagctccctggaaaaaccatcacacctgcacatttccagcttctcaggcagcagcagcagcagcagcaacaacagcagcagcagcagcagcagcagcagcagcagcagcagcagcaacagcagcagcagcaacagacgacgacgacctctcaggtgcaagttccacagatccagggccaggcccagtccccagcacagatcaaagctgtgggcaagctgacgccggaacacctcatcaaaatgcagaagcagaaactgcagatgcccccgcagcccccaccgccacaggcccagtctgcgcccccgcagccaacagcccaagtgcaagtgcagacctcgcagccgccgcagcagcagagcccccagctcacgacggtcacggccccaaggcctggtgccctgctgacgggcaccaccgtggccaacctccaggtggcccggctcacccgggttcccacttctcagctgcaggcgcaagggcagatgcagacccaggcaccccagccagcccaggtggccttggcgaagcctccggtggtgtccgtcccggcagctgtggtctcctcaccgggagtcaccaccctgcccatgaacgtcgcggggatcagcgtggcgatcggtcagccacagaaggcagcaggacagaccgtggtggcccagcccgtgcacatgcagcagctgctgaagctgaagcagcaggccgtccagcagcagaaggccatccagccccaggctgcacagggcccggcagccgtccagcagaagatcaccgcacagcagatcaccacccctggcgcgcagcagaaggttgcctacgccgcgcagccggcccttaagacccagtttcttaccacacccatctcccaggcccagaaactggccggggcccagcaagtgcagacccagatccaggttgcaaaacttcctcaagttgttcaacagcaaacacccgtggccagcatccagcaagttgcctctgcttcccagcaggcttctccacagactgtggcgctcacgcaggcgacggcggccgggcagcaggtgcagatgatccctgcagtgaccgcgactgcccaggtggttcagcagaaactcattcagcagcaggtggtgaccacggcgtcggccccgctccagactccaggcgctcccaacccagcccaggtgcccgccagctccgacagcccaagccagcagcccaagttacagatgagggtccctgctgtcaggctaaagacacctactaagcctccgtgccagtagtcagggcagcagggctgcctctcatctaaagcaaaactaccttcctcacagaaaacgctttattagtgaaccttgggaccatgtcacgcaagagattcagcactgggaaagatataattgaaacaaaatagtgtaatcattttattaaaatgcatcccacactgcaggacaaatggtccttatggagtgccgcgttctctgtactacgtggctcatggaaaaagtgacaacatggcttcctctaaatcatttcacctttcagtccccacccgcacccgtcccctagagccatagtactgtgttctgaaagccatttagaatttctttgtgagcatgtagtgctttgcacgccacagaagccgtctgccgtgtgtgaggagcatacaatggactttctaaagataaggcgtgggcttccacagtgtctgccagagtttagttctttataccttactgaaaaatgcctcgtggtcttcgcagaggggaaggcctgtctaaagtcaatcatccgagatgggttttccattccaaagaaaggcaatatggttccttccttccctcctaaaatatgacttaacttttaagagaaatgttctgacacccacctaaacacacaaggcacgttcctggcctgtgttcaagggaaatgatcagtcattgcattgttattccaaagagcagccaacagtggcctcccccaggccctaccctgcaatgggattcgctttcatttaatggaaacttctgggactgatgcccaactcagtgcactcaagacgcatctccagttttcgggggaagctggtatttgacatagtgtgttaaacagctcctgagaacctttgggacactctgccatggctggcgtgaggcccagaggaccacgcagaggcaatggtagtacagatgtcacagctgagggtacgatgaggcctgggctcagtgagccaggacgaatgtgacagacaccccttgctgccacagtcagccctttgacgaaggtgggctggtgattctggaagtattggctatagcggtgggcccagtcaactcttccttgtggacttacgacagcagattttctctaggataagcttgtgtggttctgccagtgaagcagagaaccacctgtgctgttgtggaaggcgtgccgttgagggggaaaacgaagcccagtatttgctactgtttttcctttttttactatgacaggaaaataaatgcaattttagtggaattgattgacagtgtctccttactttgaagttttcaccaaagcaaaaaggtccatatccaatagtatcctttgtgctgtggcttgattttggcctattttacattatttggtccaggaaattaggttatattaggttttttgtatactaaaaatcagttatggcacaataaagattttctgtttttaaattgtatttcatctgcttcctccccattctctcactttaagtgacattgaggaaggtattctgtcccacaggtttctgtggacagcgatacagcaggagtcagtgaaatcaactggggagctcacttgagctcttgataagaaatgtggagaaaagtaaaaaccaagctttgaagaaacagaagaaattaatcttttagttagttgaacataccaaagcagaggactggaatctgtttgttctaaccaacccgttctccctggcttggcacgtgccgtgagagcgcagcttgccggagggagggccgctgtgtgcgcctcacatctggctcccagtggaaacttttactcctcctcatccgcagatgtgatagaactgaagtatctaggaattctgcctttgtcatttgttttaatttgtgtgccctgttcattttttttgtctttcccaaatcttggtagtctccttatagttgaagataaaatgttgagtgcacttattttagaatatcctagacataactgtctaagtaaaagcgctctattaatctaaaacactacaagagaatttaacaccatctctcaaatgcttttttggagagcttaatgggattctgaatatttgcaatgtggagtttccgccccgatctcacgtcagtgagggtctcctgtctctcaagtgtgtttcctttggctgttccctaatacaaaacacggacatatttttactcgtagcactcaatttagtaacttctagatgctaccgttgacctgagttaaattcatttagtcgtgtacgtaaaaactctccttttagtgtgttattttcttggccttcccttttaaaggttaaagtttctaacctaagaattaagtacgcgttcaggaagctgttgtctaggccttccccttgtgaatctgggttcattccaatacggcaagtaagagttggaaactttgagaacacagactataaaggcagcagcccgaacactgtcagactctaattggcgaccctgggaaacagttgccctgctattctttaaagaaagacgtttattctgatgataaaaacagttagccagactgtttttaaagcacctggcgggaagcagaaggttggatccaagcccttgttcagatttggtgcctgataagacaggggtttctctttttgtgacctttattattattattttgttaactgttgtaaccagttagctgttgtgttttaagatagaaaggaacaagactaaaattgtaaatactttgtaaacatcagcatttgtacttgaatagtaggattttaaagggcattgatagcataccaaacaaaaggcaaaataaagtgacctttttatata

SEQ ID NO: 9160 - DNA, 12268 bp, Homo sapiens
  source 1..12268: mol_type = unassigned DNA
cactgagcggctgcggcgcggcttccatcctcccgccctcctgacgcggccggagcgcagccctgaggcccagggagaacgacacattggatacagaagggaggtgatcatgcaccatggcactggcccccagaacgtccagcatcagctgcagaggtccagggcctgccctggcagcgagggtgaggagcagccggcccaccccaacccacccccgtcccccgcagctcccttcgctccctcagcaagcccgtcggcaccccagtctcccagttatcaaatacagcagctgatgaataggagccctgcaaccgggcagaacgtgaacatcaccctgcagagcgtgggccctgtcgtcgggggaaaccagcagatcacactggccccactgccgctccccagccccacctctccaggcttccagttcagcgctcagcctcggcggtttgagcatgggtctccatcatacattcaggtcacgtcccccttgtcccagcaggtccagacccagagtcccacgcagcccagtccggggccggggcaggccttgcagaatgtgcgtgcaggtgcccctggccctgggctgggcctctgcagcagcagccctacagggggcttcgtggatgccagcgtgctggtgaggcagatcagcttgagcccctccagtggtggacactttgtgtttcaggatgggtcagggctcacccagatcgcccagggagcccaggttcagctccagcacccgggtacgcccatcacagtccgagagcggagaccctcccagccccacacacagtcagggggcaccatccaccacctgggaccccagagccctgcagccgcgggtggggccggcctgcagcccctggccagcccaagccacatcaccacggctaacttgccaccgcagatcagcagcatcatccagggccagctggttcagcagcagcaggtgctgcaggggccgccgctgccccggcccctgggcttcgagaggacacccggcgtgctgctccccggggctgggggcgcagcggggtttgggatgacgtccccacccccgcccaccagcccttccaggactgccgtgcccccaggcctttccagcctcccactcacgtctgtggggaacacgggaatgaagaaggttcccaagaagttagaggagattcccccagcctctccggagatggcacagatgaggaagcagtgcctggactatcattaccaggagatgcaggctctgaaggaggtcttcaaggagtatttgattgaactgtttttcttgcaacactttcaagggaacatgatggatttcttagctttcaagaagaaacattatgccccattacaagcatatcttaggcagaatgatttggacattgaagaagaggaggaggaggaggaagaggaggaagaaaaatctgaggttatcaatgacgagcagcaagccctcgcagggagcctggtagcaggggccggaagcacagtagagacggacctgtttaagaggcagcaggcgatgccctccacaggtatggcagagcagtctaagaggcctcgccttgaagtgggtcaccaaggggtagttttccagcacccaggggcggacgcaggcgttcctctccagcaactaatgccgaccgcacaaggaggaatgccccccacgccgcaggccgcgcagctcgctggacagaggcagagtcagcagcagtatgacccctccacggggcctcccgtgcagaacgctgccagcttgcacaccccactgccgcagctgcccgggaggctgcccccagccggtgttcccactgcagccctctcctctgcgctgcagtttgcacagcagccgcaagtggtagaggcccagacacagctccaaatcccggtgaagactcagcagcccaatgttcccatccctgcaccgcccagcagccaactccccatccctccctcgcagcctgcacagctggccctccacgttcccacacctggaaaggtgcaggtgcaggcctctcagctttcctccctgccacagatggtagcatcgacaaggctccctgtggaccctgccccgccctgcccacggcctctgcccacctcttctacctcgtccctcgcgcctgtgagtggctccggcccaggaccctcccctgctcgatcctctccagtaaatagaccttcctcagccaccaataaggcactatctccagtcacttcccggaccccaggggtggtggcatctgcccccaccaaaccacagagtcctgctcagaatgccacctcgtcccaagacagttctcaggatacgctgacagaacaaataactctggagaaccaggtgcatcagcgcattgcggagctgaggaaagcaggtctgtggtcccagaggcgtctgccaaagctgcaggaggccccacgccccaagtcccactgggactatctgctggaggagatgcagtggatggccacagactttgcccaggagaggaggtggaaggtggctgctgcgaagaagctcgttagaactgtggtgcgccatcacgaggagaagcagctccgtgaagaaagggggaagaaggaagagcagagcagactgaggcggatagccgcctccacggcccgggagatagagtgcttttggtcgaatattgaacaggttgtggaaataaaactacgagtagaattagaagaaaaaaggaagaaggccttaaatttacagaaagtttccaggagagggaaagaattgagacctaaaggatttgacgcattacaggaaagttctctggattcaggaatgtctggaagaaaaagaaaagctagcatatctttgactgatgacgaagtggacgatgaagaggaaacaattgaagaggaggaagcaaatgaaggcgttgtggaccaccaaacagaactttctaatttagccaaggaagctgagctgcccctcctggacctgatgaagctgtacgaaggcgccttcctgccgagttctcagtggccccggccgaagcctgatggggaggacacaagcggagaggaagatgcagatgactgtccaggcgacagggagagtcgcaaggacttggttctcatcgactcgcttttcatcatggatcagttcaaagctgccgagaggatgaatatcgggaagccaaacgccaaggacattgcggacgtcactgcggtggctgaagccatcctgccgaagggcagtgctcgggtcacaacctcggtcaagtttaatgctccatctttgttgtatggggctctcagagattatcagaagattggcctggactggctggccaaactttacaggaagaatctcaatggcatattggcagatgaagctgggctgggtaaaacagtgcagatcattgctttttttgcccacctagcttgtaacgaaggtaattggggcccccatcttgttgttgtgagaagttgtaacatactcaagtgggagcttgaattgaaacgttggtgtcccggactcaaaatcctctcatatattggcagccacagagaactcaaagcaaagagacaggagtgggccgaacccaacagcttccacgtctgcatcacgtcctacactcagttcttccggggcctcaccgccttcacacgagtgcgctggaagtgcctggtcattgatgagatgcagcgcgtgaagggcatgaccgagaggcactgggaagcggttttcaccctgcagagccaacaacgtctgcttctgatcgactcgccgctgcacaataccttcctggagctctggaccatggtgcacttcctggtcccagggatctccaggccctacctgagctcccctctgagggcccccagtgaagagagccaggattactaccataaagtggtcataaggttacacagggtgacacagccatttattttgaggagaactaagagagatgtggaaaagcaactaacaaagaaatatgagcatgttttgaagtgtcgcctttctaaccgacaaaaagccttatacgaggacgttatcctgcaacctggcactcaggaggccttgaagagcgggcactttgtcaacgtcctgagcatccttgtgcggctgcagcgcatctgcaaccaccctgggctcgtcgagccccggcacccaggctcttcctacgtggcggggccactggagtatccgtccgcatctctaatcctgaaggcactggagagagatttctggaaggaagcagatctttctatgtttgatctcatcggcttagaaaataaaatcactcgtcacgaggcagagttgctgtctaagaaaaagataccgcggaaactcatggaggaaatctccacttcagcagccccagcagcccgaccagcagcagcaaagctgaaggccagcaggttgtttcagcctgtgcagtatggccagaagcccgagggtcgcaccgtggctttccccagcactcacccgccccggacggcagcccccaccacggcctctgctgctccacagggcccgcttcgaggacggccgcccatcgccacgttctctgccaatccggaggcaaaagcagcagcagccccgtttcagacctctcaggcttccgccagtgctccacgacaccagcccgcctcggcctccagcacagccgctagcccggcccatcctgcgaaactgcgggcccagaccacagcacaggcctccaccccaggccagcccccgccccagccccaggccccctcgcacgcggccgggcagagcgcgctgcctcagaggctggtgctcccctcgcaggcccaggcccgcttgcccagtggagaggtagtgaaaatagctcagctggcatccatcacaggaccacagagccgcgtggctcagccagagacgccggtgacactgcagttccagggcagcaagttcaccctgtcacacagccagctccggcagctcacagcgggccagccgctgcagctgcaaggcagcgtcctccagatcgtgtccgcccccgggcagccctaccttcgagcccctggccctgtggtgatgcagaccgtgtctcaggcgggcgctgtgcacggcgccctgggaagcaagcccccggccggcggtcccagccctgcacccttgaccccacaagttggcgttccgggccgcgtggcggtgaatgccttggctgtaggagaacccggaacggcctccaaaccagcttctcccattggagggccgacccaggaggaaaagaccagactcttgaaagagcgcctggatcagatttatttagtcaacgagcggcgctgttctcaagctccagtctatggcagagacttgctaaggatttgtgccctgcctagccatggaagggtacagtggcgtgggtccctggatggccgtcgtgggaaggaggccgggccagcgcacagttacacttcatcctcagaaagtccaagtgagctgatgttgacgctttgtcggtgtggagagtctctgcaggatgttattgacagggtggcctttgtgattcctccggtggtggcagcacccccgtccctacgggtgccgcggccgccacccctgtacagccacagaatgaggatcttgaggcagggcctgagagagcacgctgcgccgtacttccagcagctgcggcagaccacggctccacgcctgctgcagttccctgagctgaggctggtgcagttcgactcagggaagttggaagctttagctatcttgcttcagaaattgaaatctgaaggacgtcgggtgctgattttatcacagatgattcttatgttggacattttagagatgttcttgaacttccattacctcacctatgtaagaatcgatgaaaatgccagcagtgagcaacggcaggaactgatgaggagtttcaacagagacaggcggattttttgtgccattctctccactcacagccgtaccacaggtataaaccttgtagaggcggacaccgtcgtgttttatgacaatgacctgaatccagtgatggatgccaaagctcaggagtggtgcgataggatcgggagatgcaaagacatccacatatacaggcttgtgagtggcaattccattgaagagaaattgttgaaaaatggaactaaagatctgatccgagaagtggctgctcagggaaatgactactccatggctttcttaactcagcgaaccatccaggagctgtttgaagtttattctcccatggatgatgctggcttcccggtcaaagctgaggagtttgtggtgctttctcaggaaccttctgtcacggaaaccattgcacccaaaattgcaagacctttcatagaggccctcaagagtattgagtatctggaggaggatgcccagaagtccgcacaggagggggtgctgggaccacacactgatgctctgtcatcagactctgagaacatgccgtgtgatgaagaaccatcccaattagaggagctagctgacttcatggagcagcttacaccaattgaaaaatatgctttaaattacctggaattattccatacttctattgagcaagaaaaggagagaaacagtgaggacgcagtgatgactgcagtgagggcatgggagttctggaacctgaagaccctgcaggagagggaggcccggctgcggctggagcaggaggaggcggagctcctgacctacacgcgagaggatgcctacagcatggagtatgtctacgaagatgtcgatgggcagacagaagtcatgccgctctggaccccacccaccccgccgcaggacgacagcgacatctacctcgactcggtcatgtgtctcatgtatgaagccactcccatcccagaggctaagctgccccctgtgtacgtgaggaaggagcggaagcgacacaaaacagacccctcagctgcaggcaggaagaagaagcagcgtcacggggaggcggtcgtccctcctcggtccctgtttgaccgcgcaacaccaggacttctgaaaattcgcagagagggcaaggagcagaagaagaatattctgctgaagcagcaggtgccattcgccaagcccctgccaacttttgccaaacccacagctgagcctggtcaagacaaccccgagtggctcatcagtgaggactgggcgctgctgcaggctgtaaagcagttactggagctgcctttgaacctcacaatcgtgtcacctgctcacacacctaattgggatcttgtcagtgacgttgttaactcctgtagccgaatctaccgctcttccaaacagtgccggaatcgctacgagaatgtcatcattccacgagaggaggggaagagtaaaaacaaccgtcctctccgtacgagccagatctatgcccaggatgagaatgccacacacacccagctgtacacgagccactttgacttaatgaaaatgactgctggcaagaggagtcccccaatcaaacctctgcttggcatgaatccctttcagaagaaccccaagcacgcgtctgtgttggcagaaagtggaatcaactatgacaagccgctgcctcccatccaggtggcatctctccgtgcagagcgaatcgcaaaagagaaaaaggctctggctgatcagcagaaggcacagcagccggccgtggcccagccacccccgccccagccgcagcccccaccacccccgcagcagccaccgccaccgctgccacaaccacaggcagcgggcagccagccgccagcagggccaccagctgtccagccccaaccccagccacagccccagacccagccacagcctgtgcaggccccagcgaaggcgcagcccgcaatcacgacggggggcagtgcagccgtactggcaggaaccattaaaacatcagttactgggacgagcatgcccactggtgccgtgagtggaaatgtgatcgtgaacaccatcgcaggggtcccagctgccaccttccagtccatcaacaagcgcctggcgtcgccagtggctcctggggccttgactacgccgggaggctctgctcccgcccaggtggtgcacacccagcccccgccacgggcagtcggctccccagccacggcgacccctgacctggtgtccatggcaacgactcagggtgttcgagcggtcacttctgtgacagcctcggccgtggtcactaccaacctgaccccagtgcagaccccggcacggtctttggtgccccaagtgtcccaagccacaggagttcagctccctggaaaaaccatcacacctgcacatttccagcttctcaggcagcagcagcagcagcagcaacaacagcagcagcagcagcagcagcagcagcagcagcagcagcagcaacagcagcagcagcaacagacgacgacgacctctcaggtgcaagttccacagatccagggccaggcccagtccccagcacagatcaaagctgtgggcaagctgacgccggaacacctcatcaaaatgcagaagcagaaactgcagatgcccccgcagcccccaccgccacaggcccagtctgcgcccccgcagccaacagcccaagtgcaagtgcagacctcgcagccgccgcagcagcagagcccccagctcacgacggtcacggccccaaggcctggtgccctgctgacgggcaccaccgtggccaacctccaggtggcccggctcacccgggttcccacttctcagctgcaggcgcaagggcagatgcagacccaggcaccccagccagcccaggtggccttggcgaagcctccggtggtgtccgtcccggcagctgtggtctcctcaccgggagtcaccaccctgcccatgaacgtcgcggggatcagcgtggcgatcggtcagccacagaaggcagcaggacagaccgtggtggcccagcccgtgcacatgcagcagctgctgaagctgaagcagcaggccgtccagcagcagaaggccatccagccccaggctgcacagggcccggcagccgtccagcagaagatcaccgcacagcagatcaccacccctggcgcgcagcagaaggttgcctacgccgcgcagccggcccttaagacccagtttcttaccacacccatctcccaggcccagaaactggccggggcccagcaagtgcagacccagatccaggttgcaaaacttcctcaagttgttcaacagcaaacacccgtggccagcatccagcaagttgcctctgcttcccagcaggcttctccacagactgtggcgctcacgcaggcgacggcggccgggcagcaggtgcagatgatccctgcagtgaccgcgactgcccaggtggttcagcagaaactcattcagcagcaggtggtgaccacggcgtcggccccgctccagactccaggcgctcccaacccagcccaggtgcccgccagctccgacagcccaagccagcagcccaagttacagatgagggtccctgctgtcaggctaaagacacctactaagcctccgtgccagtagtcagggcagcagggctgcctctcatctaaagcaaaactaccttcctcacagaaaacgctttattagtgaaccttgggaccatgtcacgcaagagattcagcactgggaaagatataattgaaacaaaatagtgtaatcattttattaaaatgcatcccacactgcaggacaaatggtccttatggagtgccgcgttctctgtactacgtggctcatggaaaaagtgacaacatggcttcctctaaatcatttcacctttcagtccccacccgcacccgtcccctagagccatagtactgtgttctgaaagccatttagaatttctttgtgagcatgtagtgctttgcacgccacagaagccgtctgccgtgtgtgaggagcatacaatggactttctaaagataaggcgtgggcttccacagtgtctgccagagtttagttctttataccttactgaaaaatgcctcgtggtcttcgcagaggggaaggcctgtctaaagtcaatcatccgagatgggttttccattccaaagaaaggcaatatggttccttccttccctcctaaaatatgacttaacttttaagagaaatgttctgacacccacctaaacacacaaggcacgttcctggcctgtgttcaagggaaatgatcagtcattgcattgttattccaaagagcagccaacagtggcctcccccaggccctaccctgcaatgggattcgctttcatttaatggaaacttctgggactgatgcccaactcagtgcactcaagacgcatctccagttttcgggggaagctggtatttgacatagtgtgttaaacagctcctgagaacctttgggacactctgccatggctggcgtgaggcccagaggaccacgcagaggcaatggtagtacagatgtcacagctgagggtacgatgaggcctgggctcagtgagccaggacgaatgtgacagacaccccttgctgccacagtcagccctttgacgaaggtgggctggtgattctggaagtattggctatagcggtgggcccagtcaactcttccttgtggacttacgacagcagattttctctaggataagcttgtgtggttctgccagtgaagcagagaaccacctgtgctgttgtggaaggcgtgccgttgagggggaaaacgaagcccagtatttgctactgtttttcctttttttactatgacaggaaaataaatgcaattttagtggaattgattgacagtgtctccttactttgaagttttcaccaaagcaaaaaggtccatatccaatagtatcctttgtgctgtggcttgattttggcctattttacattatttggtccaggaaattaggttatattaggttttttgtatactaaaaatcagttatggcacaataaagattttctgtttttaaattgtatttcatctgcttcctccccattctctcactttaagtgacattgaggaaggtattctgtcccacaggtttctgtggacagcgatacagcaggagtcagtgaaatcaactggggagctcacttgagctcttgataagaaatgtggagaaaagtaaaaaccaagctttgaagaaacagaagaaattaatcttttagttagttgaacataccaaagcagaggactggaatctgtttgttctaaccaacccgttctccctggcttggcacgtgccgtgagagcgcagcttgccggagggagggccgctgtgtgcgcctcacatctggctcccagtggaaacttttactcctcctcatccgcagatgtgatagaactgaagtatctaggaattctgcctttgtcatttgttttaatttgtgtgccctgttcattttttttgtctttcccaaatcttggtagtctccttatagttgaagataaaatgttgagtgcacttattttagaatatcctagacataactgtctaagtaaaagcgctctattaatctaaaacactacaagagaatttaacaccatctctcaaatgcttttttggagagcttaatgggattctgaatatttgcaatgtggagtttccgccccgatctcacgtcagtgagggtctcctgtctctcaagtgtgtttcctttggctgttccctaatacaaaacacggacatatttttactcgtagcactcaatttagtaacttctagatgctaccgttgacctgagttaaattcatttagtcgtgtacgtaaaaactctccttttagtgtgttattttcttggccttcccttttaaaggttaaagtttctaacctaagaattaagtacgcgttcaggaagctgttgtctaggccttccccttgtgaatctgggttcattccaatacggcaagtaagagttggaaactttgagaacacagactataaaggcagcagcccgaacactgtcagactctaattggcgaccctgggaaacagttgccctgctattctttaaagaaagacgtttattctgatgataaaaacagttagccagactgtttttaaagcacctggcgggaagcagaaggttggatccaagcccttgttcagatttggtgcctgataagacaggggtttctctttttgtgacctttattattattattttgttaactgttgtaaccagttagctgttgtgttttaagatagaaaggaacaagactaaaattgtaaatactttgtaaacatcagcatttgtacttgaatagtaggattttaaagggcattgatagcataccaaacaaaaggcaaaataaagtgacctttttatata

SEQ ID NO: 9161 - DNA, 12265 bp, Homo sapiens
  source 1..12265: mol_type = unassigned DNA
cactgagcggctgcggcgcggcttccatcctcccgccctcctgacgcggccggagcgcagccctgaggcccagggagaacgacacattggatacagaagggaggtgatcatgcaccatggcactggcccccagaacgtccagcatcagctgcagaggtccagggcctgccctggcagcgagggtgaggagcagccggcccaccccaacccacccccgtcccccgcagctcccttcgctccctcagcaagcccgtcggcaccccagtctcccagttatcaaatacagcagctgatgaataggagccctgcaaccgggcagaacgtgaacatcaccctgcagagcgtgggccctgtcgtcgggggaaaccagcagatcacactggccccactgccgctccccagccccacctctccaggcttccagttcagcgctcagcctcggcggtttgagcatgggtctccatcatacattcaggtcacgtcccccttgtcccagcaggtccagacccagagtcccacgcagcccagtccggggccggggcaggccttgcagaatgtgcgtgcaggtgcccctggccctgggctgggcctctgcagcagcagccctacagggggcttcgtggatgccagcgtgctggtgaggcagatcagcttgagcccctccagtggtggacactttgtgtttcaggatgggtcagggctcacccagatcgcccagggagcccaggttcagctccagcacccgggtacgcccatcacagtccgagagcggagaccctcccagccccacacacagtcagggggcaccatccaccacctgggaccccagagccctgcagccgcgggtggggccggcctgcagcccctggccagcccaagccacatcaccacggctaacttgccaccgcagatcagcagcatcatccagggccagctggttcagcagcagcaggtgctgcaggggccgccgctgccccggcccctgggcttcgagaggacacccggcgtgctgctccccggggctgggggcgcagcggggtttgggatgacgtccccacccccgcccaccagcccttccaggactgccgtgcccccaggcctttccagcctcccactcacgtctgtggggaacacgggaatgaagaaggttcccaagaagttagaggagattcccccagcctctccggagatggcacagatgaggaagcagtgcctggactatcattaccaggagatgcaggctctgaaggaggtcttcaaggagtatttgattgaactgtttttcttgcaacactttcaagggaacatgatggatttcttagctttcaagaagaaacattatgccccattacaagcatatcttaggcagaatgatttggacattgaagaagaggaggaggaggaggaagaggaggaagaaaaatctgaggttatcaatgacgagcaagccctcgcagggagcctggtagcaggggccggaagcacagtagagacggacctgtttaagaggcagcaggcgatgccctccacaggtatggcagagcagtctaagaggcctcgccttgaagtgggtcaccaaggggtagttttccagcacccaggggcggacgcaggcgttcctctccagcaactaatgccgaccgcacaaggaggaatgccccccacgccgcaggccgcgcagctcgctggacagaggcagagtcagcagcagtatgacccctccacggggcctcccgtgcagaacgctgccagcttgcacaccccactgccgcagctgcccgggaggctgcccccagccggtgttcccactgcagccctctcctctgcgctgcagtttgcacagcagccgcaagtggtagaggcccagacacagctccaaatcccggtgaagactcagcagcccaatgttcccatccctgcaccgcccagcagccaactccccatccctccctcgcagcctgcacagctggccctccacgttcccacacctggaaaggtgcaggtgcaggcctctcagctttcctccctgccacagatggtagcatcgacaaggctccctgtggaccctgccccgccctgcccacggcctctgcccacctcttctacctcgtccctcgcgcctgtgagtggctccggcccaggaccctcccctgctcgatcctctccagtaaatagaccttcctcagccaccaataaggcactatctccagtcacttcccggaccccaggggtggtggcatctgcccccaccaaaccacagagtcctgctcagaatgccacctcgtcccaagacagttctcaggatacgctgacagaacaaataactctggagaaccaggtgcatcagcgcattgcggagctgaggaaagcaggtctgtggtcccagaggcgtctgccaaagctgcaggaggccccacgccccaagtcccactgggactatctgctggaggagatgcagtggatggccacagactttgcccaggagaggaggtggaaggtggctgctgcgaagaagctcgttagaactgtggtgcgccatcacgaggagaagcagctccgtgaagaaagggggaagaaggaagagcagagcagactgaggcggatagccgcctccacggcccgggagatagagtgcttttggtcgaatattgaacaggttgtggaaataaaactacgagtagaattagaagaaaaaaggaagaaggccttaaatttacagaaagtttccaggagagggaaagaattgagacctaaaggatttgacgcattacaggaaagttctctggattcaggaatgtctggaagaaaaagaaaagctagcatatctttgactgatgacgaagtggacgatgaagaggaaacaattgaagaggaggaagcaaatgaaggcgttgtggaccaccaaacagaactttctaatttagccaaggaagctgagctgcccctcctggacctgatgaagctgtacgaaggcgccttcctgccgagttctcagtggccccggccgaagcctgatggggaggacacaagcggagaggaagatgcagatgactgtccaggcgacagggagagtcgcaaggacttggttctcatcgactcgcttttcatcatggatcagttcaaagctgccgagaggatgaatatcgggaagccaaacgccaaggacattgcggacgtcactgcggtggctgaagccatcctgccgaagggcagtgctcgggtcacaacctcggtcaagtttaatgctccatctttgttgtatggggctctcagagattatcagaagattggcctggactggctggccaaactttacaggaagaatctcaatggcatattggcagatgaagctgggctgggtaaaacagtgcagatcattgctttttttgcccacctagcttgtaacgaaggtaattggggcccccatcttgttgttgtgagaagttgtaacatactcaagtgggagcttgaattgaaacgttggtgtcccggactcaaaatcctctcatatattggcagccacagagaactcaaagcaaagagacaggagtgggccgaacccaacagcttccacgtctgcatcacgtcctacactcagttcttccggggcctcaccgccttcacacgagtgcgctggaagtgcctggtcattgatgagatgcagcgcgtgaagggcatgaccgagaggcactgggaagcggttttcaccctgcagagccaacaacgtctgcttctgatcgactcgccgctgcacaataccttcctggagctctggaccatggtgcacttcctggtcccagggatctccaggccctacctgagctcccctctgagggcccccagtgaagagagccaggattactaccataaagtggtcataaggttacacagggtgacacagccatttattttgaggagaactaagagagatgtggaaaagcaactaacaaagaaatatgagcatgttttgaagtgtcgcctttctaaccgacaaaaagccttatacgaggacgttatcctgcaacctggcactcaggaggccttgaagagcgggcactttgtcaacgtcctgagcatccttgtgcggctgcagcgcatctgcaaccaccctgggctcgtcgagccccggcacccaggctcttcctacgtggcggggccactggagtatccgtccgcatctctaatcctgaaggcactggagagagatttctggaaggaagcagatctttctatgtttgatctcatcggcttagaaaataaaatcactcgtcacgaggcagagttgctgtctaagaaaaagataccgcggaaactcatggaggaaatctccacttcagcagccccagcagcccgaccagcagcagcaaagctgaaggccagcaggttgtttcagcctgtgcagtatggccagaagcccgagggtcgcaccgtggctttccccagcactcacccgccccggacggcagcccccaccacggcctctgctgctccacagggcccgcttcgaggacggccgcccatcgccacgttctctgccaatccggaggcaaaagcagcagcagccccgtttcagacctctcaggcttccgccagtgctccacgacaccagcccgcctcggcctccagcacagccgctagcccggcccatcctgcgaaactgcgggcccagaccacagcacaggcctccaccccaggccagcccccgccccagccccaggccccctcgcacgcggccgggcagagcgcgctgcctcagaggctggtgctcccctcgcaggcccaggcccgcttgcccagtggagaggtagtgaaaatagctcagctggcatccatcacaggaccacagagccgcgtggctcagccagagacgccggtgacactgcagttccagggcagcaagttcaccctgtcacacagccagctccggcagctcacagcgggccagccgctgcagctgcaaggcagcgtcctccagatcgtgtccgcccccgggcagccctaccttcgagcccctggccctgtggtgatgcagaccgtgtctcaggcgggcgctgtgcacggcgccctgggaagcaagcccccggccggcggtcccagccctgcacccttgaccccacaagttggcgttccgggccgcgtggcggtgaatgccttggctgtaggagaacccggaacggcctccaaaccagcttctcccattggagggccgacccaggaggaaaagaccagactcttgaaagagcgcctggatcagatttatttagtcaacgagcggcgctgttctcaagctccagtctatggcagagacttgctaaggatttgtgccctgcctagccatggaagggtacagtggcgtgggtccctggatggccgtcgtgggaaggaggccgggccagcgcacagttacacttcatcctcagaaagtccaagtgagctgatgttgacgctttgtcggtgtggagagtctctgcaggatgttattgacagggtggcctttgtgattcctccggtggtggcagcacccccgtccctacgggtgccgcggccgccacccctgtacagccacagaatgaggatcttgaggcagggcctgagagagcacgctgcgccgtacttccagcagctgcggcagaccacggctccacgcctgctgcagttccctgagctgaggctggtgcagttcgactcagggaagttggaagctttagctatcttgcttcagaaattgaaatctgaaggacgtcgggtgctgattttatcacagatgattcttatgttggacattttagagatgttcttgaacttccattacctcacctatgtaagaatcgatgaaaatgccagcagtgagcaacggcaggaactgatgaggagtttcaacagagacaggcggattttttgtgccattctctccactcacagccgtaccacaggtataaaccttgtagaggcggacaccgtcgtgttttatgacaatgacctgaatccagtgatggatgccaaagctcaggagtggtgcgataggatcgggagatgcaaagacatccacatatacaggcttgtgagtggcaattccattgaagagaaattgttgaaaaatggaactaaagatctgatccgagaagtggctgctcagggaaatgactactccatggctttcttaactcagcgaaccatccaggagctgtttgaagtttattctcccatggatgatgctggcttcccggtcaaagctgaggagtttgtggtgctttctcaggaaccttctgtcacggaaaccattgcacccaaaattgcaagacctttcatagaggccctcaagagtattgagtatctggaggaggatgcccagaagtccgcacaggagggggtgctgggaccacacactgatgctctgtcatcagactctgagaacatgccgtgtgatgaagaaccatcccaattagaggagctagctgacttcatggagcagcttacaccaattgaaaaatatgctttaaattacctggaattattccatacttctattgagcaagaaaaggagagaaacagtgaggacgcagtgatgactgcagtgagggcatgggagttctggaacctgaagaccctgcaggagagggaggcccggctgcggctggagcaggaggaggcggagctcctgacctacacgcgagaggatgcctacagcatggagtatgtctacgaagatgtcgatgggcagacagaagtcatgccgctctggaccccacccaccccgccgcaggacgacagcgacatctacctcgactcggtcatgtgtctcatgtatgaagccactcccatcccagaggctaagctgccccctgtgtacgtgaggaaggagcggaagcgacacaaaacagacccctcagctgcaggcaggaagaagaagcagcgtcacggggaggcggtcgtccctcctcggtccctgtttgaccgcgcaacaccaggacttctgaaaattcgcagagagggcaaggagcagaagaagaatattctgctgaagcagcaggtgccattcgccaagcccctgccaacttttgccaaacccacagctgagcctggtcaagacaaccccgagtggctcatcagtgaggactgggcgctgctgcaggctgtaaagcagttactggagctgcctttgaacctcacaatcgtgtcacctgctcacacacctaattgggatcttgtcagtgacgttgttaactcctgtagccgaatctaccgctcttccaaacagtgccggaatcgctacgagaatgtcatcattccacgagaggaggggaagagtaaaaacaaccgtcctctccgtacgagccagatctatgcccaggatgagaatgccacacacacccagctgtacacgagccactttgacttaatgaaaatgactgctggcaagaggagtcccccaatcaaacctctgcttggcatgaatccctttcagaagaaccccaagcacgcgtctgtgttggcagaaagtggaatcaactatgacaagccgctgcctcccatccaggtggcatctctccgtgcagagcgaatcgcaaaagagaaaaaggctctggctgatcagcagaaggcacagcagccggccgtggcccagccacccccgccccagccgcagcccccaccacccccgcagcagccaccgccaccgctgccacaaccacaggcagcgggcagccagccgccagcagggccaccagctgtccagccccaaccccagccacagccccagacccagccacagcctgtgcaggccccagcgaaggcgcagcccgcaatcacgacggggggcagtgcagccgtactggcaggaaccattaaaacatcagttactgggacgagcatgcccactggtgccgtgagtggaaatgtgatcgtgaacaccatcgcaggggtcccagctgccaccttccagtccatcaacaagcgcctggcgtcgccagtggctcctggggccttgactacgccgggaggctctgctcccgcccaggtggtgcacacccagcccccgccacgggcagtcggctccccagccacggcgacccctgacctggtgtccatggcaacgactcagggtgttcgagcggtcacttctgtgacagcctcggccgtggtcactaccaacctgaccccagtgcagaccccggcacggtctttggtgccccaagtgtcccaagccacaggagttcagctccctggaaaaaccatcacacctgcacatttccagcttctcaggcagcagcagcagcagcagcaacaacagcagcagcagcagcagcagcagcagcagcagcagcagcagcaacagcagcagcagcaacagacgacgacgacctctcaggtgcaagttccacagatccagggccaggcccagtccccagcacagatcaaagctgtgggcaagctgacgccggaacacctcatcaaaatgcagaagcagaaactgcagatgcccccgcagcccccaccgccacaggcccagtctgcgcccccgcagccaacagcccaagtgcaagtgcagacctcgcagccgccgcagcagcagagcccccagctcacgacggtcacggccccaaggcctggtgccctgctgacgggcaccaccgtggccaacctccaggtggcccggctcacccgggttcccacttctcagctgcaggcgcaagggcagatgcagacccaggcaccccagccagcccaggtggccttggcgaagcctccggtggtgtccgtcccggcagctgtggtctcctcaccgggagtcaccaccctgcccatgaacgtcgcggggatcagcgtggcgatcggtcagccacagaaggcagcaggacagaccgtggtggcccagcccgtgcacatgcagcagctgctgaagctgaagcagcaggccgtccagcagcagaaggccatccagccccaggctgcacagggcccggcagccgtccagcagaagatcaccgcacagcagatcaccacccctggcgcgcagcagaaggttgcctacgccgcgcagccggcccttaagacccagtttcttaccacacccatctcccaggcccagaaactggccggggcccagcaagtgcagacccagatccaggttgcaaaacttcctcaagttgttcaacagcaaacacccgtggccagcatccagcaagttgcctctgcttcccagcaggcttctccacagactgtggcgctcacgcaggcgacggcggccgggcagcaggtgcagatgatccctgcagtgaccgcgactgcccaggtggttcagcagaaactcattcagcagcaggtggtgaccacggcgtcggccccgctccagactccaggcgctcccaacccagcccaggtgcccgccagctccgacagcccaagccagcagcccaagttacagatgagggtccctgctgtcaggctaaagacacctactaagcctccgtgccagtagtcagggcagcagggctgcctctcatctaaagcaaaactaccttcctcacagaaaacgctttattagtgaaccttgggaccatgtcacgcaagagattcagcactgggaaagatataattgaaacaaaatagtgtaatcattttattaaaatgcatcccacactgcaggacaaatggtccttatggagtgccgcgttctctgtactacgtggctcatggaaaaagtgacaacatggcttcctctaaatcatttcacctttcagtccccacccgcacccgtcccctagagccatagtactgtgttctgaaagccatttagaatttctttgtgagcatgtagtgctttgcacgccacagaagccgtctgccgtgtgtgaggagcatacaatggactttctaaagataaggcgtgggcttccacagtgtctgccagagtttagttctttataccttactgaaaaatgcctcgtggtcttcgcagaggggaaggcctgtctaaagtcaatcatccgagatgggttttccattccaaagaaaggcaatatggttccttccttccctcctaaaatatgacttaacttttaagagaaatgttctgacacccacctaaacacacaaggcacgttcctggcctgtgttcaagggaaatgatcagtcattgcattgttattccaaagagcagccaacagtggcctcccccaggccctaccctgcaatgggattcgctttcatttaatggaaacttctgggactgatgcccaactcagtgcactcaagacgcatctccagttttcgggggaagctggtatttgacatagtgtgttaaacagctcctgagaacctttgggacactctgccatggctggcgtgaggcccagaggaccacgcagaggcaatggtagtacagatgtcacagctgagggtacgatgaggcctgggctcagtgagccaggacgaatgtgacagacaccccttgctgccacagtcagccctttgacgaaggtgggctggtgattctggaagtattggctatagcggtgggcccagtcaactcttccttgtggacttacgacagcagattttctctaggataagcttgtgtggttctgccagtgaagcagagaaccacctgtgctgttgtggaaggcgtgccgttgagggggaaaacgaagcccagtatttgctactgtttttcctttttttactatgacaggaaaataaatgcaattttagtggaattgattgacagtgtctccttactttgaagttttcaccaaagcaaaaaggtccatatccaatagtatcctttgtgctgtggcttgattttggcctattttacattatttggtccaggaaattaggttatattaggttttttgtatactaaaaatcagttatggcacaataaagattttctgtttttaaattgtatttcatctgcttcctccccattctctcactttaagtgacattgaggaaggtattctgtcccacaggtttctgtggacagcgatacagcaggagtcagtgaaatcaactggggagctcacttgagctcttgataagaaatgtggagaaaagtaaaaaccaagctttgaagaaacagaagaaattaatcttttagttagttgaacataccaaagcagaggactggaatctgtttgttctaaccaacccgttctccctggcttggcacgtgccgtgagagcgcagcttgccggagggagggccgctgtgtgcgcctcacatctggctcccagtggaaacttttactcctcctcatccgcagatgtgatagaactgaagtatctaggaattctgcctttgtcatttgttttaatttgtgtgccctgttcattttttttgtctttcccaaatcttggtagtctccttatagttgaagataaaatgttgagtgcacttattttagaatatcctagacataactgtctaagtaaaagcgctctattaatctaaaacactacaagagaatttaacaccatctctcaaatgcttttttggagagcttaatgggattctgaatatttgcaatgtggagtttccgccccgatctcacgtcagtgagggtctcctgtctctcaagtgtgtttcctttggctgttccctaatacaaaacacggacatatttttactcgtagcactcaatttagtaacttctagatgctaccgttgacctgagttaaattcatttagtcgtgtacgtaaaaactctccttttagtgtgttattttcttggccttcccttttaaaggttaaagtttctaacctaagaattaagtacgcgttcaggaagctgttgtctaggccttccccttgtgaatctgggttcattccaatacggcaagtaagagttggaaactttgagaacacagactataaaggcagcagcccgaacactgtcagactctaattggcgaccctgggaaacagttgccctgctattctttaaagaaagacgtttattctgatgataaaaacagttagccagactgtttttaaagcacctggcgggaagcagaaggttggatccaagcccttgttcagatttggtgcctgataagacaggggtttctctttttgtgacctttattattattattttgttaactgttgtaaccagttagctgttgtgttttaagatagaaaggaacaagactaaaattgtaaatactttgtaaacatcagcatttgtacttgaatagtaggattttaaagggcattgatagcataccaaacaaaaggcaaaataaagtgacctttttatata

SEQ ID NO: 9162 - DNA, 2585 bp, Homo sapiens
  source 1..2585: mol_type = unassigned DNA
atgcactgagcggctgcggcgcggcttccatcctcccgccctcctgacgcggccggagcgcagccctgaggcccagggagaacgacacattggatacagaagggaggtgatcatgcaccatggcactggcccccagaacgtccagcatcagctgcagaggtccagggcctgccctggcagcgagggtgaggagcagccggcccaccccaacccacccccgtcccccgcagctcccttcgctccctcagcaagcccgtcggcaccccagtctcccagttatcaaatacagcagctgatgaataggagccctgcaaccgggcagaacgtgaacatcaccctgcagagcgtgggccctgtcgtcgggggaaaccagcagatcacactggccccactgccgctccccagccccacctctccaggcttccagttcagcgctcagcctcggcggtttgagcatgggtctccatcatacattcaggtcacgtcccccttgtcccagcaggtccagacccagagtcccacgcagcccagtccggggccggggcaggccttgcagaatgtgcgtgcaggtgcccctggccctgggctgggcctctgcagcagcagccctacagggggcttcgtggatgccagcgtgctggtgaggcagatcagcttgagcccctccagtggtggacactttgtgtttcaggatgggtcagggctcacccagatcgcccagggagcccaggttcagctccagcacccgggtacgcccatcacagtccgagagcggagaccctcccagccccacacacagtcagggggcaccatccaccacctgggaccccagagccctgcagccgcgggtggggccggcctgcagcccctggccagcccaagccacatcaccacggctaacttgccaccgcagatcagcagcatcatccagggccagctggttcagcagcagcaggtgctgcaggggccgccgctgccccggcccctgggcttcgagaggacacccggcgtgctgctccccggggctgggggcgcagcggggtttgggatgacgtccccacccccgcccaccagcccttccaggactgccgtgcccccaggcctttccagcctcccactcacgtctgtggggaacacgggaatgaagaaggttcccaagaagttagaggagattcccccagcctctccggagatggcacagatgaggaagcagtgcctggactatcattaccaggagatgcaggctctgaaggaggtcttcaaggagtatttgattgaactgtttttcttgcaacactttcaagggaacatgatggatttcttagctttcaagaagaaacattatgccccattacaagcatatcttaggcagaatgatttggacattgaagaagaggaggaggaggaggaagaggaggaagaaaaatctgaggttatcaatgacgagcaagccctcgcagggagcctggtagcaggggccggaagcacagtagagacggacctgtttaagaggcagcaggcgatgccctccacaggtatggcaggaggaatgccccccacgccgcaggccgcgcagctcgctggacagaggcagagtcagcagcagtatgacccctccacggggcctcccgtgcagaacgctgccagcttgcacaccccactgccgcagctgcccgggaggctgcccccagccggtgttcccactgcagccctctcctctgcgctgcagtttgcacagcagccgcaagtggtagaggcccagacacagctccaaatcccggtgaagactcagcagcccaatgttcccatccctgcaccgcccagcagccaactccccatccctccctcgcagcctgcacagctggccctccacgttcccacacctggaaaggtgcaggtgcaggcctctcagctttcctccctgccacagatggtagcatcgacaaggctccctgtggaccctgccccgccctgcccacggcctctgcccacctcttctacctcgtccctcgcgcctgtgagtggctccggcccaggaccctcccctgctcgatcctctccagtaaatagaccttcctcagccaccaataaggcactatctccagtcacttcccggaccccaggggtggtggcatctgcccccaccaaaccacagagtcctgctcagaatgccacctcgtcccaagacagttctcaggatacgctgacagaacaaataactctggagaaccaggtgcatcagcgcattgcggagctgaggaaagcaggtctgtggtcccagaggcgtctgccaaagctgcaggaggccccacgccccaagtcccactgggactatctgctggaggagatgcagtggatggccacagactttgcccaggagaggaggtggaaggtggctgctgcgaagaagctcgttagaactgtggtgcgccatcacgaggagaagcagctccgtgaagaaagggggaagaaggaagagcagagcagactgaggcggatagccgcctccacggcccgggagatagagtgcttttggtcgaatattgaacaggttgtggaaataaaactacgagtagaattagaag

SEQ ID NO: 9163 - DNA, 10014 bp, Homo sapiens
  source 1..10014: mol_type = unassigned DNA
ggagaacgacacattggatacagaagggaggtgatcatgcaccatggcactggcccccagaacgtccagcatcagctgcagaggtccagggcctgccctggcagcgagggtgaggagcagccggcccaccccaacccacccccgtcccccgcagctcccttcgctccctcagcaagcccgtcggcaccccagtctcccagttatcaaatacagcagctgatgaataggagccctgcaaccgggcagaacgtgaacatcaccctgcagagcgtgggccctgtcgtcgggggaaaccagcagatcacactggccccactgccgctccccagccccacctctccaggcttccagttcagcgctcagcctcggcggtttgagcatgggtctccatcatacattcaggtcacgtcccccttgtcccagcaggtccagacccagagtcccacgcagcccagtccggggccggggcaggccttgcagaatgtgcgtgcaggtgcccctggccctgggctgggcctctgcagcagcagccctacagggggcttcgtggatgccagcgtgctggtgaggcagatcagcttgagcccctccagtggtggacactttgtgtttcaggatgggtcagggctcacccagatcgcccagggagcccaggttcagctccagcacccgggtacgcccatcacagtccgagagcggagaccctcccagccccacacacagtcagggggcaccatccaccacctgggaccccagagccctgcagccgcgggtggggccggcctgcagcccctggccagcccaagccacatcaccacggctaacttgccaccgcagatcagcagcatcatccagggccagctggttcagcagcagcaggtgctgcaggggccgccgctgccccggcccctgggcttcgagaggacacccggcgtgctgctccccggggctgggggcgcagcggggtttgggatgacgtccccacccccgcccaccagcccttccaggactgccgtgcccccaggcctttccagcctcccactcacgtctgtggggaacacgggaatgaagaaggttcccaagaagttagaggagattcccccagcctctccggagatggcacagatgaggaagcagtgcctggactatcattaccaggagatgcaggctctgaaggaggtcttcaaggagtatttgattgaactgtttttcttgcaacactttcaagggaacatgatggatttcttagctttcaagaagaaacattatgccccattacaagcatatcttaggcagaatgatttggacattgaagaagaggaggaggaggaggaagaggaggaagaaaaatctgaggttatcaatgacgagcagcaagccctcgcagggagcctggtagcaggggccggaagcacagtagagacggacctgtttaagaggcagcaggcgatgccctccacaggtatggcagagcagtctaagaggcctcgccttgaagtgggtcaccaaggggtagttttccagcacccaggggcggacgcaggcgttcctctccagcaactaatgccgaccgcacaaggaggaatgccccccacgccgcaggccgcgcagctcgctggacagaggcagagtcagcagcagtatgacccctccacggggcctcccgtgcagaacgctgccagcttgcacaccccactgccgcagctgcccgggaggctgcccccagccggtgttcccactgcagccctctcctctgcgctgcagtttgcacagcagccgcaagtggtagaggcccagacacagctccaaatcccggtgaagactcagcagcccaatgttcccatccctgcaccgcccagcagccaactccccatccctccctcgcagcctgcacagctggccctccacgttcccacacctggaaaggtgcaggtgcaggcctctcagctttcctccctgccacagatggtagcatcgacaaggctccctgtggaccctgccccgccctgcccacggcctctgcccacctcttctacctcgtccctcgcgcctgtgagtggctccggcccaggaccctcccctgctcgatcctctccagtaaatagaccttcctcagccaccaataaggcactatctccagtcacttcccggaccccaggggtggtggcatctgcccccaccaaaccacagagtcctgctcagaatgccacctcgtcccaagacagttctcaggatacgctgacagaacaaataactctggagaaccaggtgcatcagcgcattgcggagctgaggaaagcaggtctgtggtcccagaggcgtctgccaaagctgcaggaggccccacgccccaagtcccactgggactatctgctggaggagatgcagtggatggccacagactttgcccaggagaggaggtggaaggtggctgctgcgaagaagctcgttagaactgtggtgcgccatcacgaggagaagcagctccgtgaagaaagggggaagaaggaagagcagagcagactgaggcggatagccgcctccacggcccgggagatagagtgcttttggtcgaatattgaacaggttgtggaaataaaactacgagtagaattagaagaaaaaaggaagaaggccttaaatttacagaaagtttccaggagagggaaagaattgagacctaaaggatttgacgcattacaggaaagttctctggattcaggaatgtctggaagaaaaagaaaagctagcatatctttgactgatgacgaagtggacgatgaagaggaaacaattgaagaggaggaagcaaatgaaggcgttgtggaccaccaaacagaactttctaatttagccaaggaagctgagctgcccctcctggacctgatgaagctgtacgaaggcgccttcctgccgagttctcagtggccccggccgaagcctgatggggaggacacaagcggagaggaagatgcagatgactgtccaggcgacagggagagtcgcaaggacttggttctcatcgactcgcttttcatcatggatcagttcaaagctgccgagaggatgaatatcgggaagccaaacgccaaggacattgcggacgtcactgcggtggctgaagccatcctgccgaagggcagtgctcgggtcacaacctcggtcaagtttaatgctccatctttgttgtatggggctctcagagattatcagaagattggcctggactggctggccaaactttacaggaagaatctcaatggcatattggcagatgaagctgggctgggtaaaacagtgcagatcattgctttttttgcccacctagcttgtaacgaaggtaattggggcccccatcttgttgttgtgagaagttgtaacatactcaagtgggagcttgaattgaaacgttggtgtcccggactcaaaatcctctcatatattggcagccacagagaactcaaagcaaagagacaggagtgggccgaacccaacagcttccacgtctgcatcacgtcctacactcagttcttccggggcctcaccgccttcacacgagtgcgctggaagtgcctggtcattgatgagatgcagcgcgtgaagggcatgaccgagaggcactgggaagcggttttcaccctgcagagccaacaacgtctgcttctgatcgactcgccgctgcacaataccttcctggagctctggaccatggtgcacttcctggtcccagggatctccaggccctacctgagctcccctctgagggcccccagtgaagagagccaggattactaccataaagtggtcataaggttacacagggtgacacagccatttattttgaggagaactaagagagatgtggaaaagcaactaacaaagaaatatgagcatgttttgaagtgtcgcctttctaaccgacaaaaagccttatacgaggacgttatcctgcaacctggcactcaggaggccttgaagagcgggcactttgtcaacgtcctgagcatccttgtgcggctgcagcgcatctgcaaccaccctgggctcgtcgagccccggcacccaggctcttcctacgtggcggggccactggagtatccgtccgcatctctaatcctgaaggcactggagagagatttctggaaggaagcagatctttctatgtttgatctcatcggcttagaaaataaaatcactcgtcacgaggcagagttgctgtctaagaaaaagataccgcggaaactcatggaggaaatctccacttcagcagccccagcagcccgaccagcagcagcaaagctgaaggccagcaggttgtttcagcctgtgcagtatggccagaagcccgagggtcgcaccgtggctttccccagcactcacccgccccggacggcagcccccaccacggcctctgctgctccacagggcccgcttcgaggacggccgcccatcgccacgttctctgccaatccggaggcaaaagcagcagcagccccgtttcagacctctcaggcttccgccagtgctccacgacaccagcccgcctcggcctccagcacagccgctagcccggcccatcctgcgaaactgcgggcccagaccacagcacaggcctccaccccaggccagcccccgccccagccccaggccccctcgcacgcggccgggcagagcgcgctgcctcagaggctggtgctcccctcgcaggcccaggcccgcttgcccagtggagaggtagtgaaaatagctcagctggcatccatcacaggaccacagagccgcgtggctcagccagagacgccggtgacactgcagttccagggcagcaagttcaccctgtcacacagccagctccggcagctcacagcgggccagccgctgcagctgcaaggcagcgtcctccagatcgtgtccgcccccgggcagccctaccttcgagcccctggccctgtggtgatgcagaccgtgtctcaggcgggcgctgtgcacggcgccctgggaagcaagcccccggccggcggtcccagccctgcacccttgaccccacaagttggcgttccgggccgcgtggcggtgaatgccttggctgtaggagaacccggaacggcctccaaaccagcttctcccattggagggccgacccaggaggaaaagaccagactcttgaaagagcgcctggatcagatttatttagtcaacgagcggcgctgttctcaagctccagtctatggcagagacttgctaaggatttgtgccctgcctagccatggaagggtacagtggcgtgggtccctggatggccgtcgtgggaaggaggccgggccagcgcacagttacacttcatcctcagaaagtccaagtgagctgatgttgacgctttgtcggtgtggagagtctctgcaggatgttattgacagggtggcctttgtgattcctccggtggtggcagcacccccgtccctacgggtgccgcggccgccacccctgtacagccacagaatgaggatcttgaggcagggcctgagagagcacgctgcgccgtacttccagcagctgcggcagaccacggctccacgcctgctgcagttccctgagctgaggctggtgcagttcgactcagggaagttggaagctttagctatcttgcttcagaaattgaaatctgaaggacgtcgggtgctgattttatcacagatgattcttatgttggacattttagagatgttcttgaacttccattacctcacctatgtaagaatcgatgaaaatgccagcagtgagcaacggcaggaactgatgaggagtttcaacagagacaggcggattttttgtgccattctctccactcacagccgtaccacaggtataaaccttgtagaggcggacaccgtcgtgttttatgacaatgacctgaatccagtgatggatgccaaagctcaggagtggtgcgataggatcgggagatgcaaagacatccacatatacaggcttgtgagtggcaattccattgaagagaaattgttgaaaaatggaactaaagatctgatccgagaagtggctgctcagggaaatgactactccatggctttcttaactcagcgaaccatccaggagctgtttgaagtttattctcccatggatgatgctggcttcccggtcaaagctgaggagtttgtggtgctttctcaggaaccttctgtcacggaaaccattgcacccaaaattgcaagacctttcatagaggccctcaagagtattgagtatctggaggaggatgcccagaagtccgcacaggagggggtgctgggaccacacactgatgctctgtcatcagactctgagaacatgccgtgtgatgaagaaccatcccaattagaggagctagctgacttcatggagcagcttacaccaattgaaaaatatgctttaaattacctggaattattccatacttctattgagcaagaaaaggagagaaacagtgaggacgcagtgatgactgcagtgagggcatgggagttctggaacctgaagaccctgcaggagagggaggcccggctgcggctggagcaggaggaggcggagctcctgacctacacgcgagaggatgcctacagcatggagtatgtctacgaagatgtcgatgggcagacagaagtcatgccgctctggaccccacccaccccgccgcaggacgacagcgacatctacctcgactcggtcatgtgtctcatgtatgaagccactcccatcccagaggctaagctgccccctgtgtacgtgaggaaggagcggaagcgacacaaaacagacccctcagctgcaggcaggaagaagaagcagcgtcacggggaggcggtcgtccctcctcggtccctgtttgaccgcgcaacaccaggacttctgaaaattcgcagagagggcaaggagcagaagaagaatattctgctgaagcagcaggtgccattcgccaagcccctgccaacttttgccaaacccacagctgagcctggtcaagacaaccccgagtggctcatcagtgaggactgggcgctgctgcaggctgtaaagcagttactggagctgcctttgaacctcacaatcgtgtcacctgctcacacacctaattgggatcttgtcagtgacgttgttaactcctgtagccgaatctaccgctcttccaaacagtgccggaatcgctacgagaatgtcatcattccacgagaggaggggaagagtaaaaacaaccgtcctctccgtacgagccagatctatgcccaggatgagaatgccacacacacccagctgtacacgagccactttgacttaatgaaaatgactgctggcaagaggagtcccccaatcaaacctctgcttggcatgaatccctttcagaagaaccccaagcacgcgtctgtgttggcagaaagtggaatcaactatgacaagccgctgcctcccatccaggtggcatctctccgtgcagagcgaatcgcaaaagagaaaaaggctctggctgatcagcagaaggcacagcagccggccgtggcccagccacccccgccccagccgcagcccccaccacccccgcagcagccaccgccaccgctgccacaaccacaggcagcgggcagccagccgccagcagggccaccagctgtccagccccaaccccagccacagccccagacccagccacagcctgtgcaggccccagcgaaggcgcagcccgcaatcacgacggggggcagtgcagccgtactggcaggaaccattaaaacatcagttactgggacgagcatgcccactggtgccgtgagtggaaatgtgatcgtgaacaccatcgcaggggtcccagctgccaccttccagtccatcaacaagcgcctggcgtcgccagtggctcctggggccttgactacgccgggaggctctgctcccgcccaggtggtgcacacccagcccccgccacgggcagtcggctccccagccacggcgacccctgacctggtgtccatggcaacgactcagggtgttcgagcggtcacttctgtgacagcctcggccgtggtcactaccaacctgaccccagtgcagaccccggcacggtctttggtgccccaagtgtcccaagccacaggagttcagctccctggaaaaaccatcacacctgcacatttccagcttctcaggcagcagcagcagcagcagcaacaacagcagcagcagcagcagcagcagcagcagcagcagcagcagcaacagcagcagcagcaacagacgacgacgacctctcaggtgcaagttccacagatccagggccaggcccagtccccagcacagatcaaagctgtgggcaagctgacgccggaacacctcatcaaaatgcagaagcagaaactgcagatgcccccgcagcccccaccgccacaggcccagtctgcgcccccgcagccaacagcccaagtgcaagtgcagacctcgcagccgccgcagcagcagagcccccagctcacgacggtcacggccccaaggcctggtgccctgctgacgggcaccaccgtggccaacctccaggtggcccggctcacccgggttcccacttctcagctgcaggcgcaagggcagatgcagacccaggcaccccagccagcccaggtggccttggcgaagcctccggtggtgtccgtcccggcagctgtggtctcctcaccgggagtcaccaccctgcccatgaacgtcgcggggatcagcgtggcgatcggtcagccacagaaggcagcaggacagaccgtggtggcccagcccgtgcacatgcagcagctgctgaagctgaagcagcaggccgtccagcagcagaaggccatccagccccaggctgcacagggcccggcagccgtccagcagaagatcaccgcacagcagatcaccacccctggcgcgcagcagaaggttgcctacgccgcgcagccggcccttaagacccagtttcttaccacacccatctcccaggcccagaaactggccggggcccagcaagtgcagacccagatccaggttgcaaaacttcctcaagttgttcaacagcaaacacccgtggccagcatccagcaagttgcctctgcttcccagcaggcttctccacagactgtggcgctcacgcaggcgacggcggccgggcagcaggtgcagatgatccctgcagtgaccgcgactgcccaggtggttcagcagaaactcattcagcagcaggtggtgaccacggcgtcggccccgctccagactccaggcgctcccaacccagcccaggtgcccgccagctccgacagcccaagccagcagcccaagttacagatgagggtccctgctgtcaggctaaagacacctactaagcctccgtgccagtagtcagggcagcagggctgcctctcatctaaagcaaaactaccttcctcacagaaaacgctttattagtgaaccttgggaccatgtcacgcaagagattcagcactgggaaagatataattgaaacaaaatagtgtaatcattttattaaaatgcatcccacactgcaggacaaatggtccttatggagtgccgcgttctctgtactacgtggctcatggaaaaagtgacaacatggcttcctctaaatcatttcacctttcagtccccacccgcacccgtcccctagagccatagtactgtgttctgaaagccatttagaatttctttgtgagcatgtagtgctttgcacgccacagaagccgtctgccgtgtgtgaggagcatacaatggactttctaaagataaggcgtgggcttccacagtgtctgccagagtttagttctttataccttactgaaaaatgcctcgtggtcttcgcagaggggaaggcctgtctaaagtcaatcatccgagatgggttttccattccaaagaaaggcaatatggttccttccttccctcctaaaatatgacttaacttttaagagaaatgttctgacacccacc

SEQ ID NO: 9164 - DNA, 5191 bp, Homo sapiens
  source 1..5191: mol_type = unassigned DNA
aggactagagagcgagccgcaaggaagtcggtgcagtcgagacccccctccccatcccagcgcatcgcgtctccgccgagcttgagggcacgccggggacccctccccagagccggccggaccccaggtgccgaggccttggggagcgcggggcgtcccgggtcgcggtgccctcgggacgagacagcccctggcagtgccaccaccgcagccgccgggcgatctccaagcggcgatctctaagcgctgctctctgctcggccgcgggccaggaggggagggtccggccttgccccgcaggcgtccattggcggcttcccccggcctccgcgccatgccgcgggccgtgtgaaaggcggcagcaccggaacccgcaggtgtccgcgggcgcgccaagcccttttgggtagggggcgccttactcgctatgctgcaagggccccgggccttggcttcggccgctgggcagaccccgaaggtggtgcccgcgatgagccccacagagctgtggccatccggcctcagcagcccccagctctgcccagctactgctacctactacacaccgctgtacccgcagacggcgcctcccgcagcggcgccaggcacctgcctcgacgccactccccacggacccgagggccaagttgtgcgatgcctgccggcaggccggctgccggccaaaaggaagctggatctggaggggattgggaggcccgtcgtccctgagttcccaacccccaaggggaagtgcatcagagtggatggcctccccagccccaaaacccccaaatcccccggggagaagactcggtatgacacttcgctggggctgctcaccaagaagttcatttacctcctgagcgagtcagaggatggggtcctggacctgaactgggccgctgaggtgctggacgtgcagaagcggcgcatctatgacatcaccaacgtgctggaaggcatccagctcatccgcaagaaggccaagaacaacatccagtgggtaggcaggggaatgtttgaagaccccaccagacctgggaagcagcaacagctggggcaggagctgaaggagctgatgaacacggagcaggccttggaccagctcatccagagctgctctctgagcttcaagcacctgactgaggacaaggccaacaagaggctggcctatgtgacttaccaggatatccgtgctgttggcaactttaaggagcagacagtgattgccgtcaaggcccctccgcagacgagactggaagtgcccgacaggactgaggacaacctgcagatatatctcaagagcacccaagggcccatcgaagtctacctgtgcccagaggaggtgcaggagccggacagtccttccgaggagcctctcccctctacctccaccctctgccccagccctgactctgcccagcccagcagcagcaccgaccctagcatcatggagcccacagcatcctcagtgccagcaccagcgccaaccccccagcaggccccaccgcctccatccctggtccccttggaggctactgacagcctgctggagctgccgcacccactcctgcagcagactgaggaccagttcctgtccccgaccctggcgtgcagctcccctctgatcagcttctccccatccttggaccaggacgactacctgtggggcttggaggcgggtgagggcatcagcgatctcttcgactcctacgaccttggggacctgttgattaattgagtggccctgcctgcccccagcagcctgcccccgactctacctcctcacagacaggctgacagcccctctgcctgcacagggacattggacactaggtgctgccctcagggcatggggtctcctcgcctttcctgccccagccggcagaagctgtgtggggagatatgaatggtacgggtgaggagtggataaggggtggtcctcaccttcctaatggaagctgggcctagggaggcccatccagtcttctgacttctgacctctcacaagaaggctgcaggtgaggtggccaagtccagggaaaggccctgctacctccttttgaggggtaattaggaccctcgacgtaccaagaagcacataatgcctttgtatttatttcaggttgagttgtttgtttgtcctccctgagttttagcagggaggttgttctagtttttagtgagacctctgcagacaggcccatcactgtccatgttccagggcaggtctgggtttccaagggaggggcccaggctacatccttggtttccccactgtggtgggggctgggactctgaggggctgtccagtctgctagaatgctaattgcacttaggcctcatggttctagtaaacggcagctgtgggcccttttgcctcttcccctgttcttggcctcacatctccagctgagctgccggtcttggcttcctggtcgcctctgtcccagagatggtcccagggagccatcctagggcaggtagcactgaggctcctgtggaaacaggagccacctgctcaggagacccctttcctgaggaagtccttacctctccccttgagatgtaaaaatggtccagcagagacaagctcccgtggaaaacagacaggagcatgggggcagctgtcatggctgtggcgggcacttttcctcagagtttctgccttgcgctggtccaggagccattttgcaccaaggacttggtaggcagaggcagccccactgtaaagaagggtcagattaaaacaaaaaactgccaaaagcatcccctctgccccccatgtggcactggcatcattctctgcttccctgggaggaattttttcaccatgttattgaaggggatggttcattaaggactccacccctcagagctcactcagaccccaaggacagaggtgactggggcttggtgacttgttcactccttttttcccaggtatactgaaggggtgacagagagaggtcttcatggcagaccaggccttcacagctaatggggagaggaactcatgttacctctgcaggcctggggtcctgagggggtcttttggcttcagcctgttcccccagaggcttgatcatcccacattgtcccttcagctcagctgctcttctcccccacccaccctgggatgtgggtgctctgggctgaaccaaggctatgacttctggagagaggctcaggggttggtctgagaggcctgccatccacccctcagggagctaggttttctcagaggctcagctggacagcactttttagaaaagtttgtagcattaagctggtttaaaatatgaagttggttttgttggatggctcctgagctgactgactgatgtctgaagtttgagacgagggattatttcagggtggggcccaatgtgatctaatgcccagctggggacaattgtgcctcatcatttgctcaaattcctgggcccccaagttagccccctcccaggagtggtcagcgggtcacagctgcccccactctataagcagggctaattgtgtaccctttgcagaaatgcttttggtctcctacccaaatactcacaagggtcttatcagacgcccgtcttaaagtccagcatgctcagggaccctgtgtaggatctcgtttgtggtgagtgggctgctctgaggtctccactgggctgccatttagccatgtgccatctctgaagtcagaggtgtttgactcccattccttgggctctggagctttccccaagaattacatcagagaaaaggaagaaggggcctgcaggacccattgggaatgagtttaatactgaagtctggaatgtaagctcatgccctagaggcctctccatatggctggtcaggggagctgccttcaggcttgtgccccgtgtgctcagcagctgcctctgtccccctctactgtccctttcacaccttgcctggccaaggggctagacctcccaggctaagcctcagattcagtgcaggacacaagctcatgcccccgtcttgccagtgacacttgaagcctcccgacttccacagagtgcttcaggacacattttgagtggtattttcttttctttttttcttctttttttttttttttgagatggagtctcgctctgttgcccaggctggagtgcagtggcctgatctcggctcactgcaacctctgcctcccaggttcaagcgattcttctgcctcagcctccagagtagctgggactatagacatgcaccaccacgcccggctaattttgtatttttggtcgagacggggttttgccatgttagtcaggctggtcttgaactcctgacctcaagtgatccaccacctcggcctcccaaagtgttgagatgacaggcacgagccaccaggcccagcctgagtggtattttctttagggaccaggtagactttaaaacgagggtaagagaaaagccagtgtctttctgaggtaaataatttctgccaggaaacttcccagccccaccagcagcccccctaaaaaaatcactcgtgtccccagggacttctaaagcttggggctccaggaaatcatccagtagagttggagattcagagatttcttgaagccagggacatgctcctaactcctttcccattaaaggtgttagaatagaccagagggtgtcccttttccacagtaatgggatcggctggtgtgccttcagggaggaagagggaggtggtcaagcttgaaaaactggctttaggatggttctgactttgttctccctccccaagtgttctcaacctccattctgcagtgttcagagttttagggaaagggtttgggtgccccagcatccaggtgttgtgtggcttagcgcatgtgaagtgaaaaccttctggggttgtttggaagcagctttctggttcttgtgattgtatcctgaggtcccagaaccctattctcccacgaggatcctcagtgaccatggtggccacacgcctggccagcctgctggctcctgggtgagctgaagaaccttgcctgtggcacttttcgagggtgagctggaaccgagagaacatggtccccgtgctgggactcatgcgggtcatttcctgccggcctggtttcgcctggtcgtgtctttatgagcaccatgtaagcctccttgtattgagataattgggcattaaacattaaactgcagctctggg

SEQ ID NO: 9165 - DNA, 4744 bp, Homo sapiens
  source 1..4744: mol_type = unassigned DNA
aaataataaagaaattgaaaacaatacattaatataccataacactaaaaagagcaggagcgagagatgagaaagggaatccagcccgctctggagcagtacctggtgaccgccgggggtggggagggggcggctgtcgtcgccgccgccgctgcagcctccatggacaaaagggcactgctagccagccccggcttcgccgccgccgccgccgctgccgccgccccgggcgcgtacatccagatcctcaccacgaacacttccaccacctcctgttcctcctccctccaaagcggcgccgtagccgccggccccctcctccccagtgcccccggcgcggagcagaccgccggcagcctcctctacaccacgccgcacggaccctccagcagagccgggctgctgcagcagccaccagcgctgggacgcggcggcagcggcggcggcggcggccctccggcaaagcgaaggctggagctaggagaaagcggtcatcagtacctctcagatggtttaaaaacccccaagggcaaaggaagagctgcactacgaagtccagatagtccaaaaactccaaaatctccctcagaaaaaacgcggtatgatacgtctcttggtctgctcaccaagaagttcattcagctcctgagccagtcacccgatggggtattggatttgaacaaggcagcagaagtgctaaaagtgcaaaagagaaggatttatgatatcaccaacgttctggaaggcatccacctcattaagaagaagtctaaaaacaacgtccaatggatgggctgcagtctgtctgaggatgggggcatgctggcccagtgtcaaggcctgtcaaaagaagtgaccgagctcagtcaggaagagaagaaattagatgaactgatccaaagctgcaccctggacctcaaactgttaaccgaggattcagagaatcaaaggttagcttatgttacatatcaagatattcgaaaaattagtggccttaaagaccaaactgttatagttgtgaaagcccctccagaaacaagacttgaagtgcctgactcaatagagagcctacaaatacatttggcaagtacccaagggcccattgaggtttacttatgtccagaagagactgaaacacacagtccaatgaaaacaaacaaccaagaccacaatgggaatatccctaaacccgcttccaaagacttggcttcaaccaactcaggacatagcgattgctcagtttctatgggaaacctttctcctctggcctccccagccaacctcttacagcagactgaggaccaaattccttccaacctagaaggaccgtttgtgaacttactgcctcccctgctgcaagaggactatctcctgagcctcggggaggaggaaggcatcagcgatctcttcgatgcttacgatttggaaaagctcccactggtggaagacttcatgtgtagttgattatgcttcgtgtgaactctccttaaaaaccgatatttttttatcatggaaccagaacatctgtcatgcagtgttgtcccttcctaccttcttcctccaagagagtatcatgaagtaaactacaaacttcagaagaaagctgacattttaatgaattttttaaaaaattaataaacaaattgtctaaacgcacagttgcaggctcccttgggaaagccctgctttgctccaggctccaagatctcctggctaagtcagcaagtgagaaaatgtgcaatcaggtgtctctcaccccgaattgtccttcctccttcctccccggattggcttgctgtgcctgacggatgggctgtagaatggggtctggccacctggcctgctgggaaacagcaatcttccttaatagcatttcaagccgtgccttctccgcagaatgcatgtctttgaggtctgctaatatggaatggaactgcagcaaatgcaaacttgaagtcatgcaaaagtatgaaatggatttcttcagctcttcttaggaatatttaaattactgtcataattcagtttaagctatgaactgtgtgtcccagtaggaggtcaagaaaacctccacagccttctggatgaagaacctgttttcaaatatacttgttgcagatacagaagactagtagagttctgccactctaagctgttgtggattttcctgtctccatgaaccactcccattcccccgtccccaatgtgtttgtgagtttccagttgatttgtagcaaatgcctacttagttctttgtggattgttctagacttttaatttttttagctgccatttaagcattcctgtggcacccatcaccatttcaatttaattgtttactttgaagcggtttttgcaaattcatattacttaagcagagggagagaacctctactgatcagagcatctaaacctgtgtgatctaaggtttatcagcctctgcaaggagctttgtcccatcgtgcttccattcccaggagggggagcttggagcgagtcagtcctggggcttgctgacatgggtggcccattggaaaggagaaccaggtcagatgatgtaacagccccaaggagcagcaggcatgggtccctccatccttgggcttcccgggcccctgtgacaggggaaagggctctcttacaccgcactcagggagaccacttctcaggatggggtcagatggagagacctctagggagaaagacatccccattgtgtgagtggcatttccttaagctggcaggaacagggagcagccctgtgtcgggggctggaatagttctggccagaccccgttccccttcctctatgaaggaataagttggaccaagggaagtcggggacgtaaaaaatgaagcaaaacaatgccagggtgtctcccgctttactcttcaggaatggtgtcccaagttggaggctttgtgtcagctgcaaatcctaccagttatgtccaagaatggctttccctcgggcaggtggcagcggccatctcccactgggaatatggcgtagtatctccggtccattccttggatgctaaggactgcgggaatgagggagtcagataaagaacaaacctcgaaacgaacagttaaattgaaatgctatgtgcctgacccaatggtaggcacatagtaggcactcaactcatatgtttaattgaattgaaaatatcccttaggaaaaaaaaaaaacacacaaaaaaccacaagagccccagccagtttactccaggtagatttccacaatatgcaaagtggtggtggggtcaagacagatgacaccagcactttaaactctttgtgtgggtatgcgtgggtgtatgtttgggaagaaaaacaaaggtgcagactatcttcctttttttcttcttcagcctccatccctggcctcctcccctcacacacactggacttggtacaaaatgtcggtgtggtcctagatgaagcattggggtgggggagggagagggagctttgtgttaagtgcctactggaaatgcactgtggggttttttcctgtatgggaaaccatttatgccaagcttttccccatttcccatatttatctcatctggttagctgcctctgcttccagctttgtgtaattctctttgccagctgcacaaagctgattttttccaaagtctaaagactgagctcacctggctagattgttgtgtgttttgttgaattttttcataatgtaatgccgtatttattgtttttaaaatgaaaggaatactaataagtcttaaaagttccttcatgcataagatttttttccagttactgggtttaactggtgtacattaattagatgtccatactgtattttgtttgcattaagtaattttctttttgacttagtatccggcacacaaagtgggttagtactacagtatttgcgttactttaagtactaagtatgcaggtttcctggtaccattgagttgctgctattaaagctcacacacgaaatggctaaaagttacaagtgtgcaaattatgactgcgtgagccttagaaaataaaatgtataaagggcaacacatgagctgtcaaacagtgttaggagtgtgtttatatgtacagagttgtgcatagcaatcgttttatttaagttgatatgtagtctactcacattttcattatttagcaattttgtacaaaaatagcaattaatttgtaaacactgccagaatactttctagctgctttgtaattttttaagagtgttattttgtttttgtttttctgttctttgttgtggctcttgttttcatttttgttgtacgtgtagatctgtaaataaaattgcagtatttaaagcttaagctttcaggaaaaagaaaataagaattcagtgtgtgcatgacaactcgtgtgtatgagaaggagggatatgaaggaagatggcttgcagagtaagtcgggtggcaattgtcagggtgtgggaatttcttttcctacggggtacgtgattttgtaaaaaggaagtatttctcccaaaattgggagtaggcaaactactaatcagtttagctttgtgttgtatgctagtttaaaaaagaaaatatgtaatataatgtaaaaaaaaacaaaaaaaagcttttatgatggattttgtaaatagatttgttacagggtgacctgttctctagctgtgatcttaccacttcaaatgggtgtaatttgaataaattttgtatggtaaaggatcaataaaatgattttttttaag

SEQ ID NO: 9166 - DNA, 4094 bp, Homo sapiens
  source 1..4094: mol_type = unassigned DNA
gccatttttcagctgccggccgcagcacccgggctgccgccgccgcctcgcaatccgttgcatcggccgcccccgacgcctccatccccgcttggggcccgatatccgtgcggccgggaccctcctctctccagagccccgattatttttggcccccggggcctgtgcggtgcggaaaaataaaaagaaaagagagagagggggctcggaagcgccgggcggggaggagagaaggaggagagacttggaaactccgactgcaaataataaagaaattgaaaacaatacattaatataccataacactaaaaagagcaggagcgagagatgagaaagggaatccagcccgctctggagcagtacctggtgaccgccgggggtggggagggggcggctgtcgtcgccgccgccgctgcagcctccatggacaaaagggcactgctagccagcggcggcggcggcggccctccggcaaagcgaaggctggagctaggagaaagcggtcatcagtacctctcagatggtttaaaaacccccaagggcaaaggaagagctgcactacgaagtccagatagtccaaaaaaaaaaacgcggtatgatacgtctcttggtctgctcaccaagaagttcattcagctcctgagccagtcacccgatggggtattggatttgaacaaggcagcagaagtgctaaaagtgcaaaagagaaggatttatgatatcaccaacgttctggaaggcatcagcgatctcttcgatgcttacgatttggaaaagctcccactggtggaagacttcatgtgtagttgattatgcttcgtgtgaactctccttaaaaaccgatatttttttatcatggaaccagaacatctgtcatgcagtgttgtcccttcctaccttcttcctccaagagagtatcatgaagtaaactacaaacttcagaagaaagctgacattttaatgaattttttaaaaaattaataaacaaattgtctaaacgcacagttgcaggctcccttgggaaagccctgctttgctccaggctccaagatctcctggctaagtcagcaagtgagaaaatgtgcaatcaggtgtctctcaccccgaattgtccttcctccttcctccccggattggcttgctgtgcctgacggatgggctgtagaatggggtctggccacctggcctgctgggaaacagcaatcttccttaatagcatttcaagccgtgccttctccgcagaatgcatgtctttgaggtctgctaatatggaatggaactgcagcaaatgcaaacttgaagtcatgcaaaagtatgaaatggatttcttcagctcttcttaggaatatttaaattactgtcataattcagtttaagctatgaactgtgtgtcccagtaggaggtcaagaaaacctccacagccttctggatgaagaacctgttttcaaatatacttgttgcagatacagaagactagtagagttctgccactctaagctgttgtggattttcctgtctccatgaaccactcccattcccccgtccccaatgtgtttgtgagtttccagttgatttgtagcaaatgcctacttagttctttgtggattgttctagacttttaatttttttagctgccatttaagcattcctgtggcacccatcaccatttcaatttaattgtttactttgaagcggtttttgcaaattcatattacttaagcagagggagagaacctctactgatcagagcatctaaacctgtgtgatctaaggtttatcagcctctgcaaggagctttgtcccatcgtgcttccattcccaggagggggagcttggagcgagtcagtcctggggcttgctgacatgggtggcccattggaaaggagaaccaggtcagatgatgtaacagccccaaggagcagcaggcatgggtccctccatccttgggcttcccgggcccctgtgacaggggaaagggctctcttacaccgcactcagggagaccacttctcaggatggggtcagatggagagacctctagggagaaagacatccccattgtgtgagtggcatttccttaagctggcaggaacagggagcagccctgtgtcgggggctggaatagttctggccagaccccgttccccttcctctatgaaggaataagttggaccaagggaagtcggggacgtaaaaaatgaagcaaaacaatgccagggtgtctcccgctttactcttcaggaatggtgtcccaagttggaggctttgtgtcagctgcaaatcctaccagttatgtccaagaatggctttccctcgggcaggtggcagcggccatctcccactgggaatatggcgtagtatctccggtccattccttggatgctaaggactgcgggaatgagggagtcagataaagaacaaacctcgaaacgaacagttaaattgaaatgctatgtgcctgacccaatggtaggcacatagtaggcactcaactcatatgtttaattgaattgaaaatatcccttaggaaaaaaaaaaaacacacaaaaaaccacaagagccccagccagtttactccaggtagatttccacaatatgcaaagtggtggtggggtcaagacagatgacaccagcactttaaactctttgtgtgggtatgcgtgggtgtatgtttgggaagaaaaacaaaggtgcagactatcttcctttttttcttcttcagcctccatccctggcctcctcccctcacacacactggacttggtacaaaatgtcggtgtggtcctagatgaagcattggggtgggggagggagagggagctttgtgttaagtgcctactggaaatgcactgtggggttttttcctgtatgggaaaccatttatgccaagcttttccccatttcccatatttatctcatctggttagctgcctctgcttccagctttgtgtaattctctttgccagctgcacaaagctgattttttccaaagtctaaagactgagctcacctggctagattgttgtgtgttttgttgaattttttcataatgtaatgccgtatttattgtttttaaaatgaaaggaatactaataagtcttaaaagttccttcatgcataagatttttttccagttactgggtttaactggtgtacattaattagatgtccatactgtattttgtttgcattaagtaattttctttttgacttagtatccggcacacaaagtgggttagtactacagtatttgcgttactttaagtactaagtatgcaggtttcctggtaccattgagttgctgctattaaagctcacacacgaaatggctaaaagttacaagtgtgcaaattatgactgcgtgagccttagaaaataaaatgtataaagggcaacacatgagctgtcaaacagtgttaggagtgtgtttatatgtacagagttgtgcatagcaatcgttttatttaagttgatatgtagtctactcacattttcattatttagcaattttgtacaaaaatagcaattaatttgtaaacactgccagaatactttctagctgctttgtaattttttaagagtgttattttgtttttgtttttctgttctttgttgtggctcttgttttcatttttgttgtacgtgtagatctgtaaataaaattgcagtatttaaagcttaagctttcaggaaaaagaaaataagaattcagtgtgtgcatgacaactcgtgtgtatgagaaggagggatatgaaggaagatggcttgcagagtaagtcgggtggcaattgtcagggtgtgggaatttcttttcctacggggtacgtgattttgtaaaaaggaagtatttctcccaaaattgggagtaggcaaactactaatcagtttagctttgtgttgtatgctagtttaaaaaagaaaatatgtaatataatgtaaaaaaaaacaaaaaaaagcttttatgatggattttgtaaatagatttgttacagggtgacctgttctctagctgtgatcttaccacttcaaatgggtgtaatttgaataaattttgtatggtaaaggatcaataaaatgattttttttaagagtt

SEQ ID NO: 9167 - DNA, 4145 bp, Homo sapiens
  source 1..4145: mol_type = unassigned DNA
ctggtttcggaaatgcccttacagcagcaggcaaagcgaaggctggagctaggagaaagcggtcatcagtacctctcagatggtttaaaaacccccaagggcaaaggaagagctgcactacgaagtccagatagtccaaaaaaaaaaacgcggtatgatacgtctcttggtctgctcaccaagaagttcattcagctcctgagccagtcacccgatggggtattggatttgaacaaggcagcagaagtgctaaaagtgcaaaagagaaggatttatgatatcaccaacgttctggaaggcatccacctcattaagaagaagtctaaaaacaacgtccaatggatgggctgcagtctgtctgaggatgggggcatgctggcccagtgtcaaggcctgtcaaaagaagtgaccgagctcagtcaggaagagaagaaattagatgaactgatccaaagctgcaccctggacctcaaactgttaaccgaggattcagagaatcaaaggttagcttatgttacatatcaagatattcgaaaaattagtggccttaaagaccaaactgttatagttgtgaaagcccctccagaaacaagacttgaagtgcctgactcaatagagagcctacaaatacatttggcaagtacccaagggcccattgaggtttacttatgtccagaagagactgaaacacacagtccaatgaaaacaaacaaccaagaccacaatgggaatatccctaaacccgcttccaaagacttggcttcaaccaactcaggacatagcgattgctcagtttctatgggaaacctttctcctctggcctccccagccaacctcttacagcagactgaggaccaaattccttccaacctagaaggaccgtttgtgaacttactgcctcccctgctgcaagaggactatctcctgagcctcggggaggaggaaggcatcagcgatctcttcgatgcttacgatttggaaaagctcccactggtggaagacttcatgtgtagttgattatgcttcgtgtgaactctccttaaaaaccgatatttttttatcatggaaccagaacatctgtcatgcagtgttgtcccttcctaccttcttcctccaagagagtatcatgaagtaaactacaaacttcagaagaaagctgacattttaatgaattttttaaaaaattaataaacaaattgtctaaacgcacagttgcaggctcccttgggaaagccctgctttgctccaggctccaagatctcctggctaagtcagcaagtgagaaaatgtgcaatcaggtgtctctcaccccgaattgtccttcctccttcctccccggattggcttgctgtgcctgacggatgggctgtagaatggggtctggccacctggcctgctgggaaacagcaatcttccttaatagcatttcaagccgtgccttctccgcagaatgcatgtctttgaggtctgctaatatggaatggaactgcagcaaatgcaaacttgaagtcatgcaaaagtatgaaatggatttcttcagctcttcttaggaatatttaaattactgtcataattcagtttaagctatgaactgtgtgtcccagtaggaggtcaagaaaacctccacagccttctggatgaagaacctgttttcaaatatacttgttgcagatacagaagactagtagagttctgccactctaagctgttgtggattttcctgtctccatgaaccactcccattcccccgtccccaatgtgtttgtgagtttccagttgatttgtagcaaatgcctacttagttctttgtggattgttctagacttttaatttttttagctgccatttaagcattcctgtggcacccatcaccatttcaatttaattgtttactttgaagcggtttttgcaaattcatattacttaagcagagggagagaacctctactgatcagagcatctaaacctgtgtgatctaaggtttatcagcctctgcaaggagctttgtcccatcgtgcttccattcccaggagggggagcttggagcgagtcagtcctggggcttgctgacatgggtggcccattggaaaggagaaccaggtcagatgatgtaacagccccaaggagcagcaggcatgggtccctccatccttgggcttcccgggcccctgtgacaggggaaagggctctcttacaccgcactcagggagaccacttctcaggatggggtcagatggagagacctctagggagaaagacatccccattgtgtgagtggcatttccttaagctggcaggaacagggagcagccctgtgtcgggggctggaatagttctggccagaccccgttccccttcctctatgaaggaataagttggaccaagggaagtcggggacgtaaaaaatgaagcaaaacaatgccagggtgtctcccgctttactcttcaggaatggtgtcccaagttggaggctttgtgtcagctgcaaatcctaccagttatgtccaagaatggctttccctcgggcaggtggcagcggccatctcccactgggaatatggcgtagtatctccggtccattccttggatgctaaggactgcgggaatgagggagtcagataaagaacaaacctcgaaacgaacagttaaattgaaatgctatgtgcctgacccaatggtaggcacatagtaggcactcaactcatatgtttaattgaattgaaaatatcccttaggaaaaaaaaaaaacacacaaaaaaccacaagagccccagccagtttactccaggtagatttccacaatatgcaaagtggtggtggggtcaagacagatgacaccagcactttaaactctttgtgtgggtatgcgtgggtgtatgtttgggaagaaaaacaaaggtgcagactatcttcctttttttcttcttcagcctccatccctggcctcctcccctcacacacactggacttggtacaaaatgtcggtgtggtcctagatgaagcattggggtgggggagggagagggagctttgtgttaagtgcctactggaaatgcactgtggggttttttcctgtatgggaaaccatttatgccaagcttttccccatttcccatatttatctcatctggttagctgcctctgcttccagctttgtgtaattctctttgccagctgcacaaagctgattttttccaaagtctaaagactgagctcacctggctagattgttgtgtgttttgttgaattttttcataatgtaatgccgtatttattgtttttaaaatgaaaggaatactaataagtcttaaaagttccttcatgcataagatttttttccagttactgggtttaactggtgtacattaattagatgtccatactgtattttgtttgcattaagtaattttctttttgacttagtatccggcacacaaagtgggttagtactacagtatttgcgttactttaagtactaagtatgcaggtttcctggtaccattgagttgctgctattaaagctcacacacgaaatggctaaaagttacaagtgtgcaaattatgactgcgtgagccttagaaaataaaatgtataaagggcaacacatgagctgtcaaacagtgttaggagtgtgtttatatgtacagagttgtgcatagcaatcgttttatttaagttgatatgtagtctactcacattttcattatttagcaattttgtacaaaaatagcaattaatttgtaaacactgccagaatactttctagctgctttgtaattttttaagagtgttattttgtttttgtttttctgttctttgttgtggctcttgttttcatttttgttgtacgtgtagatctgtaaataaaattgcagtatttaaagcttaagctttcaggaaaaagaaaataagaattcagtgtgtgcatgacaactcgtgtgtatgagaaggagggatatgaaggaagatggcttgcagagtaagtcgggtggcaattgtcagggtgtgggaatttcttttcctacggggtacgtgattttgtaaaaaggaagtatttctcccaaaattgggagtaggcaaactactaatcagtttagctttgtgttgtatgctagtttaaaaaagaaaatatgtaatataatgt

SEQ ID NO: 9168 - DNA, 5740 bp, Homo sapiens
  source 1..5740: mol_type = unassigned DNA
gttttagcggggactacgatccaggctggagttgcgctcggccggtctgagcgctggcgctgcccggacgccgcggggtccccgccagcccagggcactcggcgcggggatctgcgcgcctcgctctcccttcccgatgccgccgcccggctgctgatcgccgcaccaccttccctcatcggcttgggtccgtggaggtccctgcagaggcaggaagcctccttaggaaagcagggatggaggtaaattgtttaacactaaaagacctgatcagccccaggcagcccagactagattttgcagttgaagatggggaaaatgcacaaaaggaaaatatatttgttgatcgatcaaggatggccccgaagactccaataaaaaatgaaccaattgatttatcgaagcaaaaaaaatttactccagaaagaaatcccattactccagttaagtttgttgacagacagcaagcggaaccatggacacccacagctaacctgaagatgctcattagtgctgccagcccagatataagggaccgggagaagaaaaagggactattccgacccattgaaaacaaggacgatgcatttacagattctctacagcttgatgttgttggggacagtgctgtggacgaatttgaaaagcaaaggccaagcagaaaacagaaaagtttaggactcctgtgccagaagtttctagctcgctatccaagttatcccttgtcaactgagaaaactaccatctccctagatgaagttgctgtcagtcttggtgtggaaaggagacgcatctatgacattgtaaatgtgctggagtcgctgcatctggtcagccgggtggctaagaatcagtatggctggcatggacggcacagcctgccaaaaaccctgaggaacctccagagactaggagaggagcagaaatatgaagagcaaatggcctacctccaacagaaagagctggacctgatagattataaatttggagaacgtaaaaaagatggtgatccagattcccaggaacaacagttactggatttctctgaacccgactgtccctcttcatctgcaaacagtagaaaagacaagtctctgagaattatgagccagaagtttgtcatgctgttcctcgtctccaaaaccaagattgtcactctggatgtggctgccaaaatactgatagaagaaagccaagatgccccagaccatagtaaatttaaaacaaaggtacgacgcctctatgacatagccaatgttctgaccagcttggctctgataaagaaagtgcatgtaacagaagagcgaggtcgtaaaccagccttcaagtggatcgggcctgtggacttcagctcaagtgatgaagaactggtggatgtttctgcatctgtcttaccagaattgaaaagagaaacatatggccagattcaagtctgtgcaaaacagaagctggctcgccatggttcttttaacacagttcaggcttctgagaggatccagaggaaagtgaactcagaaccgagcagcccgtacagagaagaacaaggatcaggtggctactctttagaaattggaagcctggcagctgtctatagacagaaaatagaagacaattcacagggaaaagcctttgccagtaagagagtggtgcctccatcaagcagcttggaccctgttgctcctttccctgtcctctctgttgacccagaatattgtgttaatcctttagcccacccagtattttctgttgctcagacggacctgcaggcattctccatgcagaacggtctgaatggacaagtggatgtctcacttgcttctgcagcctctgctgtggagagcctgaagccagcactccttgctggccagcctctagtgtatgtgccctctgcctcactgttcatgctgtatggaagtctgcaggagggaccagcgtcagggtcagggtcagagagggatgacagaagctcagaagccccagccacagtagagctgtcatctgcaccctcagctcagaagcgcctctgtgaggagaggaaacctcaggaggaggatgagccagccactaaaaggcaaagtagggaatatgaagacggcccgctgtcgcttgtcatgcccaagaaaccctcagattccacagaccttgcctctcccaagactatgggtaacagggcatctatacccctcaaagacattcatgtgaatggccaactccctgctgcagaagagatttcaggaaaggcaacagcaaactctcttgtttcttctgagtggggaaatccttcaagaaatacagatgttgaaaagccttcaaaagaaaatgaaagcaccaaagagccttctttgctacaatatctttgtgtgcagtctcctgcaggattaaatggtttcaatgtacttttatctggcagtcaaaccccccctactgtgggcccgtcctcaggtcagctgccgtctttcagtgtcccttgcatggtcttaccatctccacctctgggcccttttcctgttctctattctcctgcaatgccgggcccggtttcttctactcttggtgctctcccaaacacaggacctgtgaatttcagcttgcctggccttggatcaatagcccagcttctcgtcggccccacagctgtggttaatccaaagtcgtccacactcccttctgcagaccctcagcttcagagtcagccctcactaaacctaagtccagtgatgtcaaggtcacacagtgtcgtccaacaacctgagtcccccgtttacgtgggacatccagtctcagtagtaaaattacatcagtcaccagttccagtgacccccaagagcatccaacgcacacatcgtgagacgtttttcaagacacccggcagccttggagaccctgtcctgaagagaagagaaaggaaccagtcacgaaacaccagctcggcccagaggagactagaaatccccagcggcggcgctgactaacctgccgctttgccaggtgggggtgggatcaaacgccctgagagtcccggatgtccgaggcgggatgcaaaccatcccgtcctgagcacgggtccttcctctctctttcatccacacttctgttaacttcccaccaccatcaatcatctgatttcctgaaagtaattaattgtgcatttaataccagttagagttccgactctgcatggtgtcacagtgaaagcgccgactgacttatggttttgattcaagaatcgtcttattctggaagtagatctgaataggctaccggagccttgtttttctaaaggggggcgctgtctagcacttaactagggtaagcattcttaacatgtatttccacttgccctgagtaaatctgtggtgagagaagcttcctttctgcagtttaaaaaagctactgcttccttaggcttcatcaggaagccaccttcagttgtgaatcctatggtgttatttattttgttcctgaaatgggatttagtgcaaaaagtttacaactacagtctttaacacatttttttcagggtatgacgacttgaatgtttatacttttattctataatttgccctgcacttattttacaacctagtaataatgtggataaatgtatctacatgacacatgtcaagaccaaaataactgtgaatgacacaccttgctgtaaatgaactgtgctaaccctgactgtgggcttgagaacaaagatgaactctagaactctagcagcctaactgctgcttctcaaataactgtgtgaacagtgagatattactgtttgtttctaaaaatcctactgtgcccagtttccttcactacatgccctgcattttttatttaaatatttagctgtagcgccatcagatatggatgccttctaacaattgctgtttgtaaaataaatcaggatggtagaaagtgattatatggaaaattggaacctggatgagaccttttcgttgaattctgaagagtaatgatgtgaaaattgatacagggcaagagatgattcttttgtttttcttctacttcatgtccagaagagtaagagggaaaatggacatatgtttcatatccaagggtattcaaactgtagttagttggtacctctgaaaaatgagaatggtgagcgcacgggttggttgttctagcatgaatacaattctggaaactgttatgcaatttcccttttttaacccacattactttaggggtgcattaagtcgccaaactatactagttctttgtattcctagacttgctgatatttacctctctcttgtctcttcagagtaaatggttcccttctttccttcctactttccttcattctctcttccttccctccttcctacttcttttcttccttcctcttcctctcttaaaactatcttagatgtagaatcctggtgtagggttttattttatttttattttttgacccaataaaatgttatatgaaagaatgaaaatattaatttaagagactctgggagtctgaataaagtagctttatattaactacaggataatattagccttattacccccacaagattttttaaaacttgaggtaggtagctacattaaataaatttgctacttatataaaaatttttatcaacactaaacttttaaagtttacaagttttttttttcttttttacagtcttctatagagttaggttaaaaatgtggttctaaccatcaacaattgcatggttaaatgaccctgaactaaaactgatgggttccctatcaaaacaaataaaaatatacctttttcaggtttcaatctgtgcagggtatatgcatgttaattctaccatgcttaagaacttccacaaaatatttcatggagaggtctgcatttagacggaaacagaaattgcttttcccctcactgttcctgaatgctctatacttgttttaacatttttgctatctttttttattattctgatcatgatatgaccatttaacctcagaattcataattcctgaggggtgttaagaagcagtcccattggtgaggatattatgacttggtgaccattcttaggagtagaaaaccaaggacaattgcttctgtattcagtatccacttcttaatgtggctttatatgtaaaaataataatgcagtggttgtttctgtcaggaaaataaatcttacagaacaactggtggaattgaagctgctgcgctagacttggatattttgggtagtgaagaagcaatggcaatcttgagtctattattgtataatttagtaaaagaaaaaaataatcgttggtggtcctactaagagaatgcagcttttttgagttgtcacagaggctgtgtgtgccctacactgaccagggtttgtaaaaccctttcattctggtacaagagtcgggggtataacttttatacttgaatctacctaccaagtttacatttctcaattcctttttgtaaggtgctatttctgtatttaaataactttcttttaacgtaaagctgctttctgcttatcttattgcactgctagttgtatgtaggtattaattttattgctgcttactgcttttgttttcttattatttagctctgctctttttcctaatggctatattatctatagctatttacttgtaactgtactacatgtaaactgattttttgttctgattttttttctaatatttttaggaaaatattaagctttataaaatagcaataaaaaataattcatttaagaag
